United States Patent Application Publication US 2004/0031072 A1 - sequence listing, part 8

SEQ ID NO: 33225 - DNA, 984 bp, Glycine max
  unsure (1)..(984): unsure at all n locations
  Clone ID: PAT_MRT3847_130005C.1
tccggnnaaatcccggctcgaaataattcgtggtgtttgttcttcttctcttatcaaagtacataacatagcggaaatttcacaccagagaaattaattgcaatgggaagttattttctgaaaatcatgtttgcagtgttactgcgcttgcttttcgcataccatagtatccattcttggattcaactcaccatcacagagctcacatgtgaaatgcattgagagggagagacaagcactcctcaacttcaaaaaaaagtctaagatatctcaatctatcagtgttgggtttggtgggaggattcctcatcaaccgggaaatctctcaaagttggagtatcttgatctgaaaatcaatagtcttgatggagcaatcccttctcaactagggaagcttacaagtttacgatatctagatctaagtcacaattatcgtatccatggagaaattccttatcaacttggatatctgtcacagttgaggtatcctgctcttcaaaaaatttcactttctggagtaatcccttttcaggttggaaatcttcctatcttgcatactcttagacttgatggcaattttgatcttaaaattaacagtgcaaagtggctatcttctctctcatcattaacaactcttgtccaggaatcattgtctacaaataattaattagcttattccaaacttaagagagttgagactagttaactgtagtctttcagatgataatatttcatctttgtttcaatctcattcaaaattttcagtttctcattccatccttgatctctcagataagttggatgaatatgtcttacaacagtctcaaaggtacaattccaaattttccaatcaaacttatagatggttatacatttataattctaaattcaaatcaatttgaaggtgaaattcctacttatttttcacaagcttacacattggatctttccaaatataagatttcagatttgaaggcattcttg

SEQ ID NO: 33226 - DNA, 248 bp, Glycine max
  unsure (1)..(248): unsure at all n locations
  Clone ID: PAT_MRT3847_130006C.1
tgcatatcttcactgaaaacttgagtgtcaccaactccatcttccaacatcatctggcacacaacataaaaaactaaaaacatcacaanctttcttattacttgaagtccatgcgtgtgtatattggcgaaaacccaagtcctacattggctagagataaaaccaagatatattataccagtgaaagacaattctagccctatgagctagcttctgggattgagctagacccagacccacgattctaa

SEQ ID NO: 33227 - DNA, 251 bp, Glycine max
  Clone ID: PAT_MRT3847_130007C.1
acccctctattttatctaattgatgacacatctcttccattgcaagtttttttctcagaaaaagaaggactatttttcttccctaacccacactcccatttctaagatcatttttcccaatccttatcactcaatatatctcgtatcaccctttactttattctacatataaactctcttacatgactgatatatacatcctatttatccctctaatcacttatacagtcccatccaactcacattacaat

SEQ ID NO: 33228 - DNA, 202 bp, Glycine max
  Clone ID: PAT_MRT3847_130008C.1
gcatgctctgcattaattgaatctggccaacagcgcaggtggagagtgctggtttgctgtatttgtggcagctccttggcgcattggcgtcgcatcacgtgaacttcgcatgtcgcctcgagtcgtctcagggctgcatggcgatgcgtgttatcatgcctcacttcaaaaggcgagtaaataccggctcatccaccagatt

SEQ ID NO: 33229 - DNA, 491 bp, Glycine max
  Clone ID: PAT_MRT3847_130009C.1
gccttgtcgaacgcttcccgcaggtgcgtgaagccggccagggcgggctcatcggcgaacttcgcctcgttggcggtgaagtcctcggcccagttcgcgtcctgcgcgagcacgttgccgaaatccgcgaggaggaagagctgcgacgtccaggtgtcgccgtaggtctgctcgatgggagtgatcccggccgccttgatcttctcggcggcggcgacgagcgaagaccagtcggtcggcacgctcaggccgaggtcggagaagacctttttgttgtacgcgataccgcccgccatcgaggtgcccagcggagcaccgtaggtgccgttgtcggtggacaccacggtcgtgaagttgtcggtgacctccgacgcccagggctggtcggccagattcgtcagggtttgatcggggttgagcgcgccgaaaagggaaccggtgttgtagaagaagacgtcgtccatctcggcggtggagagctgcgtcttgac

SEQ ID NO: 33230 - DNA, 371 bp, Glycine max
  Clone ID: PAT_MRT3847_13000C.1
atggccatacacatttgaatttattgttaaatagggaaacagcttcaaatagcatgtaatcccactatgccactcataaactaaaacttgctcaagccaaaaaaagctgactacggaacacttgcaaagaacatattaaattttggattcctggagaaccaggatgctaatatagaaaggagcgaggagaacccatgtttcagtttttctgcatttgccactgttcggaaaacaatcatactgtgaatgactaacacaatcagatttctttgggacccaccctatgaatctacttatttggcgcaaacaaccggtgtcaggaccattctttaagtaccttgcgatggacatcatacaggcaaatggaaggc

SEQ ID NO: 33231 - DNA, 364 bp, Glycine max
  Clone ID: PAT_MRT3847_130010C.1
ttcttctctttcttttcacacccaacaatgtcattccctcttcccataaaaccactgcttccacttttctcctttcaccctcacttccccttttcttccaccatcataacgatgtacggcgcgcgagcccaccaccaccaccttctagaagacttccgcaacccgcagctagggctgggccagggcccgcgtgggcctatcctgctgcaccctgcggctatcatcgaggagcgccttgcggcccatatcatctagaagtcaagagttgcggtgtgcaagagctgccattgactatgagaagaagggatttgtggaaaactatgaacatggtcatgtgatggagaagaagttggttgcaatggct

SEQ ID NO: 33232 - DNA, 403 bp, Glycine max
  Clone ID: PAT_MRT3847_130011C.1
gctgcgagaagacaacagaaggatacggctgcgagaagactacagaagggtacggctgcgagaggacgacagaagggtacggttgcgagaagacgacagaagggtactgctgcgagaagacgacagaaggggcacacaaactttattacagttggtgtattggaattaaacatgaatattaagcaatggagtcttataaaacttgaactactctagctctttttttaaccataaattggcttttctttgacatggcaagtggctggtacacttgcacacagtctaagcctaaccttatcccattccattaccctaaccgtagtactggctggaatagctgtcacagggacgcacttaagcttggattgtgcgcaaacgtgcttaatggaccaatttgttctat

SEQ ID NO: 33233 - DNA, 639 bp, Glycine max
  unsure (1)..(639): unsure at all n locations
  Clone ID: PAT_MRT3847_130012C.1
ggctcgagcaagggtactccacagacaagagaaagaaagaaaaccccatttaaagcttttttctttttgtactgtgcacatcacaagaagaacaaagatgggtttttgaaccatcacatgataaaagagagagaaacaaaaaaagaaatagggatattggagaaaaacaagaagtagctgcgcaagtggaagaagaagaagatgaaggaggagaatgaatgaggtgaggcgtgttgttattcttgttgttgttgctgaaatgggtctgttgaacacaagtgcatgtatttgaccactagtgtgttaaagctcagatctttgtcttttgttctcccacctggtattttgagtccttccttaactgaaacccattttgttggtgtttttttttggggtattgctgaatttttcttgtaccaacttgttggggttgatttagatgaaggccgtgcccctaccctatcaggaatttagagggaacggngtgctagattttgcttctggtgctgctgctgctgtttcagattcgttgctacttccacagcangagcaatttctgcaaggtggaacccccaaagggaaaacttttgctatgtgggcattgacccttttctgttttgaccggataggaaaacagca

SEQ ID NO: 33234 - DNA, 386 bp, Glycine max
  Clone ID: PAT_MRT3847_130013C.1
gggaaaaaccgcttaaggcttttcccatggcaaaatttgaactggccaacattttaacatgatctaatgctaaaattgggcaacccccaggaaaaagcttttaaatggcttttaacctaaaaatgtaatacagtttgtttcctccccaaccccccgcaaatgtagaaagaaaaaaataataaatcttctccccccgggggcgaatcccctttttggtttataaagggcccgcagggaccctctttccaaaattttgttacaaggaaacacaggcaaattttaatttttttaaacaagtttgggcggaaggcactttgtcagaactcccatatgccttatgaatctgaaaccccctcaacggggggggggaaaaaagaagttttgtt

SEQ ID NO: 33235 - DNA, 250 bp, Glycine max
  Clone ID: PAT_MRT3847_130014C.1
gagctcggaattcggctcgagcttctcttttttagaatcttttgtattgtcgctcgaggtgtttcactttgtgggggcctgtttaagatcgccgaggctgtaccaccatcacaacgggacacgtccacgattctcacggttacttggtgctactggagtataatacgctgacatatgcccaggccgcgtatggcagggggagaccttctgcccaggcttctgattaattatgatgcctgcatcacagatg

SEQ ID NO: 33236 - DNA, 758 bp, Glycine max
  Clone ID: PAT_MRT3847_130015C.1
ccacgcgtccgcagcaccataatcatgtgtgcaaccttcaacattcttgttctcttgttatcacttttactcacttcttcttcttcttttttacagcctcgccgtgttctccatcaaccactttttccgacaatctctgttccgccagcagaagctccaagttatttacctcctgagcctcaaccaaagcaacaacaccaacccaagattccattttcttctatttcatcatcttcaccacctccgccgcagaaacctttcttcccttcttaccattctccgccattgccaccttctcccgccgtcgtcgccacttttccggccaacatctcctccctcctcctcccccaccccgtctcccgccaccaccgctccgccgccgccctcgccgtctctctctctctctgctccctcgccctcctcgcagccgtcgtcgccttcctcctccaccaccaccgccgtacacactcctcctccgatgacaacgacgacgacaaagcctcgagatcggatagcctccgcctgttcccgccgaacaccgacgcctccgacggcgccgaccgcaaaccccacgataaagccagccccacatcggagcttctttacctcggcacggtggcgaactcggtcatcaccaccaccaccaccacaacaacaacaaccatagactcaagctccagccaccacgaaattttccggccagcgtatcagaaattcggcgactcgccggagctcaacccgctgccgccactgccacg

SEQ ID NO: 33237 - DNA, 244 bp, Glycine max
  Clone ID: PAT_MRT3847_130016C.1
ttggggggggggggggggggcaagggggggaaggtgggagaatgagtgaacgccatacagcttgaagcttccgtaagaagactgtaaatatccaatccgaccagcaaatgctagaataagatgtaagtgagcgatgagcgctttagccgtaaaccgcctagaaccgtgtaagcgattgcataagcatagcaccaaaacggtaagtcgtcatgcttgtagaggtggtgttattgctccatggtgg

SEQ ID NO: 33238 - DNA, 232 bp, Glycine max
  unsure (1)..(232): unsure at all n locations
  Clone ID: PAT_MRT3847_130017C.1
tcaaagttgtccccccgtgtgattgtgtgattatacatcaggagctgtacgtgacaagatggtgctgccgctatttactgnttcattcccctttgcctttatttccgaatggattgntaagcagtttccttccaaccggtcccgggncattncctttgggtccatncaacatttatggaaactggggccttcctggaaaaaataataantngaaaggggaaatnctggtnaa

SEQ ID NO: 33239 - DNA, 1238 bp, Glycine max
  Clone ID: PAT_MRT3847_130018C.1
attcttctgcgctccaattatgtcatttgccgctcttttagcaatacttttactactcatgtcctttgagctaggaagtgctgcccagcctagtattaaactcgggtgaggagaaatagggtacaaagaaagaagaaggaggggctgagtgtttcaactgagagttatgaagaccattccagaagctagtagtgagatattttcataaaaaaatggcaaggttgtcctagtgttgggtccagaactttcctacttgctctcaaactctcaagacccttctccagctttcacatccactctctatatattgaacaattctcacatctgaccctcatcaacacctgaaagtctaaatcgatccttgttgctcaaacccacatttcctaatcccaatggctcaagcactatcaacttcatcactactactatcacaaaaaacagggtcctacgtcaaaccacagaacaatgtaattgtaccctgcatggcctcttttccatcaaggaaggaatttccaaggctaggaagggtgagagctcaggcttctggtgataacaaagacaactctgtggaagtacaacatgttaacaagggtgaccaaggaaccgcggttgagaagaagccacgtagaactgccatggacatttcaccatttggtatcttggacccgtggtcacccatgaggagcatgcgccagatattggacaccatggaccgagttttcgaagataccatgacattccctggaagaaacataggaggaggggagatccgtgccccttgggacatcaaagatgaagaacatgaaatcagaatgaggtttgacatgccgggtcttgccaaggaagatgttaaggtatcagtggaggatgatatgcttgttataaaaggtggccacaaaagtgaacaagaacatggtggagatgattcttggtcaagcaggacctatagttcctatgatacccgtttaaagctgccggataattgcgagaaggacaaggttaaggcagagttgaaaaatggtgtgctttatatcaccattcctaagaccaaggttgaacgtaaggttattgatgtccaagttcagtgagatatgcttgggctttgtattatgcaacacggttttttaccatgtttttacgtttttaacatatatacacccattataagggttaaatatgttgtattaagcgtagagaagtttaaataaaactgctgttgtataattttctaatgtcaa

SEQ ID NO: 33240 - DNA, 614 bp, Glycine max
  unsure (1)..(614): unsure at all n locations
  Clone ID: PAT_MRT3847_130019C.1
acgaaaatatctgtatcatgctttacttggtaaatgaatggaaaagattcgacggtacattgtacaataaaactcgctgatgtttggctatatgaatcagtataaaggttatgtatgaaccaagcagaattgatgtaacaagaacaactggacactaagttgtggctcaaattgtatacattgatggggttattcctatcaggtatattcgtcaaaagatggctagtgatacaaccaggtatattcctttttatgatgattcaggaaactattgtcacagtgcatggcaataagtatcctgcagaatcctcgacatgacaaagttgtagaagaaaagcagacccgcaccccataaaccattttttttctttcattctagtgcggccttgcctcatggccgagccgggtgctgcaagcctgtaacattctattactttctctaagcaataattntgcatgtttagcctaaacctataaaattcaatcttccatttctattaaaaaatnacagttattgtggagtaaaaggtgaaggcaatcccttggcatgctgactctccagctcaagaagcatcaatgattcctgcctctgatagcgatttctcttggcagct

SEQ ID NO: 33241 - DNA, 484 bp, Glycine max
  unsure (1)..(484): unsure at all n locations
  Clone ID: PAT_MRT3847_13001C.1
cttttcccttccacacaaatacatcacatcattgccattgctctctctctctctctctctctctcgtgcggacacaatttttgatggggatatacctcagcactcccaaaacanagaaagggcctctggaaagaaggggttgggaggaaaaacccggaaaccnaaaggccttttcggccttttcggggggttttggggcccttttccccaattggccccaggggggggcctttttggggcccccttttagcccccctttttttcccccccattgggggggggaaaaaaaaaaaaaaaaaaaaccccctcgtggttnaaaaaaaacactttataaacccccccccctttttttttttttttttttttttttttttttttggggggggggggggtttttttccaacaaaaaaacaccctttttaaaaaaataaaatatcgcccccccaaaaaatatatttttggggggggggggggggcncccccc

SEQ ID NO: 33242 - DNA, 715 bp, Glycine max
  Clone ID: PAT_MRT3847_130020C.1
aattcggctcgagcaccaccataaatcaatccttgttcactcttatttcttatagctccaacaacatccctcatataaaaaaatggcctctctccgttttctcttcttagcttctttcttcattgttttgtcactttccatcaacattggtgaggtccaaggggcaaatagaaaacttttggcaccaacatttcctgatctagggaacattcctggcctggaatatcctcctctccccccaatcaccaattggccagaatacaggttgccatcatacttaagacctaattaccccgcaattcctgcaagttattaccgttacactccacctgcgaaaacaaccacaatcacatcttccaagccttgatgaccacatgcatgcaatttggtatatacatattattgttatgattgttagcatttcaaataaatcggttcatcaatatggccatgcacaagcattcgatctctctccaagtttaattattactttgtggtttattttatctgtattccttagattaatggggtgaattcaatttgcgaaatccttgttgatcccgtgatgtttctctccccattatatgttgttcacaatatttggtgaatgaatgaaaaaaaatgggcttgtttctttaatgttactagaaattaatgtatcaacactgccgagtgtggtgaaggtaaaaaaaggctggaaaatacgcgctattct

SEQ ID NO: 33243 - DNA, 157 bp, Glycine max
  Clone ID: PAT_MRT3847_130021C.1
ggcaagcttttgtgttcatacatgagaagcaaattggtcatgctgtatatgcagaggttccagaacgttatgatgaaagaaacgggcgatatacacgaattataagaaccctaccaaggcagtgtgataatgcacctatggcatatatagaacttgt

SEQ ID NO: 33244 - DNA, 153 bp, Glycine max
  Clone ID: PAT_MRT3847_130022C.1
gtgctttcctagtcttttctaatccagtgctgtgtagtgataaggaggacattgtattcaagggaatcaccagctacaggcaaccacggaccctggaacccctgacccaattttcaaaggcaccatttttggctaataaatttccaaagaaat

SEQ ID NO: 33245 - DNA, 270 bp, Glycine max
  Clone ID: PAT_MRT3847_130023C.1
ttttttttttgggctgggtttaatttttggggggggtttttttttgattgggggtttcccaatcttttggggccgttataaagcatttttgagtccgtcaacccacaaaatggcctaaggaaaacccactttcaaaaaggccctggaaaatttgaaataggaaaaactgggggggagtcctaaaaagggccctttaaattagaactcagggaaggcccccccagatatacgaggatctaccaaagggcaaaccttggttttttgttaatg

SEQ ID NO: 33246 - DNA, 1468 bp, Glycine max
  unsure (1)..(1468): unsure at all n locations
  Clone ID: PAT_MRT3847_130024C.1
gccttgcgttgcgtctgaaatttggagtgttttttcgtttgctgtgttcagctccttatggagctctcactctctccaacttcacatcgtgttccttccacaattcccactttgaatttcgctaaactatcatccactaaggccaccaagtcacaacaacctttgttcttaagattttccaaacacttcaactcaattgggttgcaccatcacagtcacagatgctgctcaaatgctgttcccgagagaccccagagacccagttccataagggcttgcactggagttggagcttctggatctgatcgtccattagctgaaagacttttagatctgaaagatgcttgttggagatttttaaggccacatactatacgtggtacagcactaggttcatttgctttggtggcaagagcattgattgagaacaccaatttgataaagtggtctctttttttcaaagctttctgtggtctttttgctctgatttgtgggaatggttatatagttggcatcaatcaaatctatgacattagcattgacaaggtaaacaaaccttatttacctatagctgctggagatctttctgtccaatctgcatggttcttggttatattttttgcagctgctggcctgtcaattgtggggttgaactttgggcccttcattttttctctttacacacttggccttttcttgggtaccatctattctgttcctccatttagaatgaaacgctttcctgttgcagcatttcttataattgccacggttcggggttttctccttaactttggtgtgtactatgccactagagctgcccttgggcttgcatttgaatggagctctcctgtggtttttatcacaacatttgtaacatttttcgcactggtaattgctataacaaaagatcttcctgatgttgaaggagatcgcaagtatcagatatcaacctttgccacaaaattaggagttcggaacattgctttccttggttctggaattttgttggtgaactatattgtttctgttttggcagcaatttatatgcctcaggctttcaggcgttggttactcataccggctcatacgatttttgcaataagcttgatttaccaggcatggatattagaacaagcaaattataccaaggatgcaatatcaggattctatcgattcatatggaatctgttctatgctgagtatgcaatatttcctttcatatagcaagccttgctacatttttcttgggaaaaggtgcatacgtgcatagttaggagagatcttctttgttgtctcaagtatcaattagtaaactagctatcattatttttttaaaatgagtattgttgtatataaatgtgtgatactatttgcttttactttgatgtaatgccattaacatatttcataatgttacattgcaanaaaaaaaaaaaaaaaaaaaaaaaaaaaggggggccccccc

SEQ ID NO: 33247 - DNA, 329 bp, Glycine max
  unsure (1)..(329): unsure at all n locations
  Clone ID: PAT_MRT3847_130025C.1
gtagangaancgtacgtaagctcggaattcggctcgagnnaagaatggngatanngacntcnctcganagtgtaagtttacnatctcntacgnagcntcngggntgntcnntaagnanctcagaaccctgnacacganacnngttncgtnangngtatngccnttnnnnncntnnnctnnnngggtccntaatncnnctctcaangnnccaattnnnagntcccgnnacccncnatnngggnaatcngggtnngggacagnanagggnangnntgnnccacatgnatnggtntnagggtttnnntggnnccggggtttgnanngccgnn

SEQ ID NO: 33248 - DNA, 354 bp, Glycine max
  Clone ID: PAT_MRT3847_130026C.1
gtccatcgtcctaatcatgatgatagcagggagcataggctgtggcctaaaacttgcagttactgctgcatttgatggtgaatcatatacagagttactgactgagcctgagagtggaacggataagggtgcggactaggttggcaattaggaaggagataagagtaggatttgaaaatgaagtggaaaatgaagcgcaagttaggccacaggataagcagctagatatggcggacagtgatgcagtcattgtgacagtaaaaggaaatggaaggggaaaggaatgggtggagcacatatggcctcacaagtggtctgcatagaaggaaatacagatggctattgaggagccta

SEQ ID NO: 33249 - DNA, 622 bp, Glycine max
  Clone ID: PAT_MRT3847_130027C.1
ctcgagccggtaacccttccatccggctcgaggtttatccactgatgaaagggaaagggtagttgggtgtgtctttgttgcaatcacagctcctttgcttcctttttttcgcattcacgcaatcaaattcaaattcgctgaaacccttcaacacaaccaatggcttcttctctcagtctctccactccccctctctgtcaccctagggtatgtaaacatttcaaattgtacaatgggttgcataagttctcattcaatggacatgggtcggattttgccgttgtccgacacaactctaaagtccccaatgctggtggtagaattagagctacattgacctctggaggaggaggagacctaggatcttatctgaagagctctggttttgtgaccaatcatttcagaactggggcacagcttgatgtcatagcatttggaacactgagagcagacacagcagtgccagcaggcagtggtttttctgatgatgaagatgaccatgatttcgatagtccaacggaaggttttgcttccataccggagggccatgaagacattatgaatggaaagatggtagtggttgtagatgatgaggaccaggaaaatgaaagagacttgataa

SEQ ID NO: 33250 - DNA, 264 bp, Glycine max
  Clone ID: PAT_MRT3847_130028C.1
tacaagcggaatggctcgagggtttcgagcaggactgtagcattctttttaacaaaatggatgcatcatcgaagggccgcatcaccctggtttttaaggcacccaatcttcttgatgaggctagttactactaacgctaaatgagaactaacaatacgttgcccgcctgatgatgacttacacccagatgagctccacagtgtgatggctctttcttcacacaagaaaaggccgtaaggaaaaaggtaacttgacatcaatact

SEQ ID NO: 33251 - DNA, 227 bp, Glycine max
  Clone ID: PAT_MRT3847_130029C.1
ggtttgtcgaagctttttgctttttgatacctgcggagaagatagcgttcattttcaaatatagagaattcaagggggcaaacttttcggatgtatgggaccggtgaattaatcatatttttaatcgtaaaaatggaaaggcagattataactgctctggtgggggtgtgaaccatcacaaaaaaaatgatgttggaaatattacaagccctgaattatttttttta

SEQ ID NO: 33252 - DNA, 247 bp, Glycine max
  unsure (1)..(247): unsure at all n locations
  Clone ID: PAT_MRT3847_13002C.1
ggcggcccgtgaacagctcgccagacactcgtcaacaaccatgtgcgacgacgacgttgctgcgctcgtagtggacaatgggtccggcatgtgcaaggccgggttcgccggggacgacgcgccccgcgccgtcttcccgtccatcgtcgggcgcccncgctaccagggctttatggtgggcatgggccataaggacagttacgtatgtgactaagcncagttcaagcatgggattttgaccgttaat

SEQ ID NO: 33253 - DNA, 465 bp, Glycine max
  Clone ID: PAT_MRT3847_130030C.1
gggaaaaaaaaccaaaattaatttaacactgggaaaccacccggacgttaaaaaaaaacaaagccgggggggggaaaaaaaaagtcctttttttttacaacaaaaaaaaaggacggggatggccaaagaagccggggagggctaaaaaaaaaaaagtccccttaatggcctaaaacggatcccaccaaaaaagggagcggctttgcctaaaaaaaaacttggaggacccttaaaatttggggagcaacccaaaaacaaacttctgaaattaaagcaactccccaggttcctcttccttttggggaacacaaaatgggtaatcctcaaacacttgggaggaaaggaaagctttttaaaaggggccccaaaagcggagggcaaaaggtaaaaaaaatcccaaacccttttgggtgggaccggggaaaaggcttttttctttttaaaccgttcccacccactcgggga

SEQ ID NO: 33254 - DNA, 386 bp, Glycine max
  Clone ID: PAT_MRT3847_130031C.1
tctgcttgtttcgtcttcgtcgatatcgaattttgactgactcctgtacaagttactggacctcgaacttccttttcccgtctcacaatcatgtccgccagagactactataaccagggaccgcctcaccctcagcatgcgtaagcgaccgtccatctccgcttatgattccgcactcgatattgggagttctatctgctcttgcgctgcgcgaccgcgcagttcaagtcaggtagggttgaagccggaatctggcttcatattaaactgtacgatagctgactcagttcgttcatttagctaccagggcggctacccgccgcagggtcactaccagcagccgcaacagccctactaccctacttaaggctatcagcaaccgtatc

SEQ ID NO: 33255 - DNA, 1518 bp, Glycine max
  unsure (1)..(1518): unsure at all n locations
  Clone ID: PAT_MRT3847_130032C.1
gcaggtaccccggtnccggnnaattccnncgggtcgacnccanncgcgtccgggaaaaagaaaagcaaattaagagggcttaggatcattttcttgttcttccttgctcagatggagtccttaaagggtgaagaagtaaagtgcgtgtgggttcagggccctatcatcgtaggagcaggaccctcagggctagccgtggccgcgtgcctctcccaccatggagtgccctacgtcattctcgagaggagccactgcatcacctccctctggcaacacagaacctacgaccgtctcaaactccacctccccaaacacttctgcgaactccccctgatgcccttccccctccatttcccaaaatacccctccaagaaccagttcatctcctacctcaactcctacgcttctcgcttcaacatccgccccaggttcaaccaatccgttcagaccgccgagttcgacccttcttctcagctttggctcgtcagaaccaacggttttcagtacatttccccgtggctcgtcgatgctaccggagagaatgctgagcctgttgttccctccatttctggcatggacatgtttcacggtcccattgttcacaccagcgtctacaaatctggttctgattacaataaccagagggtcttggtcattggctgcggcaactccggtatggaagttagcttggatctttgccgccacaacgccaacccttacatggttgcaagaaacacagtacatgttttgcctagagagatgttgggttttcgacgtttggaatagctatggctctcttgaaatggcttccaataaaggtagtagacaagttggttttggcggcggctaggttaatgttgggtgacaccgctcgttatggcgttaggaggcccaaaacggggcctatagagctcaaactagtaaccgggaaaacccctgtgcttgatgttggacaagtggctcaaataagatccggtaacataaaggtgatggaaggtgtgaaggagataacaagaaatggtgccaagtttatggatggacaagaaaaggagttcagcgctataatattggcaacgggatacaaaagcaacgtgcccacttggcttaagagctgtgaatctttcaccaaagacggaatgccgaaaactccgtttccaatgggttggaagggagagaacggattatatacagtggggttcacgagaagaggtcttcttggaactgcatcagatgccgtaaaaattgctaaagacatcgctgatcaatggatgaccgttaaggacaaatcataccgtaattcccacatcatcttgctcaagagtacataggatcacgtgcgtaatcttgtaatattgtcctggatatttttttttctacctctttacagaggttttttatttttatttttttgtgtatgtacaattttgtattttcagttcagcagcattcttgtgtctaaacttttcacctattggcttcgtttgaaacagttgcgtaaatgaaatgctatctttgttc

SEQ ID NO: 33256 - DNA, 444 bp, Glycine max
  Clone ID: PAT_MRT3847_130033C.1
attgtatgatctccaggtacaaaacactttatttataaagtggacccctgggaactaaaccctgcaaattatgagcggtgtcctccgaaagcccgacgcatccatatttttattaatactaaccttgtttttaatagagggacgaatcttatggtgggatactttctgccacctattgggagttagataggtaataacccacaggtttgacataccgcaggggactacgagttctggaacttcatattagacaggagttcctcactgttcgtttcaagagcttgtgtgagcaaacacctccctctaaaacgtgatgccgattatcgtcagacttgacgacgccttcagtgcctataggggaaaactttggaaacgctggggctttgggcaaagtttccgggaaggacgctgaattctttgcatgaggaacttggtttgagctca

SEQ ID NO: 33257 - DNA, 489 bp, Glycine max
  Clone ID: PAT_MRT3847_130034C.1
cggggggaagccggaccggaaaacccgggacgacccacgcgaccggcctcgcgaccgccagaacctaccaaaggaaggggggggcacacagacccaaaggcacaaacaaaaacgccacaagaccaccaagccgcgggccaacaggcacacaaagaaggaaagaggcacggcggaagcccccaacccaacgcaccggccaccaacatcggcgaccaacaacaggcaccgagaaacgggccaaaaaagagcgggcggcaccgcgccgccggcaaagcagaagaaaaccaaggcgcccagaggccccaaacccacagaccaaacgacaaggcaaagagaagcccgaaaaaccacgcaccgaacaaggaacccaagccgaacacagaggaaccacaaaggcagaacacaacaagaaggcacggagcaggaacaaaaaccaagaacaccgcaaggaacagcccaagaacaaggaaccacaaaagcgagaacggc

SEQ ID NO: 33258 - DNA, 263 bp, Glycine max
  Clone ID: PAT_MRT3847_130035C.1
ggttttgaaacttaatcatggtgtagaatggattacatgatgtaatgatttgagatttttctatggaaatattaaaatttcctataccaaaagaaaaagaaaaaaggtctctaaattaccaacccctattaacacctttggaaggattgatcctgaaacacaaagaatcctataatggcctcataaaagaaatataattgttaccaaggtttaagggctcccacaggttcctgagtccaatttaagaactttttccctgggtt

SEQ ID NO: 33259 - DNA, 273 bp, Glycine max
  Clone ID: PAT_MRT3847_130036C.1
caatgtaattttctaaaaaaaaaaaaaaattttaaaaaaaaaaaaaacaaaaacaaaaaaagaaaaaataaaaaaaaaattatggaccacaaccggaccgtctagactatccaatctaacctacccttcccttccacgccatagcttatctattctataacctaacttaaattcacttcactgccctttacaacacaacgactggaaaaacccatcccttacctaacttaatttacttgcattacatcccattctcgtctgatcacctaatat

SEQ ID NO: 33260 - DNA, 393 bp, Glycine max
  Clone ID: PAT_MRT3847_130037C.1
ccaaaccctcggcggctgccatacccgctgcgtgctctgttgtgtctcctcttctccgcttggcctctctccttcgccgttctttttagggctctctcaactcttctattagctgcttaaaccgtggcttacgactcagattccgatttagggcttgcgtttctggattctgccttccatgatgaaccagatctcgtgcctgatcatgcatcatggccactgtcgctagtcctgctgatcaagccactgatcagcctgctgagctatcgctggaaacatcagcccgaacctttggagattcctgagccaaccaataaggccactgggaatgactatggatcacttgattcaagaaatgcttctagtggtcatatcccattgcatgatccgtct

SEQ ID NO: 33261 - DNA, 354 bp, Glycine max
  Clone ID: PAT_MRT3847_130038C.1
gaacataagctcacttacgatagagagtatacctgaaagagctatatatcaggcggtggctcacagtctgctttgtatgtaccgcaaagatcgatgggagagtcccatagagatagatacctagattgacacctataatggatcctcaggatagggaaggacaggcctagatggagaccattctgaaggtacattctgtagaagggaagcacctgctgtaggcaatatttactatgataaaaggatacaagcaagcctagcaggtgataggagcacagtaccagaatccctcttgcgtctcgaactatctgctagcatgtgacctgattcccagagagatgaaaaaggctagaa

SEQ ID NO: 33262 - DNA, 396 bp, Glycine max
  Clone ID: PAT_MRT3847_130039C.1
ggctcgaggtaaatatcgcttgcagtagtaatggataaccaaaatgccatcgagttctttgaagggcaaaaccttggggacatgcagatatttggtaacctaagacctgtgtgtcttatgtgggcttgcgaactaggtattccagacataatatccaaccatgggaaacccattactcttcttgagttggtctcagccctgcaaattccaccatctaaggtgggttttgtgaagcgattcatgcgctttttggcacacaatagaatctttgatatccatgagagccaggaagatcatcatgaattagcgttatggcaagtgattcccgaatggtagacttggtactaaaaaattgcacttcaatttttgaggagctagattccatcgtggatgtag

SEQ ID NO: 33263 - DNA, 1561 bp, Glycine max
  Clone ID: PAT_MRT3847_13003C.1
ttcactcgtccgcccacgcgtccgcccacgcgtgcgcccacgcgtccggacacggaaaagatcctccacacaaaggagaaaaggaagtccctgaaggtgctcctgactgtttagctggcttgacttttgtgatcagtggaacactggacagtttggaacgagaagaagcagaagatttgattaaacgccatggcggccgtgtcactggatcagtcagcaagaaaacgaattatctgttatgtgatgaagatattggggggcggaagtctgaaaaagccaaacagctaggaacttccttcctcacagaggatggtttgtttgatatgattcgtggctcaaaacctgcaaaagctccttcacaagaagacaagaaacctgtgaataaggctgttgcagtagcatcccagtcaaaagtttctccgaaatcacaagttaaggtccctctgtcttcacgctcaccttctaagcaagccaagccaaagactgctactactgttcagtcttctttgatgtggactgaaaaatatcgacctaaagatccaaaggatatcatagggaatcagtcacttgtataatcactagtcttcattatcatattttgatggttatattgtgttcttatatatacctaaatttgaataataagttttcactttcttaaatgtaatggtgtacaggttttacagcttcgtaattggttgaaagcttggaatgagcattttttggacactggtaacaaaaagcagggaaaaaagcaaaatgactctggtttgaaaaaagctgtcttgttaagtggaactcctggtataggaaaaacaacttcagcaaagttggtctgccaggagcttggtttccaagccatagaggtaaatgctagtgacagccgtggaaaagctgatagcaaaattgaaaaaggaattagtggaagcaaaacaaattccgttaaggaacttgtaaccaacgaggccattggtgttaatatggaacggtcaaagcattacaaatctgtgcttattatggatgaggttgatgggatgtcagctggtgacaggggtggtgttgctgatcttattgctagcatcaagatatcaaaaattcctattatctgcatttgcaatgaccgttacagccagaaactgaaaagccttgtgaactactgtttgcttctaagttttcggaagcctacaaagcaacagatggcaaagaggttgatggatgtttcaaaggctgaaagacttcaagttaacgagattgcacttgaggaactagcagaaagagttaatggagatatgcgaatggcactaaaccagttacagtatatgagcctctctatgtcagttatcaactatgatgagattaggcagcgctttcttaccaatgcaaaagatgaagacatttcaccattcacagctgttgataagctttttggttttaatgctgggaagttgaaaatggatgagaggataaatctcagcatgagtgatcctgatcttggtcctcttattatccaggaaaattatattaattatagaccaagcttggctggtaaggatgatagtgg

SEQ ID NO: 33264 - DNA, 148 bp, Glycine max
  Clone ID: PAT_MRT3847_130040C.1
ggagatgaggaaatcatgtggcttcttcttcttgctcctactacttgtctttgcttaccacgtagtggtacaaacagagggaagattgtgtgagtcacaaagccacggattccatggtttgtgtaagtaggaccacaactatgcttta

SEQ ID NO: 33265 - DNA, 444 bp, Glycine max
  Clone ID: PAT_MRT3847_130041C.1
tgttgattctactgcataggctgtcaatacttctgagaaagaggcgcatgcattcccacgactttaatgcatcccattactctggatcatgcaagcactatagtgttctgtggacgctcatgtatgcactatgtaagcactgacttacagctgacacatagaacactctcatacctgatctagtcttgaaggtccttttgctgctaattatgtttaattatagattaattatttacaatatagttaattctagatgaaccatgtgtatagtgcgcacatctctcgaggttacttggagcaaaagttagaggcaaccacttcattcctcgatgtgaaacttaataatataacctgcacataccggtgcggctgagacaagcacttggatgcattctgtgttgtacagtcagctatctccatgcattactttccctctttcctatg

SEQ ID NO: 33266 - DNA, 301 bp, Glycine max
  unsure (1)..(301): unsure at all n locations
  Clone ID: PAT_MRT3847_130042C.1
ggctgaacaggacattgtcaagcttgttgacaccttccctggccaatccattgatttctttggtgcactgagggccagagtatatgatgatgaagtgaggaagtggatttctggtgttggtgtntgcngtgttgggaagnggcttgtgncctgntnggatggggcttnntcctttgggcctgcctggatggctctggnnangctcttgctgtttgggtncgtgcttgtcctttatcttgtagttgtctggagagtgcaatgggttcgcgagtacttgaacggtgctgctcttgtaaatgct

SEQ ID NO: 33267 - DNA, 194 bp, Glycine max
  Clone ID: PAT_MRT3847_130043C.1
ggcaaaaaccattcacggaacaactccttcataaacaataattttggacaccgctcatagccagcgaaccttacctccaaacatgtagatgccccattctaacaacatacccacaaatgccatctcaaaaaccggtgggttttaagtgataaaacaccatttatcattcttttcatctaaagaaacctcctggg

SEQ ID NO: 33268 - DNA, 472 bp, Glycine max
  unsure (1)..(472): unsure at all n locations
  Clone ID: PAT_MRT3847_130044C.1
ggggggaaaaagcccaatttttttgagcttttttacttttcaaacccccaggcactggaaaaattacccactttaaaaaggggggtccccccgancacaagagggcccttggggggggatcccccaatttgctttttattctaaacctcccatagggagagggtttacttttttggctccaaatggaaataagaccagttttgggccccctggggtggacaaatttttacaaaacattttttgcaacttttcttttaaaaaaggtcccccccctaaaacaactgggtttttgttctacccatctttaacttgccnnggggtgttagatgcttgaaatttgccccctccttttttttggttaacaaacattcctttccttttcaaaattcccttttggttcttgggggggctcccctagccacgccaaagccttntgccttttgggttttgggggcttttttttccaaacaag

SEQ ID NO: 33269 - DNA, 958 bp, Glycine max
  Clone ID: PAT_MRT3847_130045C.1
gagagagaactagtctcgagttttttttttttttttttgtagaaggcaatgataggcaagtaaaaagaaaatgatgagaagcaagggcctgctgtagcctctttaatcaactcatccagtgataattacaatgcatatatatgttcaagagttaccagaagggagaaaactctgcctattccggcaataataactcactgaaccatgaaatatggttcttgttgacaaccagcacactacataattttgcattgcaaccatccatagcacaaacaaatccacataggaagctgtttgtaaacaaaattattcacagtatctctcaacgaagtaaaaagaaagcatgttatttggacaaaagcagacccgtgaggaagagatcatggtaacttgagtcaggagagctctctgctgagttagtacaagttttctccaattcctcccctgtcaaaatttcctctgatccacattcaaaactgcaaaatgctttctcacctctgtatctataaatgtcttcctccttcactaatttcttattacatgagtaacaaaagctcaaaacattgtcagaaggataaggggctgatccatctgaaaatgaaggaacttgagaatagctgaaagcaggttcttccttcttgctgaactcagtgaagtcatggttgtgacattccaaaatgcagtcaccaaaaatgtgtgttctcttagggtttggaccatgagaaattatacaggtataatcctcagaaagctctatctctctcgcagagagtgagcctatacaccctttgctaaaatcaatggatattggaagtgaatttgatttaattttcaaagaattacctacctgtgaaactttgcttgtcacttgaggcaaactcattaatacagatgcattatttccaacacctaattcattgattcccaaattggagttttgagttgagttgatcaatgc

SEQ ID NO: 33270 - DNA, 232 bp, Glycine max
  Clone ID: PAT_MRT3847_130046C.1
tacgtacgctcggaattcggctcgagatcattctgatgggctcaggttattgccgccttcttttcatctacatgttacctcattcttacatttaccaatggctttttgcggtacttgatgcagacttctggatgttctcatccatcatgatactgtatccttatttgtgatctttactataactcaccaacaattttcttctactacctataccaataattaagctcatatt

SEQ ID NO: 33271 - DNA, 1004 bp, Glycine max
  Clone ID: PAT_MRT3847_130047C.1
ctcattctcaaattaaaattaatttaagcaagccaaacactatatcaaggggaaaatggcagaggctaatgtagtgctgttggatttctggccaagctcttatggaatgagagtgaaaatcgctttggcagagaagggaatctcatatgagtgcaagcaagaagacttggaagctagaagctctctgcttttagagatgaacccggttcacaaaatgataccagttttgattcataatggaaaacccatctgcgaatcactcaacattgttcagtacattgatgagacatggaaccacaaaccttcttctctccttccatctgatccttacaaacgatcccaagccaggttttggggcgattacattgacaaaaatgtatacaatgctgtgaagagggtatggacagggaagggtaaagaacaagaagagttcaagaaacaatttatacaatgcttgaagaccttggaatatgaacttggagacaagccatattttggtggtgaggactttgggtatgtggatgtggctcttgttcccttcactagctggttttacacggttgagacttgtgggaaactaagcattgagaaagagtgtcccaaactcatggcttgggccaagaggtgcatggaaaaagagagtgtggccacgccactccctcaccctcaccagatctatgcctttgcaatgcaatataaacagagacatggacttgagtagatatagatgttgctgctgaattcatgagaactcgtgtggggaaacaaattctgtctttagggaataataatgcatgaaattaaagtaataagtaataatataagtgtttgtgtgtatatattttttcccaacatgtaacatcgtgaataaacatgcttcgaaatcaaataataatctttcttgttcaaaaaaaaaaaaaaaggggggccccccaattagtgaccccgtcacccggggatttattccgggccggatccttgagggggtcccagtttcccctaag

SEQ ID NO: 33272 - DNA, 359 bp, Glycine max
  Clone ID: PAT_MRT3847_130048C.1
catgacttgcatagactattgattgctaacgctattgtcggtgattcgctagctccaacaatgggctctagcaaattatcagtcattatagaccttgagcgtgtaaccatctcatacgtgatcattgactaacgggttgctaaagcacgtgctctgccagaaccatccgtattgcctggcaaaggagatatgcctactgacgatcctcatgcactggtggcactactgacatattaggctgttacttttcctgcagagcatgatctaccagcagtatccaaagcaccagttgctgtagtaatagacaataacctccaagtaatccctagagtacctatgatcgatccagacactactac

SEQ ID NO: 33273 - DNA, 250 bp, Glycine max
  Clone ID: PAT_MRT3847_130049C.1
ccgatagattttgtgattagtctcataaacgtcaatcatattctcaacttgattacattatctgtatattatgatcacatatctcgttatcacaattgatctgacaccggagggggatataggctactgaacctgagagacatgcgggataatgcttgaagatgtcgaagtgtggggcatgaacgaaactaaggacacagtatgtagtggtatcattgggtgaagaagatatcatcgacgaaattgctga

SEQ ID NO: 33274 - DNA, 334 bp, Glycine max
  unsure (1)..(334): unsure at all n locations
  Clone ID: PAT_MRT3847_13004C.1
gacccacgcgnncgnagnnnnaaataagaaaaaaaaaacagcgactnngngactagggaagatcaccgcnncggcgncnncnncnncnncggcgcgncnacnacnacnacgacnacnnnncgnccacaaaaggangcncagaancaagagggnncccaccggcgcnnccaacnaccaaaaagacgacgcngcagacncnccncgncccgncggaggggggggncggaanngccncaaagcngggggccnnccagaagcaaagcngccnnngnaggcnnncaagaaggcnaanggaaaggannnggcccngcangcangcgccggggagccnccc

SEQ ID NO: 33275 - DNA, 214 bp, Glycine max
  Clone ID: PAT_MRT3847_130050C.1
ttcggctcgagctcgagccctcgagccgctcgagccggattcggatccgagagagttgatccttttccagtagctttactggctgttctttctggcgttaagggtgaagttcggagttctaacgccactaaccctatgctgacgcgacttcttgagaactgtaagagtctcaagtagcgtggttgatgagtgtccttctgcatttgtgaactag

SEQ ID NO: 33276 - DNA, 278 bp, Glycine max
  Clone ID: PAT_MRT3847_130051C.1
gaggatggcatgtgttgttgagtgaagtgtgaaaggatgaccaattttgttggactaaggttgcacacgaggttgccattgccagtgttgggtgatgtttctgccactgccacttccactactctgtcaagagcagtattaaagaagtggaattggagagttaagggtcctcgtcgtatgctattgggccttggggtttccttcttgtctatggctggtagcaaatccttcattgccttggctaggataacggctggtccctctgtggatgagatact

SEQ ID NO: 33277 - DNA, 278 bp, Glycine max
  Clone ID: PAT_MRT3847_130052C.1
gcctgctatcctttcttgttactcattccacagagtgtatatttcttggctactcaacaagtcaacaaggctacaagtgcctttcttctgatgggaggctataaatttccaagaatgttttattcaatgaaatcctgtctattcctctatccctgactttatccccaaccatcttccacttcgtcatctcttccttttccaccatttcttctcattctcacattgttctgcctccctcttcttccactgcctcttctgattgtcaggatgtcctcaac

SEQ ID NO: 33278 - DNA, 292 bp, Glycine max
  Clone ID: PAT_MRT3847_130053C.1
cctagcgcttgctcgtgcttctccgtctgtgtctgcctattcttctgcttgtttctttcagttttctttccctcatctttcagcttggggttctctgtctttttgcgcttgtctttatgtatccttaacctctcgtggatactcttctcccacatgctgcgttctcgtctgtgcgcttcccactgcttgtcttttgtgttgttctacccttatttcttctcctcttttggctcgttcatatcctcctttattttcttttatgttctttgatgttgtctctccatctctctcg

SEQ ID NO: 33279 - DNA, 326 bp, Glycine max
  Clone ID: PAT_MRT3847_130054C.1
gtccactccaatccaccagaacatttgttcaatggacagcatcctcgtggtaaatgccgtctcgccagatcaaccatcatctcagggcatataatgggatgtcataagcgtccatcccgtataattgattttcgaccgaatgagaaaaacatatatagtagaatcgtagccatagaatatcaccctaatctagatgcatacctttgtctcatatactatgtggatggtgagccaaaatatattttacacctcacacgggctataattggatatcccagtgtttctggtacagaagttccgatgagtctgggaaatgccctaccatt

SEQ ID NO: 33280 - DNA, 284 bp, Glycine max
  unsure (1)..(284): unsure at all n locations
  Clone ID: PAT_MRT3847_130055C.1
ggtggtgnantcggtggactgncgtcgccgncgcnatatggatccaantngagctgcggcgcattcgtacaccttcancatcnactcntccgttctcaagtccacgcagggntacgacnaatccacgctcnnnaccgtctcctgtcttcaaggacagcggngccaacttcggngttctctcnggtnntccnctactccgccngtgcnccctacacaacccancgngcctcccnctncaantncatatggacctcgnttcagcgggcccgggntcgtcgtgtggt

SEQ ID NO: 33281 - DNA, 280 bp, Glycine max
  unsure (1)..(280): unsure at all n locations
  Clone ID: PAT_MRT3847_130056C.1
ggaattatcttcatctggactaggtngaaggaatcaagtacctaatagagttacctctggcactgttcatgggtgagctgctgaaggagcatcgttggactccttagttggtagaagagtgcgaacaagatggcctgatgacaacaaacttttatgaagctgtttatctccgactacaatcgatccgaagtctacatgctttgttctatgacttggggactgcaatgaatcatgggagtgggttaatctgtcagagcttggttgagggatatcgaaaact

SEQ ID NO: 33282 - DNA, 164 bp, Glycine max
  Clone ID: PAT_MRT3847_130057C.1
gcgacacagctacactaggacatgtcggccgccacatttattcacttaaataaagcgccttactatgtgcaatgagtgtgtctaactttcctaaaagcataagcgcaaacgctcctccgaattctcaggccaaccgaaacccaccaggcttccttgccttttgt

SEQ ID NO: 33283 - DNA, 324 bp, Glycine max
  Clone ID: PAT_MRT3847_130058C.1
gcgcctataatatttgatgggcgtttggagaagttctactgggcaccaacaagggatgaccgtattggtgtatgaactggaattgatagcaccgattcaattcctgaacaggtccttgttaatattgttgacaccttatctggccaatctattgatttatatggcgcactgaaggtcaaaatatatgatgactaaatgaggaaatggattactagtgatggtgttcactgcattcagaagaagcttgtgaacataaacaatggacctccaacctatgcacataccaagacgactctggaaaaacatttgacggattggaacatg

SEQ ID NO: 33284 - DNA, 272 bp, Glycine max
  Clone ID: PAT_MRT3847_130059C.1
agcgagaagacgacagaagggaatagttgcaacattaatctctgaaaaaatgagctgggcaatatgatggagaatacataggataagaagcatcagggattcatggtcaatggaccgtatgatgaattcatgcaaagggcaaagggggccatgtcgcgtcgactggcatgaaaagaggaacgggaactgaggaagtttcaagatgaagctacaatcttaatttatgaattatgatgattttttgggaaaattagagaagaaaaacgacgtcg

SEQ ID NO: 33285 - DNA, 414 bp, Glycine max
  unsure (1)..(414): unsure at all n locations
  Clone ID: PAT_MRT3847_13005C.1
cggagaataaagggggcttctcattggttaatagaataacaaaattaccattccagagcttccttacttgtattagagcgcaagacaaaccccaaacgccttttatatgaaaaggaaaggggcgtacattttcggcattattagaaatccttaagcaacttgcgaacctggtccagaggcacgaacacggcaacagtgaacgggccctgcgcttgagataggaagaataaaacccttataaagcgccatgggacaccttcgcgcgcacacgtgtttagagaacaattcaacgcgccggcgtacgggggggccttcccgggcttcacccttaagtgtataaccctggtcttgatcacacttgatggggtagacaccaccgngcggacaaacccgccgcgaaacttgcccgacacg

SEQ ID NO: 33286 - DNA, 358 bp, Glycine max
  Clone ID: PAT_MRT3847_130060C.1
atatgggacccgatattacaatgaatttgcaggtccattgtgaatcgggaataagcgatgttactacaatttttgaatggtattatgatccaagagcaatcttgatcggaccaataacaatttcatgttatttatcatctattatcttttcttatgttaaaatactttcatctctgatgtttttagtaactttcacttttgtctttttcttttaaaaataccttgatcctttatattgacacttacgtcagtttgatgcttacatagttagtgtttaaacattaaaacagtttattttaatatattgccaattttatcaaaaataaattacttttaggctcaattcataatttggcct

SEQ ID NO: 33287 - DNA, 235 bp, Glycine max
  Clone ID: PAT_MRT3847_130061C.1
ggagaagagtctatttcacagcatctatggtgttcggaaccgctaaaaagaaaacctcttttgagatatccctcatttccaaaaaaagggttggtaaaccccaatacacggctccgattttgggcctaaaaatgaccaggccggctattacattttcaaaaaacggattgttgttataccatgcaacaaggtctttgctagggaaaccataaaagggcgtcttgctggaaatttt

SEQ ID NO: 33288 - DNA, 242 bp, Glycine max
  Clone ID: PAT_MRT3847_130062C.1
gagtgatagtgtggctagctgcagaagagctagtattcgtgggcggtctagcgtagcaacatgatcattcccgagacagaaccgtaaagagatctgcaaatacctcttccaagagggagtttgctttgcgaagaaagactacaatctggcgaagcacccagagattgatgtgcctaatctgcatgtgataaagcgggtgcaaagtcttaaatgcagagagtacgtgagggaaacatttgcgt

SEQ ID NO: 33289 - DNA, 251 bp, Glycine max
  Clone ID: PAT_MRT3847_130063C.1
gtgcagtggagaaacaagacaaagcaccacaagttaacataggttcacttatatattactatcaagtcttattattaatacttgtaaatagagcattatcaggtttcacctttcattggtagcaaagtgatcattcagagaatagaagcctgatcaggttgaatgtacactcatcagcaacatcaaggatagaacattcactcttcttccagaatgccaatcccttctgagaggcagatgttccttcaaac

SEQ ID NO: 33290 - DNA, 414 bp, Glycine max
  Clone ID: PAT_MRT3847_130064C.1
gcacgagccttcacaacagctagctatagatattagaagattgatagataggctttatggttagccaaatttactatagacatggtatggcgagaggctaagatcaatagagccttgtcttgccaaatagctaaaaaagacacctgccaattatttccccttagcttgttgaagcctagctagctatggccctatgttttgtattttctatggcttctccgatacttgttttgagagggcacaacttgtttcctatccgtttggaatctttcttttttgttcatagaatgtcatttaattgttttgtcaccgagaagagaaagtaaggttcatgtccatctctctctctctctctctcattagtgaaaactggattaattagggaggcttcaactcagacctagctagctagct

SEQ ID NO: 33291 - DNA, 170 bp, Glycine max
  Clone ID: PAT_MRT3847_130065C.1
aactttctcatctgggaagatcagttgacgaatcgaggatccgatgacgtgcaaggaatgacggtttcaatcaatcgcatcacacacagacaatcatgtttaaccggatgtccggtccacctaaacaggaaagcatagcagttgccagtttgggcaagccaaactaaaca

SEQ ID NO: 33292 - DNA, 106 bp, Glycine max
  Clone ID: PAT_MRT3847_130066C.1
gtttagtgtcttcatttgtagtttgatcctcatgagattgaccccctgggcatcatttagctagctagccagattaattattaattaggcaaataatgggaaaccc

SEQ ID NO: 33293 - DNA, 307 bp, Glycine max
  Clone ID: PAT_MRT3847_130067C.1
gagcgctttggctagttgttgtcatagcggtactatccctgttgtttctgttgttttacctaccaaaaagaaaaagaaaaatttcttttgtttcacaaggaaatattgttaaatttatgaatacttactgattctttctgatatattgcatgggtaatctcttggcgggtaaagattagggggatcatctacatgaccctgtagtattgcagattgttgaatttcgcaaaattaccaactgccaggccgaaaattggttcatttacacactgttttcgcaatttaattattcacaatgtatttacac

SEQ ID NO: 33294 - DNA, 519 bp, Glycine max
  unsure (1)..(519): unsure at all n locations
  Clone ID: PAT_MRT3847_130068C.1
tttatgggttacttgctgtggggctgttcaaatctttaatttttctttgccaaggtgttctcgtgactgaactgttaagctctctaatctatttctttctccccttgataaattaaaagatgcaaaagttgtgtatgtcttcttctgctgattttttaacatgaaaatcttgaggtttttttaaattctaatgttccttgcataagtataacatggctaaccggtttttacttttaagtcactttggtataatgactttttgttaggtaagtaaaatctatttcttaaaattccttcatttgcctccattatttggcatctggtcagaatatcttgataaaagtagtggttttacagaatatacttattttgatccagtggcatgaagtgtttgtaattattctgcgttggtaaaggaactgatatttaaagtgcttgtagttattgtggagtttatttttttgaagtcatggaatgtactaataacaggtttttgtattcatctctcttangtgtagc

SEQ ID NO: 33295 - DNA, 464 bp, Glycine max
  Clone ID: PAT_MRT3847_130069C.1
cccaaacaaaaacggggaaaaacaaaaaaaaaaaatttttgggaccaaaagactataaacaacaaggattcaagggcccaaggggaaaaaacccttcaaaaataaactttaaaaacccaaaaaaaaaaggggggaaaaaaaaatcatcacaatcccccccttggtacaaacaccctactaaaaaaatttagaggacccccgggtggccaaacccaaaaaaggcctttttaacgggggggcccccacccaaaaaaggaggccccaagccaaaaaaaaaccccccccttaaaagaggcccccccacccctttatccaggggaaaattgtgaacaggacccgacccacccccctaaaaccccccggggggaaaaaatccccccttgaaacatattttggacttaaaaataaaaaacccttcccggggacaatgggtgggcccaactcatcatattcccctttaaaaa

SEQ ID NO: 33296 - DNA, 472 bp, Glycine max
  Clone ID: PAT_MRT3847_13006C.1
ggttttctttttttgacttttttttttttttttgtttttttctcttttcaacactaaacgcgttggaatactcacccaaaaagacaaaaattaggggcgaattcccccccagacctcttgaaaaccatggctttaaaaggcgccttgactttattcaactggggggagtggcatcccttctgaacttccaaatatggcccaatgaaatccctacgacaccatgccggagtgtctatatggtgcctggaaccgccaccaccggcttccaagaggcttcccccccccgaagacataccctccggttgtcctctctatgtaaagttgcaaaaaatccgtgccattccttggtccggaatgggacatgaaaggacctgcgcccgggccggggccggctaaaggccaaaattcgaagcaatgggcatgtcttcaacaaccaccggcgcgggcttctctgtgcctaaaactcacctgt

SEQ ID NO: 33297 - DNA, 582 bp, Glycine max
  Clone ID: PAT_MRT3847_130070C.1
ccgggatatctcggcttgcctcgcctatgcttcttcccctttctctggcttcttgcgattgtttttttcattctcttgctgtaaactttcacggaatatatagccattgaaggtttagcgaaaaaaaaaaaaaaaaagggccctaagggcgggggcggtttaaaaataatggattccccggggtggaggaaattcatattaaggttattcataacggccaactccaagggggggccgggaacccatttcgcctaaaagggggcggaataaccggggttaatgggcggcggtttaacaaggccgggatgggaaaaacctgggggtaacccaattaattggcttggaagacattccccttttcgccggtgggggaataacgaaaaaggccggaacgattggcctttccaaaaagtggggaagctggaaggggaatggaaaatggaaagggtaataatttggtaaaaatcccggtaaaattttggtaaaacaagttctttttttaaaccataaggccaaaatgggaaaattccttattaattcaaagaataaaaccggaatagggtgaatggtggttccagttgg

SEQ ID NO: 33298 - DNA, 525 bp, Glycine max
  unsure (1)..(525): unsure at all n locations
  Clone ID: PAT_MRT3847_130071C.1
gcctttttcctttgtccaaggaaaccaagccaattgatcctaaaacaattcttggatgacacaacaattttcccatctccatccacacatcagcgacattctagtgttttgtcgcctaaagtgacattttatgttcatttttctttgccacacacaaaactatgaaaggcttggaaggagacatttccttcgcatgcgagcatggcagcaagatctagtgttttctcgttcgttctctctacatgtcatcatctttttcttgcaccacttcatacaatggcttcctttcacataatcatgcatcaacaacatcaaatatggggtaaggggttgccattccccctccggtatgcttgcttctccaacgaagaacttgggtatgagattcatgttgtgacagtgtattcaaggagttggcatcatggattgagatgatggtgacattgtatttggttttcgctttggatctggggttttccacanatgacagtgtgtctgtgttttttgtgcgatctattttcactt

SEQ ID NO: 33299 - DNA, 689 bp, Glycine max
  Clone ID: PAT_MRT3847_130072C.1
aggatgcaacacaatcagaaattctgcattacttttggtttttaccaacctttacaaattacatattaaagttattatttacttaagcataattaaatataatctacacaagtatttttgtgaagtaaaactagtcctgtttacaagcctaagaaaacaaagatagaacattagaacttgtataccctgcagacataacgatcttattcttaggatatggaatggcgtcgattcttatcaggttttacgcgacctttgggaggtatagtggcagcatcgccacgtgaaaaaggagaaagacgaccaagctttttggacacagagttaatgaatgactttctaggcagaggaggcttatcagcagagcgtgaagcataaatcacaggactacttgatgctgatctaattgaagttctctcaaactcttttagtctcattttcagtttcactatctctagtttcaggtcttggttttctcttcgcaagatggagagctcgttgggagatgaatttaccttgtcaaggaagttaggagaatcccagcctgcactgctatccatggaatcgcgaaggcgttgctgttcgtagtagagaacttgaacaaccatttgaactggaagcctgtcgttttgagcagcgtgtgcacacgcctctcgtgatgacttctggcagtccatcacgctacacac

SEQ ID NO: 33300 - DNA, 419 bp, Glycine max
  Clone ID: PAT_MRT3847_130073C.1
ggggagtactgctgcgagaagactacagatggggtgcccttcagcattgggcccatctaggcccatcaagaagcttcaacatgaagcaaccaacttgcctgagcgagctgagcttgcttgggtgagcatgttgcttctggaggaagcctccagcaagcctgggagagctgggcagcaacgtcctcccctattttttctataaatggacattggaggttgaggggaatgggttcaacaagctgggtattcagatttcacttaaaattagtgaagagaagaagaaaggagaaaatcaagggcgaggcgcttctgtaatacttccgtgacatttccatgatcaaattccatgaacgttcttcgtccggtcttcatcgttcgtcgatcctcaaaggattaggttttgattatgaagttttgaa

SEQ ID NO: 33301 - DNA, 338 bp, Glycine max
  Clone ID: PAT_MRT3847_130074C.1
cccaacactttctataacatgattcacaggatgctcaagcttgaactttagaaaatttaaaatgcccttgaaccatatcctaacatacctcctcttaatgactctaattcatattcttaagatatcaagattgaataagttaattaaatctgacttaatttcctgttacatttttaaaaacaatgattgtataaacagtctttttactatattttatgtttttttaattttctaaattatgtaacattagctagttaattaccaaatgtattatttttctttatgataaaaaaaaaaaaaaaatgactttcactctacattatccaatcttacttact

SEQ ID NO: 33302 - DNA, 198 bp, Glycine max
  Clone ID: PAT_MRT3847_130075C.1
cccctccctcagccttggatgccttctctaaacggccgcggcgcgctttgctttttttttttttttttctcacccaagagcgcgttatctactcgaaccctggaagatattaattcacctggacttataatggatcaaagacgcctattaatttcgcgagcactaccttcaaggaagctcttctatacatcaccatgg

SEQ ID NO: 33303 - DNA, 422 bp, Glycine max
  unsure (1)..(422): unsure at all n locations
  Clone ID: PAT_MRT3847_130076C.1
gcacgagtggtgctgtatcgttgtgtaatcctttcaatttggttgtggctgatgaggacttccgaaagggctttaacattatttatgacaaggtcctttcaaaggctcttcgcaagattttcaacaagcatgttttactctttgaagatattggtggtgaatataacattccactggcagccaatgccaagtctgttaaggagtttgatgatgcactgacccatgtttcttttagattcaagtctgtggacaaatactattctaattcaagcaattcagattccataaaacatattagaacccctttactttacatccacacagccaataatccaattgctccaaatgaagaaattcctcataaagatatcggaaaaaatccaaactacttattaatantaacacccaaaagtaaccatcta

SEQ ID NO: 33304 - DNA, 331 bp, Glycine max
  Clone ID: PAT_MRT3847_130077C.1
agccgatctgcatcttcacttcttactgcttattcttcttctttccgattcccatttattccttctttcttctcgatttcgtatatttgtattttctcctcttttttcttcccgcgaagaataaaaaaaacactggagaaatagatcgtgttgtgtgttgtattttagtgaaattgattgtgaagtgatggaatctatatttgaatgtttttattctaaaatcaaattaatgataaaattgagtagtgttatttatttacggcaaaaatactcaattgctcaaactcaaatcaattttggatctagaatcaattatgtagtattatgaata

SEQ ID NO: 33305 - DNA, 357 bp, Glycine max
  Clone ID: PAT_MRT3847_130078C.1
tttgacatctaaacaaccagattgagactcatacactgttacataaggacgaaaataggatgataactgttttatctttctagccgcgaggattacaaaacagataaagaggatttaggatgatcctacatttttagaggtgttttacattgggtgcattaagttatcccaataacatgagatgctgaggatcataagagcgaagaggatgggcacaaggccagaaccacaaaccttaactcctgtgcccatggttgtatgtgccatcgagcatttcaatagcgattcactcacggctatcaaaataccaaagccccctaacaatgcactactataacactacaactcgaaagagac

SEQ ID NO: 33306 - DNA, 434 bp, Glycine max
  Clone ID: PAT_MRT3847_130079C.1
atactgtgaatgtgaatcatgtgtatctttatataccttacagttaattacatgtatgtatgcgtatatatatatacatatcagcctgtaaaattgaaagctcctaatatatacttatacctatgtatatttcctattatggacaaaagtcctgaaatcgtcaacacggactgataccatgctgatgaagccagacgtcactgcatccaagagctaggaacaatttgcagagccttagaaccacctacatgttgttgcagtttacttgttgactcaactgtgtgcattagaactgtaaccactggagtcaatgcactaattattggtaatccatatctgatagggccatgttgattatcatatgaatcatgatcactttcattagccaagatctgtcctgaggacgtaactgaaggcttcccaagtgctgtaag

SEQ ID NO: 33307 - DNA, 296 bp, Glycine max
  Clone ID: PAT_MRT3847_13007C.1
ttcccgggtcgacccacgcgtccgctgatatcctagatagacgcacacgcttacgttttcaagatatcacacatttctcgcaccgaaaggtaaccactgactccttgttcatggatcgtctgtataaaagtctttcgttcgctactgatatagccacgatgatgtgttatgtgcacgaatctcacagtgatgcggttccgaaccttgttttcacttattcagtcgctgatggactgcatgtttgatgaaaagacctctatctatttggacgaccttcggtagtgattatgtggatg

SEQ ID NO: 33308 - DNA, 272 bp, Glycine max
  Clone ID: PAT_MRT3847_130080C.1
ttgagttgctcttgacacatctgtgggtttttctcatgtgctttaacgcacaaatggtgaatatggcaaaaggagatttgtttctggggatggtgaatagatgacatttgattccggtcaccatgggtgaataggctcacaacaagcttgtctctgttcttgagataagtgtgcctacattgtgtgtcatcaaatgtgccaaggatgagcaaggactttgtttgaacattacagaggtagctaagacaacggtgatagaatagttctgtcta

SEQ ID NO: 33309 - DNA, 1038 bp, Glycine max
  Clone ID: PAT_MRT3847_130081C.1
cccacgcgtccgcccacgcgtccgcccacgcgtccgacggaagacgacagaagggtatcggtgcgagaagacgacagaaggggatacctaaaaattgtaccgatatggcttcacttgtgtgtctccttttttccttgcatttcatggttatcatgtcaggttccttaccagcaaatagtgaagtgtttacaaaagagtctcctatgtctctatccacaaaacccgtggaaagactcacccaactccacttttatttccataacaacaaaatgggggaacacccgactgctatgaaaattgttgagcctcctaaggcgtccatttctggttttgggactatttacatgatggatgaccctctaaccgaaggaccaagtccaacttcaaagcttgttggaagatgtcagggaatatatgctgaggcttcgcaacatgaacctgcgatactcatggtaacgaatttgttcttcactgagggcatttacaatggcagcaccctcagcattcttgggaggaaccctatgttgcagagtgttaaagaaatgccaattgttgggggtagtgggatcttcaaatatgcaaggggttcttctgtgcttaagacacatgtgcatgatgctaaggctggtgttgcaattgtcgaatacaacgtgtctgtcctgcatgtttgagtgaaataggttgaagttgctctttataatataggtttgttttggaggttgagtttgaagtctttctcttctaatctctttaattttaagtccattcgtcttaaaaaatagtaggtttcaagttaaaataatagctgtcctgttgttttattaatggaaagtaatgttactacattcagtgatagatgtggcaattaagattgattaagagcaacagatgtaattgtttattcctagatatgcatgtgatgcgctggtatgaatatgattgaagagttagtattataatacattacttatttcgtggctgtgggtgggttgcgcaagtgtgaacgcatgaatgcaatatatgactggatttgttccc

SEQ ID NO: 33310 - DNA, 953 bp, Glycine max
  Clone ID: PAT_MRT3847_130082C.1
ccacgcgtccggtaactaataaagttttccaccacaaggtacctatatcttctggtagcctatatatatagctgtttgcaaccactggctaacatacctaaaaattgtaccgatatggcttcacttgtgtgtctccttttttccttgcatttcatggttatcatgtcaggttccttaccagcaaatagtgaagtgtttacaaaagagtctcctatgtctctatccacaaaacccgtggaaagactcacccaactccacttttatttccataacaacaaaatgggggaacacccgactgctatgaaaattgttgagcctcctaaggcgtccatttctggttttgggactatttacatgatggatgaccctctaaccgaaggaccaagtccaacttcaaagcttgttggaagatgtcagggaatatatgctgaggcttcgcaacatgaacctgcgatactcatggtaacgaatttgttcttcactgagggcatttacaatggcagcaccctcagcattcttgggaggaaccctatgttgcagagtgttaaagaaatgccaattgttgggggtactgggatcttcaaatatgcaaggggttctgctgtgcttaccacatatatgtttgattataaggctggtgttgcaattgttgaatacaacgtgaccgtccttcatgtttgagaaataggttgaatttgaagctgcgttctctatatagggttttttcgaggttgagtgagtttgaagtctttctgtttgatttctttaatttgtttttaagtgtgtccttaaatgtcctaaagacgagatccctcttaaaagtgagtagtttttaagtttaaatatcagtcctgttgttttatcaatggaaagtaattaatcatactactttcatcatagatgctgcagttaactaagattgattcagaacaatgaatgtaaccatggttttc

SEQ ID NO: 33311 - DNA, 344 bp, Glycine max
  unsure (1)..(344): unsure at all n locations
  Clone ID: PAT_MRT3847_130083C.1
naaggccctgctctctagataccaacgcgtccgtattagttcccggacccacactagtactagtccgccgtcgcccttttttttttttttttaccttttttatttttcatgccggaaaaaacaccacacggagcacggtgctcccactattaaaattttccctgataacctcaaaattgcagtaactgccccattctattcaacatctttatctggcgaaatcctagtcaaaacccaactcaaccctttttgatcccatccccctatccatcgcaggagatcgctccattagaacctcttccatctccctttcgaacaaaaaaacccgttgtttaaatatttcc

SEQ ID NO: 33312 - DNA, 294 bp, Glycine max
  Clone ID: PAT_MRT3847_130084C.1
aataaaatttgaaataacaccagtcaggcttatttaaaacctttgcccaaactactttttaacctcactaaacctcctcaaaacaattaaccaaaagtcaaccaattgcaccaatttcttaaacaatcccaatcagctcctcttaccgtgtaataacatataataactatttatactttaactaatggttatcttgattcattataaattgtacatgtaatgaaatttctttttcaattaccttcttacttaaacacaaataaaccttaattcaaataaatcatatcttctacc

SEQ ID NO: 33313 - DNA, 260 bp, Glycine max
  Clone ID: PAT_MRT3847_130085C.1
cacgcgtgcgtcttggaagactttgttgctccaattatcaatttcactatttacaaatcttctcaggacccaagacctatttcaaacggtaaatcggccgaagacttacctgatgatctccaaacacaagacagagacaaatgctttgaaacttataaccgcgaatcgatttatcatctcaaccaagaagcaactgccaactgatttctgtgacgaatccctagtccagaaaagataggaattatcaccaaattcattaa

SEQ ID NO: 33314 - DNA, 747 bp, Glycine max
  Clone ID: PAT_MRT3847_130086C.1
gcaaagggcattcttaacacgagcgtggtcacatccgtataagacgatggaaaggatctcccgtgtggttgcaaatgttgggcgcactaatcccttgcaaaccatggctgagttaagaagagcaaggcagcaggtccagtacaccggaaaagttggggatgctagatatccgcatccttctcactggggcaaggtttgtttcctcactaccccagatggtgaaaattgtggactagtaaaaaatttgtctgtcacaggattagtaagtactgatgtaactgacgtaactgaatctatactgctaaaattggtggattgtggaatgcaagaacttgttgatgatacttccactcatcttggcagcatggacaaagtcctcctaaatggtgattgggttggagtgtgtcccgattccagttcgtttgtggcagagctacgaagtagaagacgcagaaatgagctgcctcatcaggtggaaatcaagagagaccaatctcagcatgaagtgcgcatatactctgatgcaggaaggattctacgtcctcttttggttgttggtaatctactgaagattaaaggatttaaatcagaccgttactctttccagtctctattgacaaaggtgttattgagctgattggacctgaagagaggaagactgttgtactgctggggtgttgagtatttatttggaaaagaaggaaacgatctgtaaagtacactcactgtgaacttgatatgtcattc

SEQ ID NO: 33315 - DNA, 212 bp, Glycine max
  Clone ID: PAT_MRT3847_130087C.1
gggtggaaaaacacaaatggatcgtccttgaataggcgcagcctgcccacaaaattaagacattacaacagggggtgatgggcgaacccccacaataaacgaaaatccaaagaaaagagagattcaaattcaactttaacgctcaatcatgcattcatttcattcataaaggggaaatataaactaactagacaaagggagaaatttttcac

SEQ ID NO: 33316 - DNA, 2248 bp, Glycine max
  Clone ID: PAT_MRT3847_130088C.1
gggtaccgccttccccacgcgtccgattcgaccgcgcacttcgtttccctctctatctctccgccacgcgccaccatgtcagtctcacactccctccagctccgcctcttcacccctccccccaccgccattcccacccacaaccacctccctccccccaccctcctcctcccgcgcgccgcccaccgccgcttcctctccctccgcgcctccttctccccggaaaccctggtctccgacaacaacggcgccccctcccccccgcccccctccgatccgagctccatcgaggtggactccgtcacggaagccgagctcaaggagaacggcttccgcagcacgcgcaggaccaagctcgtctgcactgtgggccccgccacatgcggcttcgagcagctggaggccctcgccgtcggaggcatgaacgtcgccagaatcaacatgtgccacggcaccagggagtggcacaaggaggtcatcgaccgcgtccggcggctcaaccacgagaagggcttcgctgtcgccatcatgatggacaccgaaggcagcgagattcacatgggtgatctcggcggagcttcctccgccaaagccgatgacggtgagatctggacattcagtgttagagccttcgattcggggcttccccaacgcaccatcaatgtcaattatgaaggcttcgctgaagatgtgaaagtgggggatgaacttttggtggatggaggaatggttaggtttgaggtgattcagatgatatggacagatgtaaagtgccgtcgtactgatcctggcttgttgctgccgcgggccaatctcacattttggaggaatggtagtttggtgagagaaaggaatgccatgctccctactatttcttccaaggattggttagacattgattttggtatttctgagggtgttgattttattgctatttcatttgtcaagtctgctgaagttattactcatcttaaaagctatattgctgcacgatctcgtgatagtgatatttctgtcattgcaaagatagaaagtattgactcattgaagaacttagaagagatcgttctagcggcagacggagctatggtggcacgaggagacttgggagctcaaatacctttagaacaggttccatctgctcaacaaaggattgttcaggtttgcaggcaattgaataagcctgtcattgttgcctctcagctacttgaatccatgattgagtaccctacacctacaagagctgaagttgcagatgtttctgaagcagtcagacaacgagctgatgctttaatgctttctggtgaatcagccatgggccagtaccctgacaaggccttaactgttttaaggagtgtcagtttgagaattgagagatggtggagggaagaaaaacgctatgaagctatgttgctcccatcagttgggtcttatttttcagaaaagatatctgaagaaatctgcaattcagctgctaagatggccaataatttagaggtggatgcgctttttgtgtacacaaagacagggcacatggcgtctctattgtctcgttgccgtcctgactgcccaatctttgcttttactaccacttcatctgtgcgtaggcgactgaatcttcagtggggcttgatacctttccgcctgagcttcacagatgatatggagagcaatctcaacagaaccttttcattgctcaaggccagaaatctgatcaaatctggtgaccttgtcattgccgtctcagacatgttgcagtcaatacaagtgatgaatgttccttgagaacatgtttcatttcttttgaaagccaacattgctgcttgttcaaaacctgggatgctgctagagtgctaaaatggggcagagactacatgaatgaattttgttcgttctgtcattttaatttataggacacgacagaagtttgggagagttaatattatggccttgaagttcttagttttaatgcatacaccttcaagctctagatatcttttttagtcgagtgaggcaatagtgtaatagctacccttttaagttgtaaggcacacatttgcattttccatgttttatatcattgcattagctttccacttcaatgttgactaaaatgtgaaggtttcaataaagattccatagtatttgcctatcattatgcacaatgtatttgtcctgtgtaaactaaatgttacagtgcatatccgcagcagttaaatgaagcagtatttggtacagcaagtagctc

SEQ ID NO: 33317 - DNA, 262 bp, Glycine max
  unsure (1)..(262): unsure at all n locations
  Clone ID: PAT_MRT3847_130089C.1
aagnaaaangccatataattttncttttatttgaaataatgtccgggatcatccacaagattgagganangtcnccatgtgggagggcanaagnnagangagcacaaaggagaacaccatggtgagcacaaaggtgaacacaaaggagaacaccatngtgagcacaaaggtgaacacaaaggagaacannaccatggggancnctaggagggncttgtggataagatcanggacnnnatccatggtgttggccatgacnagt

SEQ ID NO: 33318 - DNA, 388 bp, Glycine max
  Clone ID: PAT_MRT3847_13008C.1
ggttggaactttgggctgatttagtgcttgagatgatagagggcatggtcgtgagaagatcatagaagggggcactgtaggaaccaggaggtgccacggggcctctcgcaattatgtcaacccctgtagcgaccggaaccgcggtgctttcccgcattagaacccgccctaatagaggattccttgtcaactcaccctattcaatcccggcctccatcgtaataatacgtcgtcggacgacgcgggtgaccgcacactcagtatagacgaaattgtctacagcattcacaccgagcgagggcgaacaatccctcgcacaaatagacgtaatctccaagaacgtgaactatcagccggatgtcggagaggagacgaccctagtctctac

SEQ ID NO: 33319 - DNA, 186 bp, Glycine max
  Clone ID: PAT_MRT3847_130090C.1
ttcatttcaacatcaccattcgacacagtctgacagacacatcgagggaattgattgatcagtatgcctacgaacagcaatgagatcttgacagacagagagttcctactgcttctggttgtaatcattgcaagagttattatcggtctcatattctcaactacgcagttgtcgacgttttgtacg

SEQ ID NO: 33320 - DNA, 243 bp, Glycine max
  unsure (1)..(243): unsure at all n locations
  Clone ID: PAT_MRT3847_130091C.1
gatttcactaaagantctttgcataattnactaatttgttaggttggcaatgtatgcagagtaaatctggcactnttggacatcattgcatganaagtngatcactttngnatcatgttgttaatgatgttcaactgcatactataaacctgaacatatacatcttttntcaacgatgtcgataatttaacttctatccatgttcactacaacgttgcattagtttctcctaanttnaacgtg

SEQ ID NO: 33321 - DNA, 355 bp, Glycine max
  Clone ID: PAT_MRT3847_130092C.1
acccctcgcaagtggagctggccctgctacagcgctcctaccatgacctggcctcgcagatcaacctcatccttgtggaacgcctgtagtatgttatgctggagcagttcctcatgaagtatgtgtggagcgcctcgggcctgctcatggtggctgtacccatcatcactgccactggctactcagagtcaggtgagacccatggcttcaagaggatccaggccaggggcctgtcccccataccgctgggtgctgagctcacgagggcccaactcagccagcccgtcgcccacttatgctgacggggccaccgaggccctgctgccagtcttgatgctttcagaggttgagctcg

SEQ ID NO: 33322 - DNA, 944 bp, Glycine max
  unsure (1)..(944): unsure at all n locations
  Clone ID: PAT_MRT3847_130093C.1
atagcatttgaatggtttagaaattgagtaaggaactttactatggttttggctgtgactatggaaaattactatgattctggctggcacatgggcaacagcagctgggctcaatgcagtgatcattcttcttcttcctttgcagtgcctacacaaatactccctcatcatgtcactgactctgcctctcttcaatttggtgagtttcactcatgggcacttcccattgaaggggctgcagaagaaagagcaataagtgcttccaagagtcacagccaagcagagaaaaggcgcagagacaggatcaacgcacagcttgcaactcttagaaaacttattcccaagtctgataagatggacaaggcagctttactagggagtgtgatagaccaagtgaaagatctaaagcgaaaagccatggatgttagcagagccttcacagttccaactgaaattgatgaagtatcaattgactatgaccatgttcaagacgaaagctgcactaaagtgaacaaactgaaggacaatattgtgatcaaagcttctgtttgctgcgatgatcgaccagaactgttccctgaactcatccaagtcctcaaaggcttgagactcacagcagttaaagctgacatagccagtgttggtggcagaatcaaaagcatattggtgctttgttctaaggatagagaagacagtgtttgccttgccactctcaaacagtccctcaaatctgctgtcaccaaaattgcttcatcatccatggcttctagttgtcccgctagaagtaagaggcagagattcttcttgccttctcactgcctacagtaattcactgccgctattcactttttcatttttgtttttaattcttagaggggtcgtgtcactagctcacattattggtttcattntttcacatttgtttaccggtcagatataaaact

SEQ ID NO: 33323 - DNA, 657 bp, Glycine max
  Clone ID: PAT_MRT3847_130094C.1
tacggctgcgagaacgacagaaggggttctttgtgactttcaagccaccttgaaggtattaagctatgcgtcaagctaatgacgttaaagaagcgcttcctgggaggcaacccagtttataattgttgttaactttgtttttcatgcatttaatcatttggaacttgttgtatgatttgtacatacgagtatatcagcctatcttttgctaagcgcaagcctcacgctaagtgtatctttgttcatgtgctatgccgtgagtctcaagtgcttagcgcccaacccttgcatctgagctaatccaacttcaattcgaactgaattcggctaagcgacagtcaaaccgctaagcgataccttatccttggctaagcgtgactcagtgtcgccaagcgcaattccttacggccataactgaggtcaatgaagctaagtgtcagtcatggcagctaagcgagattcattgcggtaatatgaacgctaagcgagtccttctcagctaagcgcatgctcctctgtacttaagatgcatcattttagctaagctggctagagcctggcttagcgagagttgcagcttttctaatatgaggacctcgctaagcaaacttaccctctcgctaagccaagtctctgttaaaaaaaaaaaaaaaagaa

SEQ ID NO: 33324 - DNA, 544 bp, Glycine max
  Clone ID: PAT_MRT3847_130095C.1
gtcgagcttgaccgcatccccgttgaactgtccaagggcgagaacctgatcgagcgccattcccgcgagttcacctccaccgtcggtgacatcgagtccttcaagagcctgcagaagatggccgagagcggcaacgtgtacgtccacgatgtcgaccatcattgtggcttccccgaccgcctcgtcctccccattggccacaaggccggccttcccctgaccctgttcgtcatggtcaccccctacggttctgaggagcagcagcagcacggcgactactaccacaacgacaacatcgtccaccaccagggccagaacgtcgtctcttgcaacggccttatgaccgtcgtcgacaaccgtcccctcggcttccccttcgaccgccagatcgacaactacggcaagttcaccgtgcccaacatgtacttcaagaacgtcgccgtctaccacaaggactccaccgtctctcaccagcagcagcagtactactaccagcacgccgaggtcgccaacgacttcgaccacctgcccaagtacgtgtctg

SEQ ID NO: 33325 - DNA, 1201 bp, Glycine max
  Clone ID: PAT_MRT3847_130096C.1
ttctacctattatactgtccgttttcaaggcaatcactgaatctcattctctatctgaatctttttggattattactgattttgttagttgctgtattgatacttgttcatttctttgagaaagcctatacaatccttggagaagggaagaaaaggagagtactggtaacattggaagggaacaacaatacagagccagaggaagagacaaattaagatgttgggaattttcaaggacaagttggtcaatccaccagaagagctaaacagccctgcttctttgaattcatcaaaaaggtctaaacttccaaatgaaatccttcaggaattccagtcctacaatccctccaatgttttctccgttagctttggaaatgatgctttgctagcttattccccttcaaacaagccctccattcatcacgggttttgtgttttggataacatatactgcattttccttgggagcctaaacaacctaagcaagctcataaagcagtatggtctatcaaagggaaccaatgatgctatgtttatcatagaagcctataggacacttcgtgacaggggtccatacccagctgaccaggtcctcaaagaacttgaaggcagttttggatttgtgatatatgacaataaggatggaacagtttttactgcttcgggttctaatggacaaattgagcttttctggggtgttgcagctgatggttctgtagttatttctgagaatttggagcttataaaagcaagctgtgctaaatcgtttgcaccattccccgctgggtgtatgcttcatagtgggcatggtctaatgagctatgagcatccctccaggaaaatgaagccaatgcctagaactgatagccaagggtttatgtgtggagccaattttttggtggactctcaatcaaggaagtcaatgatgccacgtgttggaagtgaagccaattgggctccttgggggggctcacaagcttgattcattcaaccatgaccaaataaacacattgaacaaaaaaaaaacctactatataagggaacttttttcttttctatttttaatgatgttagcaacataacgtaatggggtgacttgactgttattagcacttttgggatttcattttcttttagcttctatatatacaacaaatttagttttccgaacgcgtaggtcgagccgggcacgctgtaacac

SEQ ID NO: 33326 - DNA, 235 bp, Glycine max
  Clone ID: PAT_MRT3847_130097C.1
cacacggctgggaaacaaacattaacttagcttgaggacgcactcccggattcacagactaatcttaacgattcatacagtgatatgggcccatcagattgatatagtatgtgataagctagtctggggagttggaaacataattccaacgccatattgtcccatcctgacagcaactgaatataatactggccataaaaggacgttccagactgcctgattggagatcttgatt

SEQ ID NO: 33327 - DNA, 400 bp, Glycine max
  Clone ID: PAT_MRT3847_130098C.1
cctttaacagcaccaccaacaatgggagcacgaaagagactctcttgttcagaacctccttgttcgtctgctcccgcatcaaatgagaacacaagctcaactgccagacccaccataacagaccctacaatcgcgcctcccaaaagagggcttcttgtgaagctctctctgtttttgctcccttacttgaacctgctctttcaccactacctcatcgagccagagctgcgaagttcgatcctcatcaacgacggaatgagcctcacggggctcttagacaaggccaagatgatccccgtcgcgtgccggtacgtccagaagaggaaactctgtgggtatgacatcaacaaaaacgggacccctcaaggaaccgcacaagtgcctgagtcattaggtatag

SEQ ID NO: 33328 - DNA, 203 bp, Glycine max
  Clone ID: PAT_MRT3847_130099C.1
ggggggtaaccacttttggaagatatctccattcacaaataatgttacggagtcttcaagacttggctaagttttttctttcatagttcgattaattagcaccaccaccctgccatcgggggattctaacttcccttgctttgttccacttagaatttttcactctgggaaacatcttcatccggattctgtttagcttttca

SEQ ID NO: 33329 - DNA, 330 bp, Glycine max
  Clone ID: PAT_MRT3847_13009C.1
gcacgcctccggcggctcggaattcggctcgaggattcttcctacctctaaagcctttttatggctctattattccactttatccgagggcgggttcgaaacccgtgggtggcttcctacacacctcactggataacgatccattttgatacccagatgctgcttgatataaagcctgatcttccgatatctgtttccctttacactactgactaggtgacctcgtatgttatgctcaattcaagccgaaagcgaaagattctgatccaagccttacgggacgccatcccgaggtgctgcacgttgttctggagggagagatgtttatgc

SEQ ID NO: 33330 - DNA, 452 bp, Glycine max
  Clone ID: PAT_MRT3847_1300C.1
aatgggcgacaccgtgagtttgcccaacttatcgaccaaagtagtagctattgctgcaggggaagcacacactctccttcttacaggggatggacgtgtttattcctggggaagaggaatactgggacggcttggtcaaggttctgaacatgacaagcattttcctgttgaagtcaagtttggatcagaagaagacagcgtaagaatagtgggaattgccgctggtgcttatcatagtcttgctctagcaggcttctccacagatgtcgataatgctcctggctccggcacgtgagggatatcagtctgcggagcctaagggatgactcggggctacggggcatgaccatcatgcaaaggatctgatgcgtggcctggtgtcatgaaaggatgcgagatgcggaagaaccagtccatgtagtcactagcacactgacctggcacagcgcaca

SEQ ID NO: 33331 - DNA, 170 bp, Glycine max
  Clone ID: PAT_MRT3847_130100C.1
gacggggtctttcacatattgcatctcacacctacctaaacgagatctttttattgtattttaccatacaatgatcttaggttgaatataaacaattctttattctcacacctcatcactgattagcactatgataccaccgagatacgagatctccgtacacatatata

SEQ ID NO: 33332 - DNA, 646 bp, Glycine max
  Clone ID: PAT_MRT3847_130101C.1
caggtggtgggagtggtactgctggtggtgacagtggaactggaagcagtagtggtgttcaagagcaattgtgaaagacaggtttaaggcattcaatattatgtttgaggaactccatcagaaacaatcgcaatggacagttccagactccgagttgcgagaatctcttaggctagcagttgctgaagtcttgttgcctgcctatagatcgtttgtcaaacgatttgggcctctagtggagagtggaaagaatcctcagaagtacatcaaatactcagcagaagatttagaccgaatgttgggtgaattttttgaaggaaaaaacatgagtgaaaccaagcggtaaaataattgctaatgaggttgtatttggtggctgaaaaggagttatcatttttgtcttttgggtattgccacgagtgtgataagatggtgaattgctctgcttccgtacattttgtgtatagttcacttgatttgttgggtgagatgttagtcttcaaagcaaatgcatgtatgctagtagaatctccgtttattggaacattgatttttttgaaccacgtgtacaagtgtttgtcattatatatgtaacacgggatttggtgtgtaatactctaccatcaaatttcaaaaattatttttt

SEQ ID NO: 33333 - DNA, 583 bp, Glycine max
  unsure (1)..(583): unsure at all n locations
  Clone ID: PAT_MRT3847_130102C.1
acagttttaagtcattcaatattatgtntgaggaactccatcagaaacaatctcaatggacagttcctgacactgagttgcgagagtctcttaggcttgcagttgctgaagtcttgttgcctgcctatagatcatttgtcaaacgatttgggcctctagtggagagcggaaagaatcctcagaagtacatcaaatactcagcagaagatctagaccgaatgttgggtgaattttttgaggtataataattgcttataaggttgtatttgggggctgaaaaggagtgttatcattttttgtcttttgggtactgccacaagtgtgataagatggtgaattactctgcttccgtacattttgtgcatagttcacttgatttgttgcgtgagatgtttagtcttcaaagcaaatgtatgtctgctagtagaatctccgtttattggagcattgattttttgaaccacgtgtacaagtttttgtgattatatgtaaacacgggatttggtgtgtaatactctaccatcaaatttcaaacattattttgtaattcttttgttatttccatttttaatttttgcatgct

SEQ ID NO: 33334 - DNA, 526 bp, Glycine max
  unsure (1)..(526): unsure at all n locations
  Clone ID: PAT_MRT3847_130103C.1
atgccattcatccacctgaagccccccnnnnnntnntnnngnnnacnctcnnnnntnnnnnnnnttantttgtnncttattttttantattttttttttcatnnntnattttnnnaccctttggggggggtctttatactatatcccacctttctttccccccccttccttctctttataaccaaccacatcttattatctccaccaaaacctccaaccacaccaccaccaccaccaccaccaaacctaaaaaagacatggccaccttccctcctaagaggtacaaccccagatcaaaaaaaataccccccccccaaccatggaaataccccctgaacaactacgactccaaaacacctatatcatcatccccaaaaacttctaaccccaaacttgaataatcacaaataccccccctccttccaaccattaaccctatatatttcgatccccacccacgatcaccattaaactcaccttatgccacccgtgaaccccctaaaaatgaatgctttacccccaaccc

SEQ ID NO: 33335 - DNA, 341 bp, Glycine max
  Clone ID: PAT_MRT3847_130104C.1
tcctgttttcaataaatcttatatgttgtatcattcttatgatggcagcttgcacagaaagaattgcagaagatcaacatgtacaaggcacccagggataaacttgtctgtattctgaattgttgcagggttattagcaacttgctgcttaatgcttcggttgcttccagagagaatcctccaggagctgatgaatttcttcctgtgcttatttatgtaaccataaaggtaatccaatgttccattacaaataatacatgcataattttcgagtagaaataatttggcttgatagaatgaagttattactttctgcactttctttaaaatatgggtatgac

SEQ ID NO: 33336 - DNA, 957 bp, Glycine max
  Clone ID: PAT_MRT3847_130105C.1
gaatacaataaatactcatactcgggaattgcattattctgtcctttaccattcacactatctcaaaaaaagacaaactatctgaatctgaactatagtacatcaataggagtagtattacagcatgaactgggagtcacacagaaaaaaaaaaaaaaagaagaagaagaaaaaagtattacggcatgaacaataaagataaataaaaaaatgtagacaggaattaaagaaatgaaggaatcaaatcaattaacctgaaacttattttccaactatagtatttttttttcttgtgaattattgccaagaataagggaacaaaatgagatgcaagtgtgcttgggttaccgttcaattcaaagtaacccatgtttttatggattcaccaagtgttgttacttctccgttctgtgcattggaatgcgcaaacaaacatttagtgcctctcaaacaataattcaaatacacacttagtgtccttggccagggcttggacctgagtccttcatctcaccaagggtctcactgttggtaaatttgtgaccctctcctccggggctaggacccgaattcttgattccaccaagggtctggctgttagtaaattggtgacctggccccccggaactaggaccagagtccttaatcccaccaagggtttcactattggtgaacttgtgacccacacctggacttggcccagaatccttcattgctccaagagataaccaatcaaagaaatccaccacttcccctccagtgactgatttttccgtctcaatgatactcaatggacgggcttctgagcccatgaaaaaaacaaagttcaccaataacatgagaactagtaaggcctgagttttcatcattttaatgttaaaaagggaaagtgaattgtggtgtctttggtttgggaatttgagagacaaagagagagaaagagaaggaggagcctta

SEQ ID NO: 33337 - DNA, 269 bp, Glycine max
  Clone ID: PAT_MRT3847_130106C.1
ggaagctgggggaccattttgcaccatgagtttgtgaaaaatctggattaaaaaattacctcttcagtgttttctcatgcaaaattttcttctagcatgtgataatgagtaaactaaaactattttcagcttttctcaattaacattttggtagtatacttcagagtgatgttatctaagtttaagtagtttaagtatgttaaatgtggatcttttacaccacatcacagtgaacacactggggagacgtgcttttttggaaaactcaa

SEQ ID NO: 33338 - DNA, 330 bp, Glycine max
  Clone ID: PAT_MRT3847_130107C.1
ccacgcgtacgaccacgcgagcgggcgtgtgctataagacgacagaaggggaccaaggcactcgctttcacttcaaattgattggatggggctctattacttcaacggatacgccgggctagctcatgtaattaggaagtgttaattcaaagtgagacaccgtctgcttataaataaccttcttaccgatatatcatgatttccaactctttagatacaaaatctgaatactctcagaagaactgtaaccactacataccgcaacataaactttgtagagtcactttgaaatcaaatcgacactgatcatcattgctatatagcgaatat

SEQ ID NO: 33339 - DNA, 1010 bp, Glycine max
  Clone ID: PAT_MRT3847_130108C.1
tccgcttggattgtgtctttagggatgatgctgaaatccctaacctaaaattcccctccctgatggctttaccggaggcttgggttgagactgctcctttcacccggtaccttccgacctttcttctccgcacagcatgctgttctatagggccttgcgcttcccgtatattccacgtttaaagctattgagaacaatgacccatatgagcaacaaaggtgcctattgtattgggcagcttatggttcttttagtgctgcagaaatgtttgctgaaaaattattttcctggattccactctatcatcacatgaagtttgcatttcttgtttggctacagcttcccactcttgatggtgcaagacaaatgtattctagtcacttgcatccattcctgttgaagcatcaagctagaatggatctgattgttgaatttgtgtatgatttctagtcacttgcgtccattcctgttgaagcatcaagctagaatggatctgattgttgaatttgtgtatggtgcaatgccactcagatggttaggaatctcattcatccagttgggagggagtcaaatggcattgaaccccaaaagaggcaggtttcagaatcagaagaagattaatacatgtttttttttctcattacaacaataaagtcttatccaactaagtgagatcaattacatggatcacatgacgtcatttgacatagttaattattggacaaaattaggttggctagtttttaatgaatgaatgtaatgatttgcacgtggtgcggagttttaattattagttctactaaagtttctagttttgtttatatttttgatttcctctcgctatacataggaaatagacatatttgatgtaaatactaattttcctagcagttgtcttgggagtatagtattatagtacatagttaggaccacgtttatgcttactgacctgtaagcatcgaacaaccatatgattataatttatgcattttatggtggtgattttcgac

SEQ ID NO: 33340 - DNA, 2608 bp, Glycine max
  Clone ID: PAT_MRT3847_130109C.1
ccacgcgtccgcttctagctactagttagcctctatctatctatctatctttgttaaatttattttttatgtttagttccatcttcagggtcaaacttctcttctctttagctagctagctgcagagattaacaacatggagatagaatcatcagcagcggccaccgataacaacaattggggtggtcgtggtgttgagagagagatgccatacagtggctttgacagaggaaccttcttggcttggcaagatctgagagtggtgattcctaactttggaaagggaccaaccaagaggttgcttaatggactcaatggctatgctgagcctggtagaatcatggctattatgggtccttctggctctggaaaatccacccttcttgattcacttgcaggtagactctcaaaaaatgtggtcatgacaggaaatgttcttctcaatgggaagaaaaaaggcataggagccggctacggtgttgttgcatacgtaactcaagaagatgtgctgcttggaacacttactgtgaaggagaccatatcctactcagcccatctacgtcttccaacatcaatgagcaaagaagaagttaacagcatcattgatggaacaatcatagaaatgggtcttcaagactgtgctgataggttaattggtaactggcacttgagagggataagtggaggggagaagaagagacttagcattgcacttgagattcttacaaggcctcgcttactgttccttgatgaaccaaccagtggacttgatagtgcctctgcattttttgttgttcaaactcttagaaatgttgctcgtgatggaaggactgtcatctcttccattcatcaaccaagcagtgaagtctttgcactctttgatgacctcttcttactatctgggggcgaaacagttattttggagaagcaaaatcggcaattgagttttttgctgaagctggtttcccttgtccacgtaaaagaaatccttctgatcacttcctacgatgtatcaattctgatttcgacattgtaacagctacactgaagggatctcaaagaattcatgatgttccaaattcagcagatcctttcatgaatttggctacagcagagattaaggcaacactagttgagaaatataggcgttcaacatatgccagaagggcaaagaacagaattcaagaactgtctaccgatgaagggcttcaacctccaacacaacatggaagtcaagctagttggtggaagcaactatcaacgttgacaaagagatcatttgtgaacatgtgtagagatgtgggttactactggttgaggatcataatttacatcattgtatccatatgtgtgggaaccgtttattttgatgttggctatagctacacttccatcctggcccgtggtgcctgcggtgcatttatatcaggatttatgacattcatgtcaattgggggctttccatcatttattgaagaaatgaaggtattttatcgagaaaggctaaatggatactatggagtagcagcatatattttagccaacttcctttcttctttcccattcttggttgcaattgctctgacaactagcaccatcacgtataacatggtgaaattcaggccaggaatcagtcactttgtgtttttctttctcaacatctacagctgcatctccgtaatagagagcctcatgatggttgtagcttcacttgttccaaatttcctcatgggaataattacaggggctggaataataggaatcatgatgatgacctccggattctttaggttgctctctgatcttccaaagccggtttggcgctacccaatttcatatatcagttatggttcctgggcaattcagggttcctacaagaatgacttgcttgggcttgagtttgatcctctcttacctggtgacccaaaattgactggagaatacgtgatcacacacatgttaggcattgaattaaaccattccaagtggtgggacttagcagctctatttgtgattctcatatgttacagacttctcttctttactgttctcaagttcaaggagagagcatccccattatttcagacactctatgccaagagaaccatccaacagcttgaaaaaagaccctctttcaggaagatgccatctttcccttcacagaggcatcaatccctccattcactttcttctcaagatggtcttgattctccactccactaaatcaatatcaaccacaaataaaaaaaagtgttgcacttgcatgcacctggattttcggattataacatacaaaattgtatttgttatctcttaattagcatatgtatagagaaaaatgtttcataaccgtttaaggtacaaacagacaaattaatgggacattgtctacgtccttccattacattttttctttctttctttcaattaaaatctctaaattgggataattaccttgtacaaatgcaggtatctctagctcatggtccttggcctagtaaacaatatttcaggttgaaactttggatagatgcatgaatacctgcatgaacaaaaaagtccacatatctactgatatacctattacctccaagaaatttatcgtaaa

SEQ ID NO: 33341 - DNA, 469 bp, Glycine max
  Clone ID: PAT_MRT3847_13010C.1
gccgacactgaaaatgttaagtcatcagcgactgcgaggaataatcttatctgcctttcgcaatttcgtttccagtttgccctcgtgacgttgactattgtttttttgttgctgctgctccgaaacacgcatctagaaagccaagtcactaagttgcagggtgagattctcggccttaatcacagattacatgcgtgccacaagttggacaccttgtacgtaacaagtttcatatctcaggacgtggatccttggtcacgtgaaaactttaaaagaagctaactgatggtggccttgacataaatcgattggaaaatatatctctggttaatcgtgaggggaatgctgttatacgtcgccacttggaaagccttccattggaatcatttgattcaatattgattttggctgatgaatcagtagaggattcagcaattcaagctgactctagatctcttgccactctact

SEQ ID NO: 33342 - DNA, 568 bp, Glycine max
  Clone ID: PAT_MRT3847_130110C.1
ggctcgaggcttttttctctttaatttggtttaagctttgtttgttaatttagttttccaaatttaacacattgttaaggctaattatggctgatattgagggttctccaggaagctccatgcatggagtaactggaagggaacaaaccttcatagcctcagtggcttcccctatggtccctacagacaccacagcaaatttcgctttgccagtagattctgagcacaaggcaaaaattttcaagcttttttccttagccaaccctcacatgagaaccttccacgtgtcttggatatccttcttcacttgctttgtctcgaccttcgcggcggcgccacttgtccccatcattcgcgacaaccttaacctcaccaaaggcgacatcgggaacgccggcgttgcctctgtctccggcagcatcttctccaggctcacaatgggcgcggtttgtgacctacttggaccgcgttacggctgtgccttactcatcatgctctctgcaccaaccgtgttctgcatgtcttacgtgaatgatgctggtggatacatagcagtgaggttcatgat

SEQ ID NO: 33343 - DNA, 355 bp, Glycine max
  Clone ID: PAT_MRT3847_130111C.1
atttcattaatactcttctattcactattttataaacttctctcaggaggattacccaaccatttactataaccatcatttctttaacacaatacgggtctctgacttcacttacaaatgaacctaacatgaaattttaaaaaaacaaacatcacttttgcattcaaatttaatattctcccctaaaaaacatctaataattctttgaataaacaaaactccacggcttgtgtccaaataaaacctggaaaacaacatatctaaattggtcctgtgaatattcatacatcattgcatcactattccactgcttgtcaacacccccactagatgagtgattaaaccctttggtgcc

SEQ ID NO: 33344 - DNA, 348 bp, Glycine max
  Clone ID: PAT_MRT3847_130112C.1
ggcaccggacccgaacccccgggacgatccacccgcctgaatagaagccccacgacgacagaaggggaagggagacccaataaacgacccgagcggagggaccccacaaccagccaagacaccaacaaagccacggaggaagcaaacggggcccaaaccaagaaaggaaccgccccacaagcacccgcgcacgccggccaaaaggaacccacccagcaaagggaccacaaaacacaaagaaccgcggaagaagaaccgcacaaaggggacgacggcgaagaagggcggccccacaggagccaacaaccgaccgccaagaagaaacacgacgcccgacgccacaacacg

SEQ ID NO: 33345 - DNA, 345 bp, Glycine max
  Clone ID: PAT_MRT3847_130113C.1
tctcggtttttgcttttgagtaccaccaccaatggtgattttgttcaaggaaaggatcttgcaatggataaagttaatgtagcatgtgctgctgttggttcgacatcaagttacactccaactccattgtttgaatctggttagcaaaaagacagagggtttattgtggcgtattttggaaggatgtcttacgctgcttataacgttaatcagccccaagagaaagatttgccggtgggaaacttttcctttgctatcaaaactcgctcttgattggaaaaagcatcctcttcaaaagcacaaattgctagctgtaaaaaccctcaaatatgaaataattggtgc

SEQ ID NO: 33346 - DNA, 126 bp, Glycine max
  Clone ID: PAT_MRT3847_130114C.1
tacaagcggcggctgtggctgccagacaccacctgttcatctaccgcctccgatctatatgccgactccgatctatctgccgcctcagcaacaaaccacagccatggcaataccccactcaaccac

SEQ ID NO: 33347 - DNA, 2358 bp, Glycine max
  Clone ID: PAT_MRT3847_130115C.1
cttggtttttttttgttttgttgtagagtttcagtgagaatggtgtgcaagagttcacagttgagtgggaatgtcttgggaaacacctctatgatgatgtgttgttgttgttgctaaattattggggaactaattggatgtttcttctgtggtgaaagaagataaatgcactgttgatttcattcatggttctgttatgcagaaattatggagttctgtttcaattggtgattgtgacatttggatttgacagtgctgggaccaagcttttgtgtgtgtgaagctttttttatgttattatcaaattttttcattacgtttaatcattcaactttctttttcccatattggaagaaaggggggattcactgaataatggtggctaggtgtctcaattgcttgcccttttttctttgatgggaagagtggactgcaattttcagctttttgctgtggaacatgttctggttatggtctgtgcatgaagaaagaaggcattgatacctttccctccaaagaaatcttatattgcttctctgagattcactcggttaggaaacttgggggagtgaaattggaattcttaaatgctttgagagtgaactcaccaagctgcatcttagccttttgctccttcaacatgttgagtaagaaacagcccggattataggttgtgcaagattacagctgtgaggagtttgtatgaacataggcaacataaggtcaatattaccttattagcatccctagaaaagggaaataaggaaaaacggaagtgaactgcaccaaccgatcattatggcaaagaggtcccaaagattccctgtgaattatgagaaagatcagtcaggatgtatgtggggttttattagtatatttgattttcgtcatgcccgctttactcggaagttgattgcggataggaggcatggcagcaagcatgctgttggtgctgcacttaccaagaacaagtttgaagtgttgagcaatttggatgaagaatatgaaggcaattttgacagaggagagagtaagagactaacactgacaaatgatgcagataagcttagtgtgaagaaactcatagaagaagagatgatcattgaccaggatgaaataaaggaccaaggtaatgctgatgtagaatcaaagcaatccagattagggcatgaaggccccccaaagacagattccaaaagaaaaaagaaatctcgcaagaaaagccgtgatatggatagccatgatttgaattcagatgcaaccttgaaatctgaattttcacataaaccgcattcaagacaacagtcaaaagataacctggatttgaacaaaataatggatgatttttgtcatgttgaagctgcttgttccatgatgaatgatgatcatggcaaaattgatgaacagtcaaaccaaaagcatgttatctctgaaaacctagctaatgcaatccatgaatttgcaaatcagatgagattgaatgggaaagatctgcctgaagatggacaattgcttagctcacatgaactcatggaagcacttcaggttataagttcagataagcaattgtttcttagacttctacaagaccctaattcacacttattgaaatacattcaggagttggaaaatgctcaagggagaggtggcaaagaatgcagttcagttaccagctccaactgctctgaacatgaacttgttaaactgaaacaaactagggagactgccaaccgcaagcatcgtaactttttcaggaaaagggtgaagtctcaaccaaaagattcaacaaatgaaaatgagaaaactgaattttcaaatagaattgtcattttgaaacctgccctaacaggcatgcaaatttctgaaagtggaaacaaccttgcctcaacgctaaattctcatgacatcgcccagtacaaaaatccttcagtgagagttggttcacatttttctcttacagagataaaaaggaaattgaaatgtgctatgggaaaggagaggcatggaaaccctgaattgatcccacgcaaactccccgttgaacgtcaaaataagctgccaagaggaaaatgcaaagataatgctggaatgagatctcctaataaagaccatttcttcattgaaaaaattacaagacctatgtttaatgtagtgaaaggaaacaagaccggtacaatgaaagactctgaattgaatgtggaacatgaaagtggtattcccaatcaaagtgtttctaacatatatattgaggctaggaaacatctgtgtgagatgctagataatgctgatgagaacacaaacatttcaagcaggcagatgcccaaaacccttgggaggatactttctcttcccgagtac

SEQ ID NO: 33348 - DNA, 347 bp, Glycine max
  Clone ID: PAT_MRT3847_130116C.1
aaaaaaaaaaacaaattggtttattggggaagggacctacaaagacctcaactggctttcacaattttggggaattagggaataagaaggggaccccccgttccattaattggaagcccccccccccccccaaaggggttgaataaccccccccccaagggaagaaaacctttttttttaaaaaaaaacaagggttttgcaaatcacttaattctgaaaaacgaattggatcacttgtaaaggggattggccaaaagggaggccccaaccgcctttaaaaaaacattaaacttgacttttccaattttgagggcctctgggttgggccaaacccctcccttgggttg

SEQ ID NO: 33349 - DNA, 172 bp, Glycine max
  Clone ID: PAT_MRT3847_130117C.1
gcttagtgcgtacaacttgggggatgtaattgggttcatgaggcctttgtatctgtaagggtttgggatgaagaacatggtaactcacctcaaggtggatgcgatgatggaaaaggcgtcgagggagcatgaggaggctcgggctaaggacgatgctgtctctgatacgaag

SEQ ID NO: 33350 - DNA, 333 bp, Glycine max
  Clone ID: PAT_MRT3847_130118C.1
cctaaagggagggatataaacctaacaattcatcagacttaagcagaacatttttagtcctaaccgggggacttacgccacacgtgggactatggggccctttagtcccttagactcaactggggtttttattatatcccaccaagagtttaagctttatattatagggggggggatcccgactacatgggagtttattggggcctttattttcttagccttaattggggttacttttatactatgacatcccacataaaatttcacattgtaggtatagaaacatggttagtaatttcttttaaggattgtttttttaacaagggcaacaac

SEQ ID NO: 33351 - DNA, 1736 bp, Glycine max
  Clone ID: PAT_MRT3847_130119C.1
aggccagcgacgccttagaccaagcacctgcggaatcccttaagcctgccaaaaagaagaagaatgttaagaagggaagcgcagattccgatgcggcggatgcaccggcggacggaccatagagagagtttaaatattcccccgcgccgccaaccacatccacgaggccccttgtccattctccaaaacaaaatgaagagcctcctcttctctctcttcctcttcctcttcttagcctcctccgccgtcgccaccgtccccgcccacaacatcacccgcatgctggccgcacaccccggcttctccaccttcaaccactacctctccgtcacccacctggccgaagagatcaaccgccgccagaccatcaccgtcctggccctcgacaatgccgccatgtcctccctcctcgacaagcacctctccctccccaccatcaaaaacgtcctctccctccacatcctcgtcgactacttcggcgccaaaaagctccaccagatcaacaacagcaccaccctcgtctcctccatgttccaggccaccggctccgcctccggcaccgccggctacgtcaacatcaccaacctcaaggccggcaaggtcggcttcgccgccgaagacaacgacggctccctccactccttctacgtcaaatccgtcaaggaaatgccctactacatctccgtcctccaaatcagcgccgccattagctccgccgacgccgaggcacccaccgccgccccctccgccatcgacctgatctccattatgtccaaacaaggctgcaaggccttcgcggaccttctaagaggctccaaggcccttccatctttcaaggaaaacgttgacgggcggcttaacggttttctgccccaccgacagcgccgtcagcggtttcgcgccaaagtacaagaacctgacctaagctcagaaggtttacacttctagttgtaccacgcgacttccgtgtacgagtgcactgcagatgctcaagtccagcaacggaataatgaacactctggccacagagggagccaacaagtacgacttcacggtgcagagtgaaggggaagacgtcagcctcaagaccaaagtcaacacagccagcatagtggggacattgatagatcaggatccattcgtggcatataagataaacagggtattgatgcccagagagctcttcaaggccagcgacgcggcggatgcacctgcccagtcgccaaagcccgccaagaagaagaacaagaacaagaacaacagccatgcggcggatgcaccggcggacggaccatccgacgacgacgctgattcggaagatcagaaggctgcggatgaagacagcaatggagtaagcggattgcacgtgagattcttcatggtcttcttcagtttaattatggcttttttggctctatgaaacacccacatggattatggagtgtcgctactatacacttgtttcaattaagattcttttctttctttaatatatgtcaaggaaataaaacgctgccaccgacatgtaggaggccatgtgtacttttttttattataggttttgtatttgttgtttgtctgttttccgaattattttattggcctttttttttcagtgtgggtagatccggtttgtgctacctgccagctatgggatgtgtgcatataaacacttttcaactcattagttttttatgtccaattaactctcctattccctctcatgttttaatggt

SEQ ID NO: 33352 - DNA, 128 bp, Glycine max
  Clone ID: PAT_MRT3847_13011C.1
ctacagggataagctgtacgcctgacgcccgcgggccccgattccgggttcgagccacgccccacgcgcctttttccatttttgccgacacatgactcttagcggggcaagggtgactctaataatct

SEQ ID NO: 33353 - DNA, 314 bp, Glycine max
  Clone ID: PAT_MRT3847_130120C.1
tacatacacacccatattcacacttatcgtcatataaaaacgcctcatcgtcacaacaaaatttctctcaacacaaacttaacacacactctacttcatctactaccctcttaataacaacttcactcttaaaacttacataccaaacattctctatcttttaaacaaaaaaactcactactatattcctaaattatttaagaaatttgtttttaacaatatcatttacttccaaactatcatcatccacatcatgacttacttttatcataatccacacattaaaacaccactaaaaaacatccatatacttt

SEQ ID NO: 33354 - DNA, 335 bp, Glycine max
  unsure (1)..(335): unsure at all n locations
  Clone ID: PAT_MRT3847_130121C.1
acnccnnaacgnnctnagccggaattcggtcganngntnatcagcatcatntgggnatnttagcctggtgggaacctnggcagtgcatttcnntgacaggtatactgttancagggttcagtcctggcnnagttgccacaagnactttcnaanancaagcantgatgggcttaggagcaattctacngagaaggncacaggctntcnntcntcaactccatggtgancaacnagtncccttaacaccaaccaancaagtcagggagaggtttatggnctncactcaantcccaacnaggcagcaggagcnacaagnccagctcttcaagatggcc

SEQ ID NO: 33355 - DNA, 440 bp, Glycine max
  unsure (1)..(440): unsure at all n locations
  Clone ID: PAT_MRT3847_130122C.1
aaaatgtatttttgttgttcaggttgttgtatatatgagatggctgctcatcgcccagcttttaaagcttttgatatggcagggttgataagcaagataaaccgttcctctattggccctttgcctccctgttattccccatctttgtaagtttcatttgcttttgttaaggctagtatcattatgttagtagaaagtgagtgattactcaggatttcttggtgaaatcacattcatttggcagaaaaatgtagttactatagtaggggtgtaaatgagctaaattgtttgagtttgggttgttgattgctcaatcatgctcatgtgtttagctaaacaaaggaacaaattcaaacttgaagttagggtcaattgcttaaatgagctaagcttaaattccatagactngacattaatagctcgcatatgtaagtattacc

SEQ ID NO: 33356 - DNA, 427 bp, Glycine max
  Clone ID: PAT_MRT3847_130123C.1
ggggggaaaaaaccaacccccccattttttaaacggtcaggggtaaaaagaaaaaggggattttaaacttaagcaacaaagggggccaaaaggggttcaaacccccgaattcccccccaaaagggggaaccctacaccccccaaaaggaaaaggggggggaaacaaaacccaaccctggggaagacgggccaaaaaccctcaggccctttactaaaaaaattcatcatcctcggggggagggggcggactaacagcggaaaaaagcccaccccgggggggggggggggcagaaaaaaaaattggaactttggggggggcccagggggggaattttacaaaggggaaggtaggacccccggcaagtttccgggccaaaaaaaaaaaggggttttaaaagggggggtgggccttaggggaaatcccaaa

SEQ ID NO: 33357 - DNA, 194 bp, Glycine max
  unsure (1)..(194): unsure at all n locations
  Clone ID: PAT_MRT3847_130124C.1
antnntgcaagngtangtnaggtcngaattcgggtcgngannnaaanaatnttagtgtagcggngtgtntctggtgcagtgacnttgaggnttgnntcagtngtgtgggntttanncnccnnggtaagtcacgaccgtttctncatccncaatcttcgtcggaatcnccantctctattcgcngctcctcntnc

SEQ ID NO: 33358 - DNA, 289 bp, Glycine max
  unsure (1)..(289): unsure at all n locations
  Clone ID: PAT_MRT3847_130125C.1
naacncgtacgtaagcntcngnaancngnnnnttcnnctcnnncatcaaatacntattgacncnaantnactatnaagcctaccctactattatcccttcccttcctgccnantctttgctttccnggctctttcagaagatgttgaacaagttgtggacataagtggcaaccccattttcccaggtggcacatattacattatgccatcaacttggggcgctgccggtggnngattgaaactaggccggacaggnaactcaaactgcccanttactgttttgcaagan

SEQ ID NO: 33359 - DNA, 712 bp, Glycine max
  unsure (1)..(712): unsure at all n locations
  Clone ID: PAT_MRT3847_130126C.1
ccacgcgtccgcactgtaagaatggagcaaaacctaatgctggccgcagaagcagagcgcgaaaaaagcaaagccatgtctgattccgacgagaggatgaaggaaaccctagccctgtcctcagaagcagagcgtgacagagacaaatccatgtctgatttcgacgactctgattctgaggacgaagctcagcagaacctccaactcgaatctctacagaccgagcttgttactaatccctctaactacgatgctcatttgcaatatataacgcttctgaggagaatgggtgatgttgataaactgtcaagagccagggaagctatgagtgaactctttccgttgagccctgcaatatggcgccaatggatcaaagatgagctttctctcaacactgctactcgacccgaggctttctctagaattctgaagctttacgaacgaggggtgtttgattatctgtctgtctctctatggtgtgactacattaattttgtacaagagtttgatccaatggtacgccaatgttcacctactggtatttccaaggcaagggatctgtttgagagtgcccttactgcagccggtctgcatgttgctgaaggcagtaaaatatgggaagcataccaganatatgagcaggacatacttttaaccttcgatgatactgatgaacaggccaaagaaaagcagttcacgcattcgtagttta

SEQ ID NO: 33360 - DNA, 269 bp, Glycine max
  Clone ID: PAT_MRT3847_130127C.1
ccagcggggactttcgacacctaataaaatgaagctcctagcaagaccgagttctcaactgatgagatactgtctggttttgctgtagtttgtggtgctaagatgatgcaccctcggtgcttacgtagtatacttctgtctggattcacctttttttcgcatattgtgttaatactctgtaaattatcaaactggcttcctcaatgctcgtgtaattaaatgaaccgttgagtgattaagctagaaggcaagatatactttctatggag

SEQ ID NO: 33361 - DNA, 490 bp, Glycine max
  Clone ID: PAT_MRT3847_130128C.1
aattcggctcgagtacggctgcgagaagacgacagaagggggggggaacataattatttaatacatttaagtaaaatttactttgtgaaggaaattgttctcatagatgtcaatacagacccgtccctctccatataattaataaaacctctccttttttcctcccatttatttaagtcaaattttttacaaggcctaaaggtcattttgtttttccgttcagtgtatctgccatgaactcttggcaccttgttgagagtattttacttctcaacatggtaatgcacttagtgtcatctcactaatggaaaggacaatgagttactcttaaaatattacctccagaaattatgtttgacatccccataaagtatattgaaaaacttctcctatatcaataagatggaccatggtaaaaaattatgtctcttaaacacacagtaaagaattttgttcttaaatttatgtgtatgagataatatttgttgag

SEQ ID NO: 33362 - DNA, 324 bp, Glycine max
  Clone ID: PAT_MRT3847_130129C.1
tcgtgttgacctacaatctcccatgagatgctagtgctatatagaaatgaaagcggactgcgccaggcaaaaacttcaagggtgtatttaccaaccgccaaaacaaatgctggactgagcacgagaggagatgagcactgacagagggggaaaggatggaagaagccagacatagaggcatctcagctgaagagcttgcaaagcgagcatatgaatacgaaaaacatggggctcatcaaagcctgagggaccaaacacctgctgaagacaagatgtagtctactaatgatgagaagcttgcaaaaaatatgaaccttatacaaa

SEQ ID NO: 33363 - DNA, 238 bp, Glycine max
  Clone ID: PAT_MRT3847_13012C.1
gagacccttggccagacaggacatgcaccagaacatgggcacgtagagcccgaaagaggaccaggaccttcagaagcttgcggagcggcacgggcacaaaatctgcttgctcattagtatgtccattccaggcccgcctgggaagttatgcaagctactgtggtgcaactagctgtcgctccaggtgcagctccgggcctatacactagaagaggactagatcattattcggacccat

SEQ ID NO: 33364 - DNA, 360 bp, Glycine max
  Clone ID: PAT_MRT3847_130130C.1
ggaaatcaactaaatttatgacataggttaaaatgtcctttaacttagatgaatttgttgttttattattatgggtttctttcaaaggggcacctacacagaaacacaggcgggggtaaaaggtttaaaggggctttttcccaaaatccctttcattaatagctgggaccctttattttaaggcaccatttttttcatttgttcaaaccttactttttcaacacaaaggtttaggcccacgtacttctgattgggcggaaccagtttttacccgggggtatatacagaaatggttgccaacattttttttcacaaaatcctttacattttggtgtctttcagggagaggggtcttttgga

SEQ ID NO: 33365 - DNA, 459 bp, Glycine max
  unsure (1)..(459): unsure at all n locations
  Clone ID: PAT_MRT3847_130131C.1
cggacgcgtgggatatttccacattcataaaagcttgaggtgtccattccttcctgaaattgcattttatatttcctaatcatggtttctatggcaccgcaagagctcatccactcaactattagatgttctatccattggtcacatccttcaattttgagacaattctggtaacttagaacatgcaaaacccacaaaaatcacggatgaaataagaatttagggctctaaatgcgatcacattcacataggcaggtagtacttctcgtcaattgctgacagaaaacaagaaataggcttgcgccagttagttatactcgcataggaatcacaaggattgaacaggctctttgcctcttgtgccttctttttggtgctttttcctttggtggttgaaagaaccccttaacggcagtatcaaagacgtcttttacatttggttatcacagtnacacatgc

SEQ ID NO: 33366 - DNA, 358 bp, Glycine max
  Clone ID: PAT_MRT3847_130132C.1
agcggactttgctttatatagagactgttttttggacgggctggctgggggaaatgatgaacggcataggacacgtcaacatagttgaagaataatatcaaattgatccatagggtgaggatgatgaggatacataacatgtgtgggaccgcgaagatgaatcgaacaaacaaatgtctgacgttaaggtaaatagtgtgcggtactacctggaaacgccttagacagatattgacagttactggataatccatgcttgggaaataagccaatacaatggaactttcttataccatgcgcgcaatagctccgattcgcatggcattcatactgcaaatttactgatagcacattatgg

SEQ ID NO: 33367 - DNA, 633 bp, Glycine max
  Clone ID: PAT_MRT3847_130133C.1
cttttccttactacacccttcatcctctatcttcttctctcactccttcttctaaaggctctgttcatctttgtccatgctcttccacacgttctcgctctcttccccaattcccttccaaactacgacgcaaagccaccatcaagccgaggctgttgacgatcatcgaccccattttgctcttcaacggcgtcgccaccactttctatttcgacacgcaaacacttatcgtcactgtcagtgttttggccgccattgctctttctctcttccttggccttaagggtgatccggtgccttgtgagcgctgtggtggcaacggtggcacaaaatgtgtattttgcaacgatggcaagatgaagcaagaaatggggttaattaactgtaaagtatgcaagggttcaggattgatattctgcaagaaatgtggaggttctggctattcccgtcggctatgagctgtgaaattcgtgttatatctaaaaaccatctgttctgaaatatgtaaggtcttgtaacaattttattgtccatagtgtcttttttctgtgaatcattttaatcacgttaatctgcggccctttgaggtattggccaattgcttttgcataaaatcagtcaaattttgatctt

SEQ ID NO: 33368 - DNA, 1394 bp, Glycine max
  Clone ID: PAT_MRT3847_130134C.1
tccggctgcgagaagacgacagaaggggcttcaccctaatattatgactatgtctttctagctcctaaattcctatgcatgatggccattcatacccccatgccagccacaatgagcagcagtcctgcacctggcggcccatcctagtctgcaactggctttattgtcttaaagaattcaacacctgcaggcaattgataccctcatgccagccacaatgagcagcagtcctgcaccttgcagccgatcctggtcaataagtgaggactccctaagaaggtatgtgcagtttgcgagtgaaagctgcatacaagagttattggcagcttcggtcacaaacaaaggaaatggcaatgatggatggaaggtgctaactcttgaaaatggagtggagatatcaaaacgaaggtcagactcactccacacgtttcgcagccgttgggttcttagatctgtctctccccaacagttcatcacagtggccaatgccattgatgctgcaaagcaatgggactctgatctggtggaagccaggtacataaaagatcttgaagacaacctcagcataattcgtcttaggtttggtgataactccaagcctctcttcaggaatagagaattcattgtctatgagcggcgtgagactatggaagatggcaccttggtggtagcagttgcttcactgccaaaggaaatagctgcagggttacatccggagcaaagtaatgcaatcagaggactgttgctacagtcagggtgggtggtagagaagcttgaagatgattcatgtgtggtcacttatgttgttcagttggatcctgcaggatggctgcccaagtgctttgtcaatcgatttaacacaaaactggttatgatcattgaaaaccttaaaaaattagcccaagcatgtcctagtgaaggtgaaatttgattactttgtaaccaagtatagtattaatgcccatcattgagatttacttaccacagtattataaatagaattaatttcttcggcatttaagatggagatttaagtttgtactaacatattacaactcagccaggtagaagactttcggctctgttttccgcttttttggtatcatagactaatttcctggaaatgttttatacaactcattacatagagacgaaaaggggtttatacaaggatcacaagtagtgtatttcaaaattaaagaaaaagaatgtacaagtttatttgtaaaaagactaaaatcacacttcaaagatgtttaaaaaaaaacaaacatattttatccttttaattttatttgatatttatttattacaaaagaataaatatctttattcctttaaacttaagtttatttcaaacatgaaatatcaatgactaatgataaattatttat

SEQ ID NO: 33369 - DNA, 184 bp, Glycine max
  unsure (1)..(184): unsure at all n locations
  Clone ID: PAT_MRT3847_130135C.1
attggngtgcccccccagccgcaacaagagccggcaccagacggacaccaaccacgcccaccacccacccggcaancagcacgggcnacagccaaggaggaacaagccaccgcccagaaacgaccaacagagcagacccaggaaggcnaaaacaacaccaccccaacacgggacaagccaacgg

SEQ ID NO: 33370 - DNA, 482 bp, Glycine max
  Clone ID: PAT_MRT3847_130136C.1
ctagttctagatcgcgagcggccccccgttttaaattgtttcagtgatttaaggaaaatgggttccaaggctttgctcgtccttgttgtgttcttggcttttgtcctcgttctttctggtgaagttgcacccgaagatatggatgagaattttcatgcaaatgatgtaggtgttgctgatacaaatatggtagatgaaatgaaatatagttacagtagttggcgaactggtgctgcactgccttgtcctcctaattgctgttatgtgttccatggaaagtgtataccgtgctgctgaaccgcataactaagtaggaacttttgctaagaattagttgttgctatcactattgctatgtatagataaagagaaatgctagcaacacaaactacatgagaagtgtagttatgcatggaataaaaatgaaaatccctcatacttaataaaagaatgttagattaatttgaaaagatttctctttc

SEQ ID NO: 33371 - DNA, 376 bp, Glycine max
  Clone ID: PAT_MRT3847_130137C.1
attcaacgtgccaaagtaactatgatcgtgcagcccttattattatcataaccaccaccatttattctctgtaagcctaacctcagcaatagcacggatcatcaattcttacacattagtcgcacggaacgagcacatagaagagaactccaactgctaggtccacaccgtacacgctttcataataaacaaagactatcataaaaagaagaaaccacctgttggcacgacaatcttcacactctaataaacctaaaccgtgccatactatagtaatctacaccgtgttccataaggcgaacaacactatctcaagtgactacatgaacctctgccaacggatcactgagtccagttcttgttcatctgctgaagc

SEQ ID NO: 33372 - DNA, 171 bp, Glycine max
  Clone ID: PAT_MRT3847_130138C.1
gaacattacattcccagaaaatgatcttccggagaaagacgcgactgattttcataagctggtgtgtacgtgggtgccaaatgtggaggaccgggcattgcgctaaacaatgattcttctctttggctatagtctgagcatatggatcaacattcactcgcgactgctttg

SEQ ID NO: 33373 - DNA, 271 bp, Glycine max
  unsure (1)..(271): unsure at all n locations
  Clone ID: PAT_MRT3847_130139C.1
cctcaaatttaacaccatcctttgtggcgccaatgnnaagagccttggacattttatccgttccgttcaacccccacattttgtgtccttctgacaacgcgacctcatgcatcaacaacaacaacctccctctgaacgtccccttcgcccccttctcccgctccgacatattgttccgcttctccgactgtacccttaacttcaacaaatccaccccctccaaaaaccccgccgatgccgtcttcgacttttccaacgacgacttctttcc

SEQ ID NO: 33374 - DNA, 1009 bp, Glycine max
  Clone ID: PAT_MRT3847_13013C.1
gcgagttgcacatcgtcttagtcttgttgaattttcttccccgctgtctcgtaatctccgccgtcggattctcttgttttgccggaagcacgggcctcttcttcctccttcatccgaagactctctccccttcgccgtcgcggtgggtggctgagagagaaagacttaacaactcagagttggtattggcaacgttagaagtgtaatatccagggtcagggaattgggatatcccaattgatgtggttggttccaactaacatgccaggagctcacgaggcattcttgggatcagagatgtctcaggtaacatattctgcatcgggaatgttgggccaccccatccgaactgtttggttcctaaaaacatgctggaatttcacgtcgtggtctcacgtaataccctctttcccatcaaccgctatcataatgggtcttgtgcaatgctataagggaaatagtgaggataacaaggagctggtgtttagtgtgcagaggaccctcaaaacaattactagagttgagttagaggtacttttcgaggctgagaggtccaatgatgaatgttgtgatttgaaagtgaagtgttgcccattcaagagatcatgttgcatatataaacatgttgatttggtggcacagagttgcctgatgtacaggcccctccaaatacatgtcagtaggggtaaatttcgcctcacaatctttcatgggactattgaccatgctcttattattgctttgcttagagtatttttgagtggaagaaactactaatattaacccacggcatgcaactgcaagaagagaaaaagattttgatctatgatctttctgtctcactcatacacagatttattttgctcgtaacattctttcactgactattagggggaggaaatgaggcattgctccttacaagcaattcattgttatggcactaagcaactcatgaaacatttgtcattatacttatttcagcaatcttcattctcaccattcatgtggc

SEQ ID NO: 33375 - DNA, 293 bp, Glycine max
  Clone ID: PAT_MRT3847_130140C.1
gcagcaaaaaattgataaattaaaaatgccgggcaaaaaaatttgaaggaataacccttcccaaggatatctaaaatctaaattacagtattaggggggggggggacactaaaattaccccgaaccatctttaagttatttaacttttcaaccccaaacacagctcatgcccctacagggtcagggggttttttcagccatgcattttcaacttcatccaaaaatggggccaaaaaattcctacatggggggggaaaggagttcacccaatttatctccccgggacttaaaaa

SEQ ID NO: 33376 - DNA, 384 bp, Glycine max
  Clone ID: PAT_MRT3847_130141C.1
tttttgacacagcaaactacaatctccgattaatctcttgataatatcatattaaaacaactatggtgtcaacaaaattaatcggtacaatggagaaagaaacctaacactaatcaaaattccctgtggaatgcacttgaacttcttcagttgtccaattgttcctattgcttcatgacacaagggtttcatcaagtcataattcaagtaagaagcaacttgaaacgagcattcttactgctgctggagtattaaccaacccaagggacattcacaagcttggactaaaccaatggcatgcacactggaaaagactaaactttattatcaaaattgtaactgttttctttatcctagggagttatgccagggcccaagggtcca

SEQ ID NO: 33377 - DNA, 520 bp, Glycine max
  Clone ID: PAT_MRT3847_130142C.1
ggggtgaagcatggcctcatggccacccaaacctacagagattttttgtgtgcatgcgagggagaaagcgatggcctcatcgccatgtgattgctggccccatctctctcctccttcttccattgagcatgtctggaacgacatcaaactcgactctctctccaattcccctgttgacatagacttcaacaacaaccactctgtctctgattcttcttttcttaacctcacttccacttcctcttctgtctttcacaaacatgaccatgaccactctcttctttctgtctccaacacttccttcgaagcctccggctctaagaaaaccaccctgctagatcaacgccatgcgcgtataataaaaaatcgagaatccgcggttcggtccagagctagaaaacaggcttatagaaaaggcttggaagttgaaattgcccgtttaacggaagagaattccagactaaaaagacaattgaaagagttgcagtgctgcttgtcctcctctgataaccctcccact

SEQ ID NO: 33378 - DNA, 304 bp, Glycine max
  Clone ID: PAT_MRT3847_130143C.1
ggctcgagggctgactcatgacaaacaactctgtattatatttagctgaccagaagcaagtgtagggattgtggcactaactaactaagcatgcttttttttgacaattaactatttgaacgccttacacttgtcttagcattacattgatggacactctccggtggactagaacctgcataatgagcattggcactgtctaagtgggtgccaaaatacattgagcgggggactagagtatcgctgatctagacaaaggctataaaacttcttcggtatgagacaatactggctctatcacctg

SEQ ID NO: 33379 - DNA, 814 bp, Glycine max
  Clone ID: PAT_MRT3847_130144C.1
attttgtcttggtacgcacttactgccctatatgttttaagtacggctgcgagaagacgacagaagggggcacaccagaaacattgtgattttcaaggtaggcttttctccagaagatagaagatgtttggccaacttgagcatgagctagagctgcacgtgccggcgagtgaggcatgggatctgtttggtgcccttgaaataggaaaacttgttgcccaagagctgccggaattgtttcaaaaggtggagctaacagaaggagatggaggggttgggactgtcctcaaactaacttttgctccaggtgtacctgggccagctggttacaaagagaagttcactaagattgataatgagaagcgcataaaagaaacagaggtagttgaaggagggtacttggagttaggattcactctatttagagttcgtttggaagtgatagagaaaggtgaagagtccagcataatcaaatctacaatcgagtatgaagtcaaggaagagaacgcggccaatgcctcacttgttactatccagccagtggcaaccattgctgaacttgccaagaattatctcaacaaaaacaaggctgcaaaagaagcaaattaagtagtaatcatttgcctatatagttcatgaataaagataccaacttaattacatgctttgtctcatcaattcatatcacaatgttttctttctcagatgatttgcatttatcttgagaaacatctatgctatgaaatgagaattgggtggtagtaataccatatacattttgttgatcagtacattcatcaatttaattatcagt

SEQ ID NO: 33380 - DNA, 359 bp, Glycine max
  Clone ID: PAT_MRT3847_130145C.1
gtggaatacatattctacaaaacaacatataggtctatacaaaatctccttaccaaattcccacgggataatggtatttgaggggggctataaacatatttatattttttaaaattattacaccttggtaacttatcctaactttaataaacctccaaatatttaactcacctttactttcatatactaaaattaactaattccttcaaaattccttcttaaacatttcacataatgtatatatatcttttacgttcaaattaatctacattttttatagtattttaacaaaatttatcttactatacaaaacacattctcatacattttttcaaaaacatctattccctctcattact

SEQ ID NO: 33381 - DNA, 580 bp, Glycine max
  Clone ID: PAT_MRT3847_130146C.1
acaacactatggttgcttccagactttctcgctctgtttgtgcgatctggggactgtgctcgtttttggcgtggccaagggccccatgcgtgcgaccgaatgcctctgtcacagtgttatcaaatagcggccatggtggaaaagcgtggtggaaatttgaaaaaatgccaccgaatagaggtggcatggcgggttgggatggtggtcatggcggaatagcagatatttttttggttttttgcgcggtaggtgttaggctgacccgacccaaccttacccgaaattgaagtgcaaaagcgcggcgggaggacgcacaacacataacacaacaacacgacccacacgcaccaccccgcacccaagcaacgaaccagcggcgaccaccccgcacgcagcagcgacgaaacccgcacctgcacgaccccacaaaggtgacacacactgacacacgaccaccatcccgtgaaggcaacgcagtacgcatatgacctcgcatcccgcacccgcacaaacaacgaatgtcgacgacacaacttcaatgtgcgcttttggattttgtttttttttttcttttttttgc

SEQ ID NO: 33382 - DNA, 357 bp, Glycine max
  Clone ID: PAT_MRT3847_130147C.1
ggctcgagctacaatactgcttacacataggattttttagtgactacaacacaccgaccccagggcgggataaacttcatcttcgtctttctaacgccatgtatgggagccaccacgagcagccactgttcaagaattcgtaaagagaagaagactagtcggacgaaacaggttatgattggtcggataacatagtggaggtcggagccgaacgagtccgaagactacgagaattggaggagagtgccccgattcttgaggaagaagctatggctgctcaccgggcaggtctctccgatgaccatggcgttgcctgagcctggaaacttatagggggaccttctggatgcctccatt

SEQ ID NO: 33383 - DNA, 276 bp, Glycine max
  unsure (1)..(276): unsure at all n locations
  Clone ID: PAT_MRT3847_130148C.1
gatggatggtactacaccaatgtactccaaggccaggtatgatgaaattgtgatggaagtttcttcctatttgaagaaagtaggatacaaccctgacaagattccttttgttcctatatctggttttgagggagacaacatgattgagaggtccacaaaacatgagagtttcaanggtcctactctgctagatgcacttgaccagatctctgagcccaagatgccttctgacaagtccctcaggctaccccttcaggattgtaggaagattggagg

SEQ ID NO: 33384 - DNA, 116 bp, Glycine max
  Clone ID: PAT_MRT3847_130149C.1
ctcgagccgtactgttttacaaaaacagtagtaggctatctttatttgtgtaaattacacttccaatttgaatagacatctaaaatagtaagtgtaagttacaaaaataaagatag

SEQ ID NO: 33385 - DNA, 348 bp, Glycine max
  Clone ID: PAT_MRT3847_13014C.1
actcaacatttcttttaaaactacttgtgaattttcatacaaagggaacacccaaaaaaatccaaactaagtttttcaaataacttaaattaatttgaagcatagtataaaactcataccaaaccataacaaaaattaaacaaacaaaactctcctcttgacataatctaaaaatattgtgcctcaaacaattaaattgtattctattacaaaaccccacttcaaagaacttgggatttcttgctttgttgtaacttaatctccggctcctttttaacaagttcttttttttcaaataatattaactctatgtggcacggaaataacatataaggattgattcttcca

SEQ ID NO: 33386 - DNA, 457 bp, Glycine max
  Clone ID: PAT_MRT3847_130150C.1
caaaaaaatcgatttcttattccatccccaaataaatttttccccaaagctaacaggggctggacattatctatcggattatttaaagatgggaaaatgggttcctgaaaaaataacccggcattcctttaaatatcctttggctggggagggggaaaataaccaaaaggaggggggagtttttgattcccccgttcacttttttttcaggggacggggataacttgggggaaaaaaaaaggggttttattcctttcctcctgataaaaaaggggactcctttttttggaaaaaacaaaaaaaccaccatccccccttgtttttcgcaggccctttttaaaatttgtagaaaaaagccaggagcttgtcctttccccggggaggggaattttaaagggggggtggccaaaaatgacccccaattttttttctaccaaaccctgaagggggccagggg

SEQ ID NO: 33387 - DNA, 269 bp, Glycine max
  Clone ID: PAT_MRT3847_130151C.1
ttccaacattttctccatttgcctttattttttcatttttataattttccactgcggtcttttaatggagaagcgcttttatactattcccatttcttcttccactttgtccatcactgctgcgaacccttgtactcttcctagacccgtcatctcattttataagaaaactgccactaacctctaactcctcgccaacgacgtcgtcttctccccttccttctccacttccttaaactgctccacctttctctacctcatccatcact

SEQ ID NO: 33388 - DNA, 255 bp, Glycine max
  Clone ID: PAT_MRT3847_130152C.1
ttccaaaaaccaccgaagggtcctccccattggcaaaccctaactccaagggattgtcttaaaaacaggggcctctatcatatacggaactcactctacttcattcgctctcacgattcatgatcctcaacctaccttcttgatcctgatactctaccctacttagattaacccatccccacaaatcttatagattctggtgctccatagataataatccttcaagcagctcagacctacagattaatgcatgct

SEQ ID NO: 33389 - DNA, 550 bp, Glycine max
  Clone ID: PAT_MRT3847_130153C.1
acaaaccgtaacaatgccgttcaatgtttgcacagcgtactttagcgacctacaatcactccagagacttaattatgtacataccttcaacgcgggttctccataaaatgacaccttttttcccttatgataaaatcgtaatcctagattccgaacatgctttaaaattaaactcttgctcaaaaggagaaaagggggtaaacctccctccaaccccaagaaggattttcctttcagggcccatgaccctccccaaaggtggaagcctttgatttccatgcaagcccctacaagatggggagaaccgagggaaccatagcctagctcttaatatcacccatcaagactcttaattggtcttcaaggacctccactccatacccccctttgttaggcgatatcctttaaaccaacaaacacaaagggcaaaacctactgtaacaagacttttccacctattttaccataaccagctaaaccctggttatgcccacccctattaagcaatacgcctgattccaggtaccctgagcctacccgacatgactca

SEQ ID NO: 33390 - DNA, 1602 bp, Glycine max
  Clone ID: PAT_MRT3847_130154C.1
atgggttggtcgtttccattgagccctctagtgacaacaataacaatagtgctcctcttgtgtgtcacactccaaactaaggtagtgaaagcttttccactatacactcaaaatcggtggatagttgatgggaatgcgacaagggtgaagctagcatgtgtgaattgggtgtcccatttggaatacatggtggccgagggcttaggtgagagacctttggatgggatagccaaggaaatcaaatccatgggcttcaactgtgttagactcacatggcctatttacttgatcaccaatgactctcttgctactcttactgtcagacaatctttcaacaatcttggcttgcctcaagccatctctgctgtccaagtcaacaacccctctctcattgatcttcccctcatcaaagcttaccaggacgtggtgaaagggctgggagacaagggtttaatggtgattttggacaaccacgtatcaaagccgcagtggtgctgcagtaacgacgacggaaatggcttcttcggggaccagtatttcgatcctgacctctggattaagggccttaccaaaatggccacccttttcaaaggagtcactaatgtcgtagccatgagcttgagaaatgagctccgaggtcccagacaaaatgccaatgattggttcaagtacatgccaaaaggagcagaggccgtgcatggagcaaatccagatgttctagtcattatgtctggcctaaattatgacctagacctatcattcctcagaaagcagcaagtgaaactgagcttcagtagaaaactagtattcgagttgcactggtatagcttcagtgacggtgactcatggacaacagagaatccaaaccaagtgtgcgggaaagtgacagggagagtgatgagaagtgcagggtacttgttggagcaaggatacccattggttttgagtgagtttgggtgggacttgagaggcacaaaccagaacgacaacagctacttcaactgcttattgccccttgcagcccagcttgactttgattgggcctattggacactcgctgggagttattaccttagagaaggaactgttggattaatcgaggtttatggtattctcactcagaacaccaccctccctacaacaaccttcttgttgcaaaggatctcagctattcaacttccttatcgagggccagggttatcggaagttgaagcacacaaagtgatttttcacccattgacaggtctttgcatctcggggaagttagagccattgaagttgggaccctgttctaattctgagggatgggaatacacagcccagaaggtgctatcagtaaagggtagaaatagcacctgtttacaagcagagggagaagggaaggaagcaaaacttggaaatgaatgctcagtatgggaaatagtctctgattccaagttgcacctctcaagtaaaatcaacaacgcttctgatgtgtgtctggatgtggactccaacaacaacattgttaccaatgcatgcaaatgcctgagtggtgataagacgtgtgaccctgcaagccaatggttcaaacttgttgacagcaccagaaagtcaacctga

SEQ ID NO: 33391 - DNA, 613 bp, Glycine max
  Clone ID: PAT_MRT3847_130155C.1
gcatcgaaaagattcttgctttctttgtattcccgagatacagccgtttagaaatgtgtacacgatgggaaaacttgtgtagaaaacaaaacggaaatatacgtatacggacaacagcaatcaattatacaactaaagggcgtataacaatcaaggatgaggcagtcacagtcagaaggcatgtcttatgaattagcatttcgctgaccgcttgaagcttgatcaatatcccttccgttgatgctttcccaaagttgtatgatctatactcagcattcctcaactccaacaagcctcgctcaacatcaacagccttatgtgaactgggagactgcccactgcgatcattccaaaactgaagacgctcttctgcaatatcttcttccacccagtgaaataaagctgttctccagaaatattttagccatgcctctttgaaaagagcatattctgtttcctcttcacttactttaaacgcttgagaatattttacatcaccatgcgatttgaaatctaactcagactggcgaactgaatttagctcgactgtgctgggctaatgcgatcacaacaccttcctgaagctttaagttggcaagctccctcaaaccca

SEQ ID NO: 33392 - DNA, 481 bp, Glycine max
  Clone ID: PAT_MRT3847_130156C.1
ttgattacaccagcatgtttactaactctagggagcttgtgagcaattctcttgcggttgtttcgcagttttcttccttcttttcgatcttccaaggcgccggggggattcatcttccttgggagactaccagtgatgatgcactggcacctactgcttctggttctgcttctggtgccggtgctggtgctggtgctgggtctgtgttcggttctgatccctcttcttttggtcttggttatgcttctgctcctgctggtggtgttgctcttgctcctggtgttgctcctgctcccggtgctgcccctggcccagttccttctttgcctgctggttcaattcctgcatggacgggctcaagttctgtttgggccggcccatccgagttcttgggatcaaatgaaaagcccacacctaatgttaccgtggcccaagatggcagcggaaacttcaaaaccatctctgaagctttggctgccat

SEQ ID NO: 33393 - DNA, 703 bp, Glycine max
  unsure (1)..(703): unsure at all n locations
  Clone ID: PAT_MRT3847_130157C.1
ggtaatgataaaaaaaaattattatgactcacataaatacaaaactaaatattattattatttatcctcttttgcagaatcttccaaactgtataactagacatctaaatgtttgcgatcaccacatgacaatccttagaaaatttgaacctctgttacagtggaatgttattgttcttgatattggaattgaccaaacatatgttctacaaccttggtatcaattccttgaagatagtaatttttctcatgatgatgaaatctcattctactacaaacatcatgaacaaatttgggaaattattattagaagacaaaagaattggaataacaatgataatgataatgactaaattaagtttaggttatttcttttgtttactaacattatcttcgtcaatgaaatacaaacgatctaattattattaatattacacatatttgngtttatttttattctattttattgaataaattaaaatttgtatagaataaattacaagtgacccatacatatgcatcgttatcaacacggttatcaactagtatgatcataaagtaagttagctgtcatcgtaattatatctaccaaaatatttttcggtaccgaagtcaacaatgaaccacagcctgcaaaagataaaacccattgatatcatatagctgagattgaagtttatttcatatttatgaatgtactgcg

SEQ ID NO: 33394 - DNA, 468 bp, Glycine max
  Clone ID: PAT_MRT3847_130158C.1
tctcgagccgattcggctcgagacggctgcgagaagacgacagaaggggatgcccaagtcaatgtccacaggaacactttgagttgcccgtcccagtaaaacccgcatgatgaattgagtcatcattaaagcattatccaatatcttaaattcaatttaattattgaaaaaaaaattatcccagtgcagcactcttttgaaagctcatttatgtttatccaactactacttcctttagagttttctttcatcacaaaactcactcaataatttacaaggagattgctgcctcaagttaggaacacaatctgaataaaacaaccaaatgtgagtgtgtgtgtgtaaccttatatataatgcatgtgagatttttttaagaagttattaaaaaataaataacatgagctcattatgctttgagtgtttgaaatggaatcattaaaaaagatccctcaaatgacaagttga

SEQ ID NO: 33395 - DNA, 401 bp, Glycine max
  Clone ID: PAT_MRT3847_130159C.1
gacgtagtttccaataaggtgggtggggaaatacctttcatcgatgtacctgtggggcatctgagatttctgtaagcaagcttctctaaattataaaatatgctgcattaaactataagtagaataagtaatttatcttctttctcccaacaatcataaaagagatgaaactcatctaataaaaaccaatgcaccggcaagaatatcagcaagtgtggagtgaaggaggtattattttaatatttaccctcaagttgagtttgggtttagaaagaaccatgttagcagacacatacaaaaagtgttcccttttattgcctgagttaaaatgttgtaataggaaacccttttccattggttttttttatttttgttcccagcttcctaactggcaacatgct

SEQ ID NO: 33396 - DNA, 1467 bp, Glycine max
  Clone ID: PAT_MRT3847_13015C.1
tacggctgcgagaagacgacagaaggggatgtcttggacaaagcatcttgtgaatgtgacagagtgttggggttgaacacctgaacagaacttgaaccctgcctctgcgctcttgtggaatctgtgcagtgcttgaacgattgaaccctaatggctgctttcttgagaaggtttgcgagggccactccgatcctattcgctgcccaatccaattcctctcacaccaatctccgccttcccttcactgccatcgccgccatttccggcggagtctccttcctttactaccattcctctcccaacttcgctcattcacaagaagcagaacaagtggaaagtaaaaacatcgcactcgttccggataaatgggtcgagtttaagttgcaggacactgccagggttagtcacaatacccagctattcaggttttcatttgatcccactcagaaattgggtctggatattgcctcttgcatccttacaagggctccattgggacaagatgctgaaggaaaaccaaaatttgttatacgcccgtacactcctatttcagatccagaatcaaatggctattttgatttgctaatcaaggtatatcctgaagggaaaatgagccagcattttgcaagcttaaaaccgggtgatgttgttgaagtgaaagggcccattgaaaagctcagatatactcctaatatgaagaagcatattggcatgattgctggaggcacaggaattactcctatgcttcaggtaattgaagctatattgaggaatcctgatgacaaaactcagatatctttactttatgctaatgtctccccggatgacatactgcttaaacaaaagcttgacattcttgcaacaagccacccaaacttaaagatattctacactgtagataatccaacgaaaaattggagaggaggtgcaggttacatatcaaaggatgtggttgtgaaaggcttacccagtcctagtgatgatactctaatacttgtgtgtggacccccgggtatgatgaaagcaatatctggagaaaaggccaaggactggacacaaggagaggtttctggcatcctaaaagaggctggatacactgaacaaatggtatacaaattctgagaaatttagttttcttgcatctgaattccaagcacttgtccgctgcagaaatcgtgtactgaaatggttttctgataacaacagttaggtgcggttgaaaattccaacatgaaataaatcttgaattacagagcatagagaattattaatggtatcttgtattttcaaaattttgtggatatttaatcatgcggttgtctagcatggatgtcaataatgggcatctgtgggggtaaatttacttctcccaccctattttctaacattttcttaatgagaaaactatagcaccctgaaaggcttggagcatttttttaaaaaaaaaaaaaaaaaaaaaaaccaaaa

SEQ ID NO: 33397 - DNA, 484 bp, Glycine max
  Clone ID: PAT_MRT3847_130160C.1
aaggcatggcttgctgacaaggatgctgaagcactaaggtgccaaaagcaattggtggaggaggaagaagctgctcagaaaagacaagctgagattttggagaggaaacgccagaagaagcttagacaaaaagagcagaaagctagggaacaaagacaccaagctgaggcagaaattaaaggcgatattgacagtactgtaaaggctttatcaccggcagaagcatctttagatacatacaattttgaagctcataatccaagtacattttcagataacgcagcttcacctgtacctttccaatgtcctgacaccagtgaagaaataaatggggatattcattcagagtctgaaactatcactgatcaggatattgtgagacagtcagcacatggacataaacataagcgccaagcagttgccagacaacaggggctgccaaaattacaatgggctgtagccaatggtttgcatacaaagcaga

SEQ ID NO: 33398 - DNA, 510 bp, Glycine max
  Clone ID: PAT_MRT3847_130161C.1
gggaccccaaaacaaaaataaaaaggaccaaaaaaaaaaataattaggggggcaaaccccaaaaaaccttttaaaaggggaccaacaaaaacttttaaaaagccccaattaaacatttaggcaacaaaaaaacaaaaagggggggaacggcctttggacacggggcagtttttggcaccccccaaagccgggccgggggcccaaaaaaaaaaaaaccgatcccccagttttttaaggaaaaaccccggctaaaacccaaatgggggggggccccccccccccatgggccaatgggaaaaagagggccccattaaaaaaacccgttttggtttttttttgaaaaaaggaaaaaaaaaaaaaagttcttaaaaaaaataaaatgtgaaaaaaccagggaaaggctttgggggttttacctaaacacccccttggccaaaaccgggaaaaaaaggtttttggggggagggacaaaaaaaaaaaccccttaaaaagagggtcttttgggggggg

SEQ ID NO: 33399 - DNA, 1320 bp, Glycine max
  Clone ID: PAT_MRT3847_130162C.1
acggcgagaagacgacagaaggggctagtttttcgctactgcgactgcgcttcagcacaatgggtgcttacaagtatgtttcggagctatggcgcaagaagcagtctgatgttatgagattcttgcagcgggtgaggtgctgggagtaccgccagcaaccttctattgtccgtttgacaaggtctactcgcccagacaaggctcgccgcttgggtttcaaggctaagcaggtgaagaaatttttatttgtttgacatgatttttggggtttattcacctgataaatttatttccatttggttttgcgagagtaatatttaaactgttttctgtaaaaaaatcctggtggaaatttgttggaagtgtttacctataaataaatttcattcttagctggatggttttgccccaatcctccaacagccgaagcagtgggagttgcgtgtaattcattttttattttttctaattgtttgtgaaattgtgacattagtattcagggtaaacaaatcatttgaataatgcataattgagttaggtaaatttctgagactggaagataatagcgtgctggtcaagtggtggccagaagcatatgtattttctcatttggaaattgcatgtgtataaatgattggatgcttcctgagaccagctgcagtagaacaagctgcccatcattagactaagcaaatttccttattaaaaaaattatgtaacaattggtacagtttttcaccaaagcagcaagaattgtatgtagttcctatcctgtttaaattgtttgtgaaaatgtgacatgactgcttagctctattggaattatgaaaaaacaaaccttgtcagtaatgcatagttgagtttggtaaaataatatttataatttagtggaagacactagagtgctggttaagcggtttacagaggcatgtgtattttgtcttttggaaattgcatatgtacaaatgattggatgcttcctgagaccagccacagtagaatgagctgtacatcattagatcaagcaagttttctttttatcaaatttgctcctgtaacaggcagaaaccttgtaagtaatgcatggttgagttgcaccttgcttatgcctttgtccattactatcaactgggccagtcctggtagagtatttgcaccttgcttcatttgaatcttgattgtgattatgatcttgtaacattccagggttatgtgatttaccgtgttcgtgtacgaaggggtggccggaagagaccagttccaaaaggtattgtttatggtaagcccaccaacccaagtgttactcaactgaaatttcaa

SEQ ID NO: 33400 - DNA, 489 bp, Glycine max
  Clone ID: PAT_MRT3847_130163C.1
ttcttttcatctcttgttctctctcttcagtctctcacacacacccttcttcttcagctgagttgtttgtaatacagcaagatgaatccatggaacatgagaacttccaagtcactctctcaacaagtttcttatcctccttatctctttgtagaagagattccaaacatgggaaattccagtgttgtgaccaaggatgctagaggttcacagctgacaatcttctatggtggccaagttcttgtcttcgatgatattcaagctaaaaaagccaaggacatcttgtcttttgccggcaagggaatgtctcaaaaccagaacgattatgctaacactttccctgctacaacttcttctaatcacacacacccttcttcttcagatcatctgagttgtttgtaatacagcatgatgaatccatggaacatgagaacttccaagtcactctctcaacaagtttcttatcctccttatctctttgtagaaaag

SEQ ID NO: 33401 - DNA, 492 bp, Glycine max
  Clone ID: PAT_MRT3847_130164C.1
gttctctctcttcagtctctcacactcacccttcttcttcagctgagttgtttgtaatacagcaagatgaatccatggaacatgagaacttccaagttactctctcaacaagtttcttatcctccttatctctttgtagaagagattccaaacatcggaaattccaggtaccattctttaattttgttcttaaagtccatgactttatggctttttttgcttttaattaacatagaagatcaattccttctatgttgtgcagtgttgtgaccaaggatgctagaggttcacagctgacaatcttctatggtggccaagttcttgtcttcgatgatattcaagctaaaaaagccaaggacatcttgtcttttgccggcaagggaatgtctcaaaaccagaacgattatgctaacactttccctgctacaacttctgctaatcccactagaccatttccttttcttatgaatatcattccaaccagtgccaaca

SEQ ID NO: 33402 - DNA, 480 bp, Glycine max
  unsure (1)..(480): unsure at all n locations
  Clone ID: PAT_MRT3847_130165C.1
tttttcccttttttttttttttttttttttttttttttttttttttttttttttttttttggaaaaaaaaccggggaagttccccccccctataaaaaccccataagaggggaaaaaaagccccctaaaagggggccccaggggggccatttccataaagcggcgggcaaaaaaatttttttttttcaaaaaacagggcggggannccaaacaaaaggggggggggcaaaggaaaaaaaaactggggaaacaaacctaaccccagcagaaacaaagggccaaaagaaagaaaggaaaaagcaaagggggggggaaacccaaaaagaaaaaacccttccttccaagggcagcaaagcaattttatggggttagaccgggaccccgggccgtaaaaaaagggggccttcaaaggcaatttcgtgccacaaactctggtggcaagtttaaatcaaaaaaaccacctcctccaaaacccttttt

SEQ ID NO: 33403 - DNA, 545 bp, Glycine max
  unsure (1)..(545): unsure at all n locations
  Clone ID: PAT_MRT3847_130166C.1
gacgacgagaaggggaggttaaatatttaaattaataaaattagtcgtgtgttattcgagtttttgagttggggtttttttacagtggctaatgcgagtcaccgagcttagtcaatgagctagagtggggtataaagagatctatagagatatatagagatatttatctatagagatctttagagaaaaaaaaaagagaataaacaaataagacgtgtcattttatgtgtagtgggggggagttatgggacaaaaaataaatccggttgggttcagagcttggacaactcaaaggcatgagtctattgggtttgcgcaaccaacaaattattccgagagtatacaagaggagaaaaaaatacgagagtgtgtcaaaaattatatacaaaaaaatataagagtatcctctggggtggagggggttggacagataaagagtcaaaaaagaattgagcttattcaagtgataatatatatgggagttccaaggttttaatagaggggaaggctcaaaaaatcgaggaattacagacgagtatgcgnaa

SEQ ID NO: 33404 - DNA, 101 bp, Glycine max
  Clone ID: PAT_MRT3847_130167C.1
gtagttgtacgaagaatacaagtgcgttctaagcaggattttgtaaatgaggtgcatacgttgaggactagctagctgtaaaagacgacgcccgagttcat

SEQ ID NO: 33405 - DNA, 975 bp, Glycine max
  Clone ID: PAT_MRT3847_130168C.1
tacggctgcgagaagacgacagaagggtgtggcgttgagttaggcgttaaggctaaattctaagagttttcatttttccacatcttttattaagtgttttctgtcatgaaaaaggaaaaaaaatgcaatccgttttagtaatgtccatattaattgttttggatgctttggtttgcattccttgtcccgtgactgcattgatgtttgtgattattgtctgttttggtgcttggttatgtgaaatgacaaatatattgtttgaagtttttctcaatctacttcactgtattgcaggttggacaattgagagaagtgtccaacaagttcacaatgcacaccagattcactttgcagaactggaatgggttggaagtagtattatggtaacatttttatttaggaaattgaatactaatttgatgagttcatgcatcggctgaattcggcattgttatatttatatgggcttgtaaacgccctgaagatggcaaaaggcaactatgtataggagtaatgaaatcagaaattcaggcggtgtctgcagacttttaagttagtttgtggtatgtaattctttctgtcaatggagtaacattgctctcaacatcttgtatctgccaaccacagctccttgagctttttattacttccgtttttatatggaggttctacaagttgaggtcattgatcatcatcgctgaaatgtatcagtacataagatttttggattagtgagtgtatacagggtatagttggttgactttttccatttttcttgattgcttcctgattttgtccagttagaagtgttaatctaagtgagggctgcataatggtgtagcagagacagcttttttattgtaatgtaaaagatttaccagcctccatatatatctatttggtcagcataaagttttcaccctttccatatatgtatttgactcagcatagaatggacttcatcatgtggtcttg

SEQ ID NO: 33406 - DNA, 187 bp, Glycine max
  Clone ID: PAT_MRT3847_130169C.1
tttatggaatcacccaaatgggccttataccattcacttatgggcgcctacttctgagaggggcttgagtattgtcaacattgttgatttctcaaaaccacccgacatacttttctatactctggaaatagcggtcgccactcctgtaataattctgactcgttacacgctgtatttaccctctaaa

SEQ ID NO: 33407 - DNA, 506 bp, Glycine max
  Clone ID: PAT_MRT3847_13016C.1
tgcctgcgggtcgactctagaatgggaactagtcctacgcaatgtcttggatgactgagaatttgaaagaaagtgagatgcagagtaatcagatagcaaagaggatgagactgaccgcttggatatctttgcattagattgtttaggcaattctatgtcatttctgcttcgtttctttcctacatattccttttttttatgcctatcagtttcccttgctcccgggaatgattcatttctccatggtgcatggtgatgtcgtgaaccagacaacctcctcccatctctctggtgcctcagtgacaacggctccaaatttgactgcagctttgccaaggaatcagattcaaatttattcacatcttcacttttatgcttcttgtctattctattattctgccaaacatccaacctgttatatttcctctgtgaagtatgttcttttggacaatttcgaattttatgaccaggatcaccacatttaagacaaatttgctggaaatttt

SEQ ID NO: 33408 - DNA, 230 bp, Glycine max
  Clone ID: PAT_MRT3847_130170C.1
ggcaaaatcaggggtcgaatcttccaaggttgttctggggggcattcaaacctaatactattattcgtgaagtgtcctgtggacctgtccatgtggttgctttgtctgaggaaggcctactacaagcttggggctacaatgaatatggtcaacttggccgaggtgttacttgtgaaggactacagggggcttgtattataagttcttatgctaaattccttgatgaagcc

SEQ ID NO: 33409 - DNA, 243 bp, Glycine max
  Clone ID: PAT_MRT3847_130171C.1
atataaaacgttttttcttatcataaaacataaataccaacttggggaagggatcgcaaaaaaccctacaaaaccaagctcccaaagctacatattatactcttacaggtagaagctgaaacacattacaacgggttatcttaccaacattgtgtagcatgatcaggccaataaccatgcctaaccaactattgtgttcggcaagtatattttttcttatgaaaaaaaatgccgacccttaat

SEQ ID NO: 33410 - DNA, 1664 bp, Glycine max
  Clone ID: PAT_MRT3847_130172C.1
catacatctccatcagcgagacaagaaatttcatcaattaaggaggtccgatccccatcaaattcaacttccataaaggtgggaactccatcaaaatcaacttccaggaaggtggaagctccaccaaaatcaaccgccaataaaatggaagctccattaaaatcaacttccaataaagtgggaaatccatcaaaatcaacctccaaggtcaaagcttcatcaaaacgaactaccaatatggtgaaaacctcatcacagttatcttctctcaaaggtaaagaaatgaagttgtctgaaaaacatgtaaattctttaaattcaagcagtgtcagaaggaagcaaatatcttctatgaattcctcggaaggtgttggtggccaaagatatagtaagatcaagacagaaaaggaggtgacctcctccaattccaaagcagcttcaaaaaaactgatggcaccttcaaaggctttattaacccccagaccttcccttattagagttgcaagtataaattcaagaaagcataagagcctgaaaattgcttctcatcttaagaatcagcggactgcccgaaaggttgaacatgaggaacacaataacaacgtgttagaggaaaagactttgcacgtcatcaagatggaaagtgaaaacaaaactttgcaatctgatcaaaatgcaagctatgatgatgaatcatacctccctcagttgtcatcaccaaagtcttcagtatcctcaatttctaaatccttatcccaagaagaccaagaggaatctgaatatacaactagtgaatttgagcaggattctttttcaggaaaccatgaaattgaatgcatggaaaatgaggagactttgggagttgagaagaaaggcaagcccaaaaaggatggggttgtatattccagaggcaagggcaaccaaatgataaaattaaagttcaggaggggaaaagtggttgaaaatcaaactgagataagtagtccacgaaggcttaaatttcggagagcaagagtgctgggggagaaagccaatggtaaggtcaatgtccggaaaagctttgaaggaaatgaagcctgtgatgacagcaatggtgccacaactggtcctgagaaggttgttttgaggcatcaagacatgcaggacaaaaaagatgcacagggattattaaataatgtaattgaggaaacagcaagtaaactggtcgaagctcgcaagagcaaggttaaagcattggttggtgcctttgaaaccgtgatctctcttcatgagaaaaaaccttctgcagacacagtcagttgatggaatctggatagacattttctggctttttcatttgttttgtaaagaaatggtaggaaaataaaactgagctttggtagtagttgtgaagccaacaagctgaaggtacagcagaaagtaggatagatttgccttgagtttgtctttagaagctctgcatcatgcatgtagagttgaaaggagggttttgtgttgcgaacttaccttaacttgcaccatatactttttgtttcattctgctttggatattgtcaatgatttgtagcttctgatttttaataaaatatcaaacagtgatgccagtgactttgtacttttagcctggaaaggaaaagtgctttgaacttgtgaaactttctgtt

SEQ ID NO: 33411 - DNA, 729 bp, Glycine max
  unsure (1)..(729): unsure at all n locations
  Clone ID: PAT_MRT3847_130173C.1
ccttctgatagcctttttgcttcnnnacaaaagctgctggagataactggcattggcagaggacagtgagagtgctttattctcaacaacttgatatgtctgaacaatttagatcacttctagtgacataacctctcattagttttctttcatatcaagggtattactggttgcagtttgtaggctgcacttctctgccatagtaatgtatgttgtggtgacaattgaattgaagtgtgggtttcaggttctgcatttctagattttgaattgtaggcaataaaaatagaagtgggaattggggatatttttaaggtaacatgtacctttttcttttctttttcttgaaaatttcactagttaaaatcaactcaagtttaattggttttgaataatttaatataagtgagatgtttttcaagttaccatggaaagaattgatttcaggtgtaaaataaacaggctcatagtcatcnncttgcttgactgtcactgtgcaacatcaacatgcataagtaatttgaaactattttctttgtaaaaatggtattgctacgtggaatgttggacactgagtactcttccatgcatagagctatgcccgtgaggattgaggaatacttgtgggacaggacccattttgtcctagtttaatnnnagtcagttattaaattaaacttaagtgtnnnaaattaaatgnnnnnntatatatantnncttgtgttgctt

SEQ ID NO: 33412 - DNA, 518 bp, Glycine max
  Clone ID: PAT_MRT3847_130174C.1
gtcgactctagagggggtttacttataatcttcaattattcacagccagggcattgatgttgcccatgggggatactttatattacatgggggggcataaactttgatagtaaatacttgtagtttctcatgaggggaaatacttgtacttgagggcatgttacttagtttagaactcctttggtactcaggctgataaccaagggggagttgcctgtgcacgacaatgtgacctcgatacttgttgcctagttttcccaagtaagagtgtcgctggactcacttaggatatttcctgacgaatggtaccacgttacatttaagagtcaaggttaggtgcatgcatcatagtgaacatgattgattagaattgtgaaaaagttgatgaataattattaagtgtatgttggattgattgataattgtgtatgagcatgggacttattattggttctcttgctaatatgggtatttgaaattgttggtttctttttaataaactaccattgtaatttttg

SEQ ID NO: 33413 - DNA, 346 bp, Glycine max
  unsure (1)..(346): unsure at all n locations
  Clone ID: PAT_MRT3847_130175C.1
ggaccttgtcggtggaggaattgtagtgcacaaaactggagattggctcacactgatacaaaaatctccaattagtaacttgctgagagctgctagcttggacaaaggctgtttaatggttcacattgtgatgtgctgtgaatgccagcaatcaataagagtgactgggcctcattgngacaagtgttgttaacatacagcagcatgtacacaccattgtgatgcatgtaaatggacataatcggaaccacattcctgcgaattgatcttcccaatacaagtatgtggtcctaatactggatccgaaatgtggagatctgagtgggcaaatcaaacttcatggcat

SEQ ID NO: 33414 - DNA, 230 bp, Glycine max
  Clone ID: PAT_MRT3847_130176C.1
taagctaggatcctctatattggccggccaggggttggttttgggaataaaaggcagagggcaacgtataaacagtatcactccgagagggatgtgggacccctgtatgaaaagtattatatttagagtccaaattattacactggccaaagatttcaagcaaatactcacactttgcttttggaagagggggcacaagattaagacgtaccaaatcctactcgatggtg

SEQ ID NO: 33415 - DNA, 278 bp, Glycine max
  unsure (1)..(278): unsure at all n locations
  Clone ID: PAT_MRT3847_130177C.1
cnaccttctcttccctccatttncctttncctctttcaaaaaagcatatatctatataaacttgtgatattgggagttgaattanaacttgagaaatggacaaccagcgtagccttcttctaagctggggcttactaattccagggaaagtcatggaggagctgaggcagttcccgatatacncaacttctgggagctagaacaaacaanggatgcgtgcaagaagagntaaaaaagnggntgaacaactattcaccctaaaggcccccnaancaaac

SEQ ID NO: 33416 - DNA, 731 bp, Glycine max
  Clone ID: PAT_MRT3847_130178C.1
gccacccctcccggaaaaggacccacttggtttcttggacctaaatggttaaaggcagggggcccaaaatgattgtgaaggttcatcaaaagatgccagacattcagatagtagtgctgaacaatatttaaagtgccttaaaactcttgcagggccaagtctgcaaagaaaaatcaacttcattgaagccattaaacttgagattgaacgccttaagttaaatctttctgctgctgaaagggatagagccctgctatctgttggaatggatccagcaaccttaaatcctaatacactgctcgatgaagcttacacgggaagattatctaaagttgcaagcaatcttgccctgcttggagaagcttctcttgaagataaaattgttggtgctattggtcttgggactgttgatgataatccaatagatttctggaatattatcagaattggggaaacctgttctgggggtaagtgcgaggtgcgtgctgaaattagaaaggcagttcattcatctaacacaatgtcatctgctggtgcttcagaagctgtattcttgtgttctcaatgcgaaaggaaggcttgcagagtttgctgtgctgggaggggggcacttctgcttgtaggatataattcaagagaggtccaagttgactttcctgtaaatcgtttattagctcaggatggtataatttgtaaacggtgctgccaggatattgtgcttcatgcattga

SEQ ID NO: 33417 - DNA, 376 bp, Glycine max
  Clone ID: PAT_MRT3847_130179C.1
tgcaggcttccctcagactcagaattcggaatctagggtccaggttcttttaaggggcccgccacaagctatttttacacggtctggtgttaacactgtgaatcgtggaattcttcttacacaaaagcaattactattgtaattaaaccaaaccccttttctgatacatgcaactctgaattacccaagcagactctctttaattgcgacatcatctgcgtgactggaaggacttccgacccaactcacgatgtctaggttacaattgattgatttattatctctcacgaatatcgttccaagacctattgagaatctaatacacccaacccttttgtgttaaatacgttgatgggcaaatatactttgccccaca

SEQ ID NO: 33418 - DNA, 316 bp, Glycine max
  Clone ID: PAT_MRT3847_13017C.1
tgcctactttgttaggtattattgatcttttcccattttgctctatccaaatgagtgaagaatctatttttggtacttcccttgttaagcttgttggaagcagtatgatgaccctattctgatagcagagggatattatgagtccgtgactaaggaggtggaggtgactcttctctggtcgtggtgcaaactcccatccaaactagggatgctcatctcatctgaatattaaagataattataattcatatctaataaagtaatttatctagaatcataagtgaatattataattattacttacttttaaaatatg

SEQ ID NO: 33419 - DNA, 2061 bp, Glycine max
  Clone ID: PAT_MRT3847_130180C.1
caagcgtccgctgataacaaagttgaagaagaaaaggccttagtgctcagtgctagagaacttttttttgttttcttctttttttcttttttcatctcttacttccatgatttgttgtgggcttctcaacatcatacattgactctatcagtttcattcctgaatcaattagtttcttcactttcactttctaactgggaggatcaaagtgtgtgtctttgtcctcttggtgttgtttcttcttcttcttcaagtgtgcttcataaagcagtaggatttggaagcaacaaaagagttgcaaagtgggtagtgatcatggcagctgtaaagcctgaggagataagccacccaccaatggaccaacttcaaggcttagagtattgtatagattcaaacccatcttgggctgagacaatagctttgggtttccagcattacattttggccttgggaactgcagtgatgatcccttcatttctggtgcctgtgatgggtggaagtgatgatgataaagtgagggtggtacaaaccctcctttttgttgaaggaattaatacacttttgcagactctctttggaacgagattaccaacggtggtaggaggatcgtatgcgttcatggtccccgttatatctataattcgtgatccttcttttgcaacgatagaggacccacatttgagatttcttagcacaatgagagcagtccaaggagctctaatagtagcttcaagcatacaaataattttgggatttagtcaaatatgggctatttgttctagatttttcagcccacttggaatggttccagtaattgccttagttggttttggattatttgacagaggcttccttgtggtggggacttgcgttgaaattggaattcccatgctaatcctgtttatagccttctctcagtacttgaaaaattttcagataagacaagtacctatactagagagatttgctctactcatatcaacaacagtgatatgggcatatgcacatttgttaacagcaagtggagcatacaagcaccgaccggacttaacccaacatagttgcaggacagacagggcaaacctcatttcttctgctccatggataaagattccataccctcttgagtggggtgctcctacatttgatgctggccatgcttttggaatgatggctgctgtgttagtctcattagttgagtcaaccggggcatacaaagctgcatcacgtcttgcaagtgccacaccacctcctgctcacgtgctgagccgtggtatcggttggcagggaattggaatcttgctgaatggccttttcggaacactcactggttctactgtttctgtagagaatgtggggcttctaggaagcaatcgtattggtagtagaagggtcattcaagtttcagctggctttatgatattcttctcaatgttaggaaaatttggagctctatttgcatcaataccattccccatgtttgctgctgtgtattgtgttttgtttggtattgtggcttctgtggggctgtcatttttacagttcactaacatgaactcaatgaggaacctctttatttgtggcgtttccctcttcttaggtttgtccattcctgagtatttcagagaatacactatcagggcctttcatggccctgctcatactaatgctggatggttcaatgatttccttaataccatattcttttcttccccaacggttgcattgattgttgctgtgtttttggacaacactcttgactacaaggatagtgccaaagataggggaatgccatggtgggcaaagtttagaacatttaaaggagatagccgaaatgaagaattctacaccctccctttcaacctcaaccgcttcttccctccatcctaagtctgaagtggaaaaccatcatttccaaataagctagaaaaatgttctaaacttatttgttaatgtatgtatttgcaggaaaatgttcatttatttgtcgtatattttatatagttgaattgggttaatttcaatttttcatataatacaagataaacttatttgttcaat

SEQ ID NO: 33420 - DNA, 402 bp, Glycine max
  Clone ID: PAT_MRT3847_130181C.1
gggccgtcgacccacgcgtccggaggatggacatactggtgtctgagtgctccgcgcggctgctgcagcaggaagaagagattaaatctctgactgctgaaattgaccggttgaaaaactgtggctgtttaggagccttctccaaattggagcagttacaagaagaaaatttaaaattaaagtatcgactgaatattcttcgaaagagtcttcaggcagaaaggaacaaaccaactaaaaatatgattaacattattagccgcctacaagaggtctttggtcatgcaattaaggctgcatatccagatttggaaaatcctcctctgctagtgacaccaagtcagcaagccaagtttggggactatcagtgtaatagtgctatgggtatttctcagatgctca

SEQ ID NO: 33421 - DNA, 257 bp, Glycine max
  Clone ID: PAT_MRT3847_130182C.1
ctttgtttgttgtcatcagatgagagagacatcacacaaagagacaatcactgaatcactctcactcactctgcatgctgtgtgcgtgactctgtcattgtgtcttgtgttttatccactttgcagttgtttagtttctgaggagcgttttttttttttcttcctaatgagtttgtgtctgttcttagttgctgttatagtagttcaagtttcggttactactactactactaccacatgtccatgccccttcaatt

SEQ ID NO: 33422 - DNA, 220 bp, Glycine max
  Clone ID: PAT_MRT3847_130183C.1
ggctcgagctcaagcctatgactccggagcgctaattcctacactggttactcacttacttgatttctatctgtagccaacccccaacatccccaggcatccatcatccaaaacttcatacaccaatcattgggtaccctcttatgccaccacacttccacttacatagtccttaaaccctggatcttgtcaaagcactgaacgccgtaaccaaatgact

SEQ ID NO: 33423 - DNA, 313 bp, Glycine max
  Clone ID: PAT_MRT3847_130184C.1
ggcggttgtggggaccatggttgttgattgtaacaagcactccatcaaaggcgcgaaccaaatttaaatccctggataccacaggtataccggccatatttaattttaaaaagctttatcggaaaaaaccttccttaacatattcaaaaaaagctaaatccttaaccggttaatttaccccccaaacgtggggggacctttttgggggaaaaaaaaaaccttggttaaatttttacccacaaactttgggtttataacatgggtgtccaaattttcaacaggaatttacttttttccccgtttatgttaaaag

SEQ ID NO: 33424 - DNA, 492 bp, Glycine max
  Clone ID: PAT_MRT3847_130185C.1
cttttgagattagccaatcaaagtggtgccacaactaaccctctcagcctcatcttgcagaggcttctatgagagcttgctgcaaccctttttacgcaatcatccaaatagattgacccgtgtcaacaatagtcgggtagataataagatgctatattgaacttacattaatgtacatttagtacaagtagtagcagagttcaaccaaacacttcaaacttcaaacaatcatgagttcagctcccagtatgagagtcagcgagcaagagcactttcatcttgaggatactagtgacatagagaggtctatttgggtgctgaatcctcccaatccaccacctcttaggaacaagctatttagtccactgaagaaaactgtgtcctttttttcatccaagaagaaaacttgccttggacatgctgtttcattcttggagagtctattcccaatccttacatggttcacaaattacaaggcctgcaaatgcaaag

SEQ ID NO: 33425 - DNA, 421 bp, Glycine max
  Clone ID: PAT_MRT3847_130186C.1
ttgggctgattgatgtgcgtgtttatgtgcttgtgagaagatgatagaacgcggggatcaggcggaggagtcgagtgtggtggtcacgtatgttcaacataagtgaaaggaaaaggatcttgatttgtctgagattcatcgtaaggataacttggagattaccgagcgtaaaatccctgaagatcgagaaagtgtcctccatgcgtacgacgactcttatacgctcgctcgctaatcaaaatatcaccgtgccctacgacacactaaaccgcgaatacgtcacgcgccaacgccctcccaaagtacaacttacagttttccacgcccaactaaattaaaaccacgtttcagccccccccccccgcgaacgtcaaactaaaccaaggaaataaacactgaccgtgcgaaaacgcagactccc

SEQ ID NO: 33426 - DNA, 296 bp, Glycine max
  Clone ID: PAT_MRT3847_130187C.1
tcccattttcgctttttcgcaaaccagttcaaaagcccgaccataagtcaaatgccaatttaacatcaggtgttgattcgtagagcactcataaaactaacgcaatgaatagtacggaagccaccagctcgtgttcgccagaatacgagatgtggcttaagcgggcctctgaacagacccctgagcgggcctgccagtggtgctatggacaccatttactacacaagactgtgaattatcgaatgctgcttgcacaaaagcaacgactatgtcattgaatccaaacccggtgttct

SEQ ID NO: 33427 - DNA, 149 bp, Glycine max
  Clone ID: PAT_MRT3847_130188C.1
gcatagccagtgacacttggggttaggccaaatcatggtcaggctggtagagttagctaacgagcgcctgcatcaaacggatgtgaagaaccatatatagggcgtacaataataggtactgaaaatgctgggctatgatatacatatga

SEQ ID NO: 33428 - DNA, 1152 bp, Glycine max
  Clone ID: PAT_MRT3847_130189C.1
tttatttaatcacggtggctaactggttatttgttttctggaaccttgttggtattgccatgcaatattgaattatgttgttaaatatatgcgtacaatattgtttggaattttaatttcctcatctgggaataaatggtcgttctttcccgtgtaggcatgatcattaggtattttgcacatttaatcatgattcatgagctcctcgtaatgtttaaaattcctactcaatttactttttttgtgggattttgtgggatgaatcaatgccttacattagagcccaaccatcaacaagcattgaccaatcttggaaatatatacatggaatgtggacatgtagaggatgctgtgaagagctataaacaagcattgattcttcgtccagacttccctgaagcaacttgcaatctccttcatacataccaggttttgtccattctttattataatatttattattttcagtgattttggcagagtatcttttgatataatcctgttgcttatgtgttacatgaattcattatcttctatcccaatgcacccccaatatggttaagtggctattgctttgattggcttcagatagatgttgctggtcatgtcatgtggttggaatgaataataagtatagccttctgttgttaaagctgattggattatatcataaacttgggttttggatttgctttccagtaaaattgattgaagtcatggtttaaatgatgctctatatgttataatgcaacaatgttctctcattgttgtttactttttatctttagcattgccttcaatgccttgtgatgatgctctgcccattcccacaacctaaaaagaaattacagtgttaatttctgtctgttagcgtgtgaaatgtatttaaatgtcatttcctcattgtctggttatcacaatgctttgctctgctagttcatgatcaagtattggtagtacttttaaaattatttaggtatagtttgtaatttcatttggcatcaatgtgtacataatcttttgtcatgttgcagtgtgtatgctgttgggaggatcgtgataaaatgttcaaggaagttgaagcgataatcatgaggcagattaatatgtccgttattcctagtgtccagccattccatgcaatagcatatc

SEQ ID NO: 33429 - DNA, 575 bp, Glycine max
  Clone ID: PAT_MRT3847_13018C.1
ctgcaagaaaaaaatttgttaaaaggaagcctgtccataactatgggcagggagagattaaaatttgatttcttgatagggaaggtatatccaaagggtgccaacagtagtttatatgaatctagaaactggccaggacctaggggcaaattattaacatctttttatatatgtaactaaaactgcatttttttctccaggctcgggaagtacatgaattacctactaaacaagattttgttaagttggatggccagctagatcttttttttctcacaaaaggatcaaaatagccaccaaatatgatttgggtatgttaattaatgctttcacttttggttgatttttaatgggtatgttatttgcaggggactgaacaaactaaccctttgaacttgctaattgccaattaggatatccttatttgcttagcggataacaatagagtccatgaatataagcggacacattacaatttctttgccccccgtctgaagatattaatatcaagaaggaaaacgtccctatctttctagttctttgacctccccccaaccaagtaatagataatatca

SEQ ID NO: 33430 - DNA, 1249 bp, Glycine max
  Clone ID: PAT_MRT3847_130190C.1
tttttacaataatcaataatactagcatataaaatccacgtcacgaaaaaaaataattaatgacatctttatatgaacacaaatacagtagctttttgcattgcatttgcaatagttgaaaatatagtatgttattaatttgttcttatttaatttgcagttacatatacgcatttattattttgtttaacccaatctttgatgggatgtgatacaataagcaaataacagcctttatacgtagcgtttcatgaagtcttgaacggtagtgtactttatttgagggtacaatccacaagcttcaaccccttcttctcctatctcaaaatttgtgaggcagccttcaaagcaaacatgataataatgtcccattcccacttgctgctcatatggttgtccttccatggaactcagaaactgttgtgctgaaattgaagatttgtgcaactctttaccaatcagtttctcccaaatttgcacaacctctctctgggataatatgttttcaggtggccttatgtaaactgtcttgttccgtgttctggggtcatctatggttttgatagtgtacatagctatatcatcttcatccacatagatagcctttacgtttccatctccaaataagatcacagaatccataggggggattataaagccaggctgacacaacccaccaagaaagtaaccagcaaagcaattagcagaaatataggtgaatggtatgtgagcctcttgaatggctttcctcactaccattttgtcgtcaaatgttactcttccaggttccaatgcatgcgccattcttgccggatcagtaccaaactccgagggcaaaaatctcttgaatgacaatagaagctgaactttctcaatatcaacaccaatctctggcctgtgaagaacaaatgtttcatgtccttgagctaaacttgccttcaccaacctttttcctatgtagccagttcccccaacaataagcactctgctcttttccatctctaattctctctcgagccgaattgttgccctcggagtttggtactgatccggcaagaatggtgcatgcattggaacctgtgaagagtgacatttgacgacaaaatggttgtgaggaaagccatttaagaggctcacatgccattcacctatgtttctgctaatcgcttcgatggttacttccttggtgggtcgtgtcacactgcctttataattccgcctatggattctgagatcttatttggagatg

SEQ ID NO: 33431 - DNA, 188 bp, Glycine max
  Clone ID: PAT_MRT3847_130191C.1
gcatagacagtgagcattaccaaactcaccaaccaaagtgctaaatgacacgagttggcgcaaacatgacaaaggtaattagtaaactggcaatgatgacagctatctaactatccaatgccaggacactataacgaaatcaaatcacgacatagatagatggcattagaagagcactggtcaagatt

SEQ ID NO: 33432 - DNA, 414 bp, Glycine max
  Clone ID: PAT_MRT3847_130192C.1
tcaatagcattcttctcttttccaagcagtcatctacatattttcatgccagcaagttcaaatctttctctttcatcatcttcaccactgctctgcttgaatcatctccatctgtggccttcttttgggtagaaacagtgtttccaccttggtttccttttcccaacattttgtcctctcacccaatgcattcaatcacttttctggtctctgctgctactagaaaaattttctagtgatttttcccgcaaaactactgcaatcagaatcaatatcagttgatctatgagctggtgaagtaatgaagtttcagctccatctgacatcccatgtgcctatgcatgcaattacagtccagcacttttcctccacatgcctcccctgtgcatggaggcacatccagccattttctgg

SEQ ID NO: 33433 - DNA, 1952 bp, Glycine max
  Clone ID: PAT_MRT3847_130193C.1
cctcattcccgtactacacatagggctcgccgtactcattgttacattctataaatcaagttcgatacaaccccatcgcaaaatcagtgtgcaagcattccaatcgctcccaaaatcttttctaatttgttcataactcaataattctcatcatgggctccttgattgttccaggtgaacatgatcacaaactaaagcttgtttctcttccctttgtatcaaccagtcacctcattcccgtagtagacatagctaggctctttgccattcatggtgttgatgtcaccataatcaccaccacagccactgccgccattttccaaagctctatcgatcgcgaccgtgaccgcggccacgctattagaacccacgttgtcaagttcccatgtgaacaagttgggttgccagaaggagtagagagcttcaactccaacactcctcgggatttggtccacaaaatctaccagggactcaccattctccaagaccaataccaacaactcttccatgacttgcagcctgatttcttgttcaccgacatgttctacccctggactgtggatgctgctgctaagttgggaattccacggctcatttatgttggtggaggttaccttgctcactcttctcagaacacaattgaacaattcttacctcacaccaaggtagattcggatactgagagttttctgcttcctggattgccccatgaattgaagatgacgcgtttgcagttaccggattggcttagagcaccgacaggttatacttatttgatgaacatgatgaaagactcggagagaaagagctatggatcgctgttgaatactttttatgagcttgagggagattatgaggagcattacaagaaggccatgggaactaaaagttggagtgttggaccagtttccttttgggtgaaccaagatgctttggataaggccgatagagggcatgccaaagaagagcaaggggaaggagaagaagggtggcagacacggctggattccaagacagagaactctgttctctatttgagttttgggagcatgaacaagttccctactcctcaacttgttgaaatagctcatgcccttgaggattcagaccatgatttcatttgggtggttaggaaaaagggtgaaagtgaagacggggaaggcaatgactttctccaagagtttgataagagagtgaaagcaagcaacaaggggtatctaatatggggttgggcaccacaacttctcatactagagcatcatgccattggagctgtggtgacacactgtggatggaacacaataatcgaaagtgttaatgctggtttgccaatggctacttggcctctgtttgctgagcagttttacaatgagaagttgctggctgaggtgctgagaattggggtgccagtgggggcaaaggaatggaggaattggaatgagtttggagatgaggtggtaaaaagggaagagataggaaatgcaattggtgttttgatgggtggtgaagagtctatagaaatgaggagaagagcaaaagcacttagtgatgctgctaagaaagctattcaggttggagggtcttctcacaacaatttgaaagaactgatccaggagttgaagtcactcaaactgcagaaggccaaccacaaaagttaggccaacgcttggggataattgcaatcaattcaggacatagcactgtgattctaaataagtgacatgcctcattcaaaaatagtgtgaaatataatagtattgttacctagtaattgtactacttatgaaataaaagaattctaagtgtttgtatgtttttggttaaattagagtagtgtgatccaatgatttgaaagattttgcaactggacacttctttctgtaatcatgttattagtgtcaacataattaggtaaatctttgatttattgcttttcctaaaaacaacccaaa

SEQ ID NO: 33434 - DNA, 152 bp, Glycine max
  Clone ID: PAT_MRT3847_130194C.1
agactcgagatctgttcttggcaggagggatacagagagggggaacagtccggtggtggcacagcgtttgtcaactgatcataatgtagctgatgaggaggtgctcttgcacctatgatcaaactaaaatgtgtaagccagctcttgctact

SEQ ID NO: 33435 - DNA, 363 bp, Glycine max
  Clone ID: PAT_MRT3847_130195C.1
aaaaaaaataaaattattaggtatgcgctatggggagtttggaacacaaaattaaagagcacatttaaagagggaaccaacaacggaccggctaaggcgtaaaaatcggtgggcttaacaaaaatgtaaacaggggttttaacgggcgcgaccatttatatctaaatggtaaagggagttttgccaccggaacaaaaaaacccaattttgggaacaaaggtttgtatatatatgatggagatttcaaactatgcccgaaaaacaagtttcctgtaaacgaacatccttgggtcaaaaaaccattttttgggtgaaccaaagaaacgaccatccgtgatgaaccaaaccggaggatttattttt

SEQ ID NO: 33436 - DNA, 255 bp, Glycine max
  Clone ID: PAT_MRT3847_130196C.1
tctctgttcttggtctctcaaaggaaagaaatggtgcgaaaagaaacgccatcgaagagagtgtacgtgtcctggagccaccactacacagctaccaaaatccggctgatgcgctcagatccgggatattagaaaaagaagaagatgatgatgggacctgttcggacccgggggtagaatgactaccgggtctgggcttttttgtggcggatactaaacggaaccctactttgactggttagtggcagatcaacc

SEQ ID NO: 33437 - DNA, 1707 bp, Glycine max
  Clone ID: PAT_MRT3847_130197C.1
gcagcgtccggtttgagacctgaatctgctgctccgcggaaaatactgaaggctgaaatgaccaaatagttaatggcgtcaacatcttgcgtaggtaacacttccttatctatgaaagattcagcttcgagatattctgcatatcctcttcctctagcaaaatatgagaagcggatggacaatccccagctcttcatgtcaaccttggagaaacttcacgctgctatgggtaccaagttcatgattcccattgttggaggaagagaactagatttgcatcgcctctttgttgaagtgagttctcgaggagggattgcgaagataattagagagaggaaatggaaagacgtaacttcagtctttaattttccatcaacagctacaaatgcttcttttgtgttgcggaagtactatgtttcattgctctaccattatgaacaaatctacttctttaaagctcgtgaatgggatcctattgctcctgatgtttcgcagaaccaatcgaccctgccagttcctcctccaaaaatgcagtttcagcagcctttgtcagaaactcaaccagctgtctttcaactgtcaaatgttaatgctgctaaattgcctgaagcaatggcagcatcttcggcaggttctccagtcattggggtcattgatgggaaatttgaaagtgggtatctagttactgtcacaattggttcggaaaaactcaaaggtgtgctttatcaagctccacaaaaccctgtattgacagcatcccatcatagtgcctcagctaataacaacaatgcttctgcttcattgggtgtccatcgtcgacgacgcaggaagaaatcagaaataaaaaggagagatcctgctcatccaaaacctaacagaagtgggtacaatttcttctttgctgagcagcatgcaagactaaagctacttcaccatggaaaggacagagagattagtaggatgattggtgaactctggaacaagttaaaagaatcagaaaagacggtttatcaagagaaggccatgaaggataaagagaggtacagagtagaaatggaggattatcgggagaaactgaagatgggcccagttatcagtgatgctgtgccgcttcaacaacgacttcctgaaccagatactgacatgttggatgaagctgagggagattctcctcaaactccagaggagagcagctctggtggaagtgattatgaagattataataaaactgcagagagaggttttgatatggatgcattgcctgttataggaatgggcgcagaaacaagttatttgggttcagaagagaagttatctaagggggggttatgagcttctccaggagagagagagagagagagagagaggttagctggccctgatttttagcagagattttcttatggtaattttagatgcagtggagatttgaggtaggattcaggttgcagtgcttacaacacagtgcttaactgtgagttttgtcatttttaatgtttttattaaggtgttcatgttggcttcatgccatattgctgttgtacatctggcatgctgacatggatgatggatgatggatgatggatggtaacttgttaattaggcctttgggagcagtggacactggggagtctgctcttcctatgttattaggtccatcgagacctaagaataaaatgttgcctctttcaaaaatttattctttag

SEQ ID NO: 33438 - DNA, 779 bp, Glycine max
  unsure (1)..(779): unsure at all n locations
  Clone ID: PAT_MRT3847_130198C.1
ccacgcgtccgtttcaatttaaactatttatttatttttcatcagagaggataataattctgtgcctttccattccttgactatcacggaatttttttgatttccaaagagaaaaaaagagatgacaaaaataaataaaaacaaagaaacaccaaaatcgattctattcggttgccctaattattattattttccccttttcttctctgtgctgcttggttgggtttctttttgtggcttcgttgtggattcctagggtttgaaggtggaaagaggttcgatctcgatcgatggaggccgaggcagagaacaacgacgtgaagaaggaagaaaacagcaatgataacaacaacaacaacaacaatgaaagtaacagcaaaattgggaattcgagtgagggtctgagcaagcccaagcgtcagatgaagacgccgtttcagcttgaaacgctcgagaaagcttatgctgttgagaattacccgtcggagactatgagggtgngagttgtcggagaagttggggttgtcggatcggcagttgcagatgtggttctgtcaccggcggttgaaggacaagaaggagttgccgtcaaagaagccgcgaaagggcagcggcgttgccggattctccggtggaggagcccaagttggggcctgaagtgggtgttgaatatggatccgggtcaggtttcggngtccagcccgtttgcccggtcggagttgangaaatgtggtgcctccggggggtactatgagtcaccacangactatatggagctt

SEQ ID NO: 33439 - DNA, 166 bp, Glycine max
  Clone ID: PAT_MRT3847_130199C.1
agctgttatcgccttgcaggtacctgttccggatattacccgtctcgatcccactgcgtttcgtttttctcctcaacacttatttattgtcctctcttctttgggtcatacgtggggggggtttatatgctgggttactcttctattctgtattccatttatctca

SEQ ID NO: 33440 - DNA, 848 bp, Glycine max
  Clone ID: PAT_MRT3847_13019C.1
gggaagtggagatgtgaagctgttgagcttttgggtgagtccatttggtaaaagggttgagtgggctttgaaactgaagggaatagagtatgagtatattgaagaagatatcttcaacaagagcaatctccttctccagttgaacccggttcacaagaaggttccggttcttgttcatgcccacaaaccgattgcagagtcattcatcatccttgaatacattgatgaaacatggaagcagtatccattgttaccttgccatcctcatcaaagagctcttgctcgcttttgggctacttctgttgaacaaaagcttgggaaggctggatgggtagcaatgtctaccagcggggaagaacaggaaaaggctgtgaaggaagccatagaaatgatggagaaaatagaagaagagattaagggaaagaaattttttggaggagacaatattgggtaccttgacattgctcttggatggattgcttacttggttcctgtttgggaggaagttggatcaatgcagataattgacccattgaaatttccagccacctttgcatggataaccaattttctcagccaccctgtgatcaaggacagcttgcccccaagagataagatgcttgtttactaccacaatcgcaagaacaacttgccttccgtctttcgtaacttggtcaaggattagatttgttcctccatgtgtgtgtggactcaaatttagtaaagtttcccttttgtcacatatatgtctttaacaaattatgaatttatttcatttactctagtaacatgtacgtctttaactgaaaaaaaaaaaaaaaaaaaaaaaaaaaaaaaaaaaaaaaaaa

SEQ ID NO: 33441 - DNA, 285 bp, Glycine max
  Clone ID: PAT_MRT3847_130200C.1
atgcatggccaagaccttgacgattgtaacaccacggtcaacgaagcgccaacagtggcttcggtggttgtggtggacatggtggtgggtgtgacggcgggcgtcaacgccattgatgctgccgaaagtgcatatcaggggagcttggcagaactgtcaacacattcgcccaaccataacaagtcttccatatatcttccacctttgtacaccaaaagagagtgtgtcatacagattcttccacagaattgcagaatggacaggaaaaatcatagccttcaataa

SEQ ID NO: 33442 - DNA, 334 bp, Glycine max
  Clone ID: PAT_MRT3847_130201C.1
aattactgctattactagacgactcacatttagttttgattgttcgactgctatggctaggaacaggcttatcgatggtgaagctgaattggctcaaggtgttggagaagaagtgtctaattttcacttcgactcagagattattgctgctggaagtggcggcattcgcgccgctagattctcatccaatcttgtgagctaatgtgctgatttacgagctctcatttcatacaattaattctgactcaattcgacgagtcggctgtacgtgtgtcattcgtggatgtgctcccaaacagattctggtctatggagcatcttttggaggtgatct

SEQ ID NO: 33443 - DNA, 352 bp, Glycine max
  Clone ID: PAT_MRT3847_130202C.1
ggaccgccctttttttttttttttattggcttcccgggggccaatccctttatcctattctgccctgtaacaatggcatgcaggttccttgcgtaaatcatcattagaaaaataaaaataaatattacaaactagtacaactcactctcttcatgaaccagtacaacgcacaagtctaacttagtagcatctaattttaagaaaaatcgttcgtagaatgaagttgactaatcaaaataggctttgtttcaagttgaagtttccctcttgatgatcttgactgggaaaccaccttccatctgggaggtcaagaaggcaaagtagtgaggctccaccccttctgccctcgtgc

SEQ ID NO: 33444 - DNA, 1271 bp, Glycine max
  Clone ID: PAT_MRT3847_130203C.1
ccacgcgtccgcaactgctagtgttgttcccagcattggcagcccaacagtggtcttcttatgactaatgatgtcacgggtgtcaaccttgatgaagctgttccttgcattgcactctcaaagaacgactcatatgttatgtctgcatgtggcggaaagatttctttgtttaacatgatgacattcaaggtaatgacaacattcatgccaccaccccctgcctctacctttctggctttccaccctcaagataacaacatcatagccattgggatggaggattcaacaattcacatatataatgttagagtggatgaggtgaaatctaaattgaagggtcatcaaaagcgaattactggtttagccttttcaacctgtcttaacatcctggtttcatctggtgctgatgctcaactttgtgtatggagtattgatacatgggagaaaagaaaatcagttcctatacaactacccgcaggaaaggctcctgttggtgacactcgtgtgcagttccatttagaccaaatccggttactggtggcccatgagactcagttggcaatatatgatgcctctaagatggatcgcattaggcagtgggttccacaagatgttctggctgctcccatatcatatgcagcttattcctgcaacagtcagttaatatatgctacattttgcgatggcaacactggggtttttgatgctgacagcttgagactaagatgtcgtattgcactatccacatacttttcacctccagcagctttaagcgggaatcaatctgcgtatcctgttgccattgcggctcatccactggaacccaaccaatttgctgttggattgacagatgggtccgtgaaagtgatagagcctagtgaatcagaaggtaagtggggaaccagtccacctatggataatggaatattgaacggtagggcagcatcaacatctataacaagcaacctcacacccgaccaggcacaaagataagaacattcattgtaccataccagcatattctttccacctgtaatttgatcaccttagatttttagattttgattccccccaatttgtccctaaacaaggtcttgtcagggtcagctcggacataaaaatggcaaatgtaagctcttgtcttgtatacctgaatttgttctagtcaactcgattacattatttatactgcaatgtagtgtacaacaatgtgaatctgtccattctcgtgacttttgttgtatgaaatccgttagtgatagagcgattat

SEQ ID NO: 33445 - DNA, 283 bp, Glycine max
  Clone ID: PAT_MRT3847_130204C.1
ctgggttggtttttcacttttttcaattctcattcttcaccctttaccttttacttcttttttacttccctataaagtacggctgacgcggatccatcaccgattgcatccacctcaccaacaactactcctattttctgatggagacaaacagcaacccgcgcaatctataaagaaggagctacataacctacgaaacactaaaaatgaacactgccccttgctcccgaatggaagcataacaatacaattgccgccccaacacacaagccaacccctacaa

SEQ ID NO: 33446 - DNA, 502 bp, Glycine max
  Clone ID: PAT_MRT3847_130205C.1
ttgggggttaggccctttcaaacaaggggacaaaggtcttttgtttttgggagattgtattcaaaatcttgatcaagcctttgcattccaaagtagggtggcgaatatggatgggggacctgatattggaaggagaccgtgcttagaacatttatataggtatttatgcttgtggagggtttggggggggggttgaagcagcttgcatcatctcatcaacctttttattatctgtttctctccttgtccaagaagacttgaaatttattgttttaattttgcagctagacattttttgtattactaaggagcttgtagtttatacttgtgctaaggttatgttcggtctatttttttgtcccaaaagttactttaaaattaaaataaagtagaagtttgacaaatttagcttaagaattcattttaaaaaaaaaaaaaaaaaaaaaaaaaaaaaaaaaaaaaaaaaaaaaaaaagggagaacaaatatagaggaaccaaact

SEQ ID NO: 33447 - DNA, 451 bp, Glycine max
  Clone ID: PAT_MRT3847_130206C.1
gggacatgatagtgaaaaggagagatttgttatggaaatggaagctattatccaggagcaagcatctttggagaaccagttagcatcattgggaacactgatcagtaatcttgcctctgaagtagaagaacaaagatccactgttgctgctgcacgggataatcttgatcaagttcagtcacagctgaaatcagttcgcctaaaaatgaaggaatgtgataaggaaatcagtgctattattaaagaccagcaaaagcttggacattaaattagtgagagagatcttgaaagggagaagatgggaaatgaggtgaaacggatggagttggaacagaaagattgctctgtgagagtagataaattaatagagaagcatgcatggattgcttctgaaaaacagttgtttggtagaagtggaactgattatgatttttttttccgtgatcctact

SEQ ID NO: 33448 - DNA, 256 bp, Glycine max
  Clone ID: PAT_MRT3847_130207C.1
aaaaatgaaaataacgccaataacctaatgcctaaagcaacggtcatatcaaaaaggaaaaataggttggatcccaaccaacaaaaatcatgcgaataaaatccaattaaaaaaacctaaagggaaataaggttttaaaacaagggtctggaagaaaacaaccacatttaagccacttcctcaaatttggggccagcaccccttcccccaaaaggaggagcagcatactcaatctctggtggaccagcaccaccca

SEQ ID NO: 33449 - DNA, 314 bp, Glycine max
  unsure (1)..(314): unsure at all n locations
  Clone ID: PAT_MRT3847_130208C.1
aagatagttatgattcataatttntttcactaaatataattacataatttaaattcaaaatttcgaaataagctgaaataatctcaggtgaattcatggaattcatccatgtggatagangataactcnttattaattataacttataagtatattaanatgtaaactgaatatatatatagttatgatggccagaggccntcagtnatcttaactataggagatacatttaannaaatgactgcnaggagtgagtncaatggagtgtannataatgtataaatgaggncnagctatnggnnnttgtgnngncc

SEQ ID NO: 33450 - DNA, 1306 bp, Glycine max
  Clone ID: PAT_MRT3847_130209C.1
tggtcaagagaaatgttatttacaagactatacacatgcattggataatctaaaatctttacattctgagttgagccatgtcataccaaatttgctcaaatgctttgacaataagatcatggtattcccttgaattcagtgagagatagcaggcaagcaagttctccaaatctttcgatgcgtggatattgttctccacaatcatctccaccattgactccctgaagtctctttgtggatcaagtgaggacttaacaactgcaaatccctctggaaagcctgaattcattgaggccttgcatgctctggatgacacactcctccttgcataggcttgaactttcttgcttgcgagttttggagaattgactctaagttttatacctggagaattagcagaggaaactctagctactggacttgtttttctttctctcttagttctactacattcctctttgctaactatgacagatagagactgatgagacttcagctcatcaaatttagctgatcttctcaactcagtggtttcaatgaccttatcatcaaacttcactggctttgttaatattggagcaaggcccaattgtgaaattgtgtcaaagccatcaaggttttcagaatttccattgaagggttcatttttcatgtcaatgatgatgtcattggtggaagagctaactctacaactgcattcagaggctaccccattaagcaggtcaggaatagtgaacttatcacactcagactcagatgaaacatattcatcattgaggtttgattcagaagaagaaatctctatggaggagagcataatagtctggagactgaagttgatttggcttaatccaattgtttgtggaatgacaaccaaaactttcgatgacgggtgaagacacaactgttggagaaggcttataaatggtttttctcccagcccttctcttggatgaccttcttggtgaatcagtgaatgtgttatctgagtgtttggtgtaaaaaataggagagttgtataacttaccagctatgtttggttcaatggagaaataatgagagtatcttggctgtgacctttgtgatgttgttggtgaggctactttgttcttcataacatgagggccatttctcttccttgatttgctcatatctttgagcttatagaaccatgcatttggcatcatatctgacaatctgaacctgttattacccatcaaggatatgcctcaagcacagccttctctcctttctcagtgtttatttattgtgatgcctcagaattgttcaaatttcacggctcgag

SEQ ID NO: 33451 - DNA, 472 bp, Glycine max
  Clone ID: PAT_MRT3847_13020C.1
ccaagctcggcattcggctcgaggcagacagcacaaccgcacagagcggatttctggctgttcaaacgaccatcggcctcaacgtaacttagggccccctggccagaagccaaaacggcccaagaaaccaaactatacacaacagcatcagtgacccaggggcgcccaggcagagcctgagaccagaggaacgaggctgtgctgcatgcaagcgcggagcaggaccctgacgccctggaggcccgagaagcctgcaccaagaccaacatggaggaggttacacggagagaacacaaccaaagcgcacaggggcactgagaaggaagagcgtgacgcacgcaagaacaaaggttgcgacacgcatgacgagagacgagaggctgacaacaggaaggccctgctgcacatagaccagcaaaagactgagcttgcacagggagtgcacaggcaccacccaaaaaggcctagagga

SEQ ID NO: 33452 - DNA, 697 bp, Glycine max
  Clone ID: PAT_MRT3847_130210C.1
ggttcaaatgctccctcaccatttcaaaacaagaagtaaaaacagactacttgaggttaatatcatacacattaacttgcctgaaagttgaaacaaaaaaaaagttcactagaacatagtgcaatcatgtagaagcgaaatataaggaataaatcctttgtttacaagaattcttctcaactgtgtcatcccaatttagaacaaaatcttcctacacttcctctactattcaaatactctgagctctatggttgaatcacaaataggggagtgtcaacgcttacagacttggcatcttccgcaacgatttcaactatagttcctgactgatcagccgcccaattatccaagccagcaagaacagatcagaagccactaaagcaaaaacaccaggaattccgttgttggagtggccacaagcagaagtacttccaccttcagcaattgggaagatagtgacaccatggcatccaatgaaaaaggaaaaatccatatctgtcctattgtgaagtctgaaaccattgaagcagaagtgaaaggtaaactgatatggattgattctgaataacagacagactagaggaaggttatctaattgagattcgacttgtgaatcagaagacctacattccgaaacgtgaattgaatcttattatgaatcataagttcataacatacatgatcaataaaataaaat

SEQ ID NO: 33453 - DNA, 350 bp, Glycine max
  Clone ID: PAT_MRT3847_130211C.1
tggggttttttatattttttttttttttttttctttttttttttttttttttttttttacacccccaccaataagatttttttttaattgagtggattgaaaaacactcatgatctttggtttaggaaaaaaattttttaaacacccaaattattaaccattatttaatgaacagatatatccaccctttatttatccccattgatgagcatgttaacaatggaaagggctatagcggaaagctgaaagggatcctgggttcttttcgataggggggaaaaggcatcatttttttggtggaatccattttcacatggggtaaaggcattaatttttgggcttagcttgac

SEQ ID NO: 33454 - DNA, 419 bp, Glycine max
  Clone ID: PAT_MRT3847_130212C.1
cattaaccttagcaacgtcacataaagtgtaaagattaatagcacattcttctttcttcttacaaaagtaaagtgggaaaacctaaccatgggaagcagggtctgttacctccaactgaatgcctgcctgagggagcctgttggccttgggcacataccccttagcgcaaaacaggggcgccgccgagtgggcgcggctgggcaggggcggtggccgggggaaggggtgcgggtgcccatggggaagatgatgcgggagccgcgaggtggggaggggcacggggctgtgggcccggggggcggggggggggggctggggagaaagccgtggcgggtgggggggggggggacgggggggggggcgggggggggggggtggggtggggggcgtggggctgaggcgaaaaaggggggggggg

SEQ ID NO: 33455 - DNA, 586 bp, Glycine max
  Clone ID: PAT_MRT3847_130213C.1
ccgggccgaccacgcgtcaagagccgtacaagtgatgatgtactgcaaccgagtccattccatttccatgtccatgtcctctctgactcgaagagagggttagaacccccatcttcttcccctcaacgatgccagtgccttccaaacccataaacaccttcaccatcacaatcatgctcaccttcaccttcttcctcctcttcttctccggtttcctccacttcccctccgcttcctcctcctctttccctcccatcacccgccccacaaccacgccgcccacggcggaacccttctccgatctggtcgcggccttcaggaaatgggattcccaagtgggctgcgctcgcttcaaacaaaaaccaaatggggtgccccttaaccactcaaaggtcgcgtctttgcaggaagttagcgattgtgggggcttgaaactcaaccatgttagcgttttggtcaaagggtggacttggattcccgataacttggataacttgtactcttgctcttgtggcttgagctgcttgtggaccaaatcgcccgttctcgctgacaagcctgatgctttgttgtttgaatcttccac

SEQ ID NO: 33456 - DNA, 380 bp, Glycine max
  Clone ID: PAT_MRT3847_130214C.1
ggcggcgcggcagagcaaatacattgcaggttatctttcatctcagaacgtctgatttgagcctctctcagtgacaacagtttctgagtcttactgatcttttcttctctctaatctcttgtgatttttcttctctctaatctcttggttgcgtggcagactaaatgattttgtgtttttggttctcttttaggtgcgattctgattctcttctcttaaatcattggctttgattgtattcattggtgccatggcgtttcccagtttgattacaacaatcattaagtcgtgtttggttctttgattttctttttctttttcatgtattggtacgattagtcttcagttttttcatatcctacttgcagccagttctggtt

SEQ ID NO: 33457 - DNA, 496 bp, Glycine max
  Clone ID: PAT_MRT3847_130215C.1
ggcggccgccctttgtttttttttttttttttttttttttttttttttttttttttttttttttttttttttttttttttttttttttttcttttgttttttttttttcttttttgggagaaaaccaaactggggaaaggggccccaaaaaagggccccgacgccaatttgaaaaaacgcgcaggaaattcacccggctataaaagaaacggggcccgccggccacaccccgaaaaaaaaaaaacaaaaaccctggggctttggacaaaacgggggaaaccgaccccggggggaaacccttgggggcgcaccgacaaaccccgcccaagggggaaaaaagtgcccccaattttaggggaaaaaccgggatacgcggcgggcccccagaaaaaaccccgttgttccccatccaaaaaggggggaacccctgttcgggaggcccccccccccgaaaaaggggcccggccaggggccccggggggaaaaaaaaccccgg

SEQ ID NO: 33458 - DNA, 1198 bp, Glycine max
  Clone ID: PAT_MRT3847_130216C.1
ccgtcgcatggccacggccctaccgcaggctctggaagccttctaagaggcggcgcgcccaccccccccccccgccccccccccccccacggcaagaaaataccaagcccatttaaacaattttctttccaagacaactcttacaaatgagaatttctgacacgccacatgctgtcaatatgctgaggcaaacctgaatatgtaaacagtcttcactaaaagaacaaaaaatataattggaagtaaaattaatacacaggatttggtgcaactctatttagaatagatattctctttacaaggttaaacagctgtaaacactatgctttcatttctcaggtatgtccctcacctcttaaattgttactatgttatagtcttccttagtactgcctgaagttttaaagtttccatttcttgcctaccgaaactccagttagtctaaaacttctaaaagagtaaatgacaaaagaatgctaccttgttaagtatacttgtaagactatagaaaaggggcggcccaatactcatgcacccctattgtggggtgtgaagatgctcagatgtacataaatcttaattccatgagcagagactttttccgcaactagatcatctgaccaccaggtcacaatgcaataatcttacttgctaagtttaccctctgtatccttgtaagactatggtggcaataatgttaataaatggcatctagcttcaataggctgttcgaactacatgctactatatcactatgttgatacttcgaaatttcttctgtagaaaagaacataggcagctgaagactttatcttctccttgctgatgggattaacatggctatcatcgaagtcataccactgatcaccgcctcgatggacaaatgcggtataatgaccacctcccatgcttccataatggttactgacagcataaagtgtgtaatggtaagactcatcattcccataggtaatataagctgacaaatcgagattatctacagggaagtcaacatatgtctccagcttgtttttcaagtaacgactgtattgaaacctcttaagatgaatgaccaaaatttcaggaagtctccaaagatctaacttcttactagcttgacgatgttctttacagccaggacagtaccacatgtcttctggtccaagaggttcttcttgcaaaaatgcttcctcgagcc

SEQ ID NO: 33459 - DNA, 190 bp, Glycine max
  Clone ID: PAT_MRT3847_130217C.1
ggacatactttgttccacgctcctgctactgactgggccgccctgggtgttatcctaggtcaccttgagggactctggttgtgcgctggggaaacccacacagaccctcacactgacctttaccttctctggaatctcactcagcgctggtggaatgtctgtgacctgtatccgtcagccctcggggaag

SEQ ID NO: 33460 - DNA, 676 bp, Glycine max
  Clone ID: PAT_MRT3847_130218C.1
ctttgattatttctaatgggaaacacactcttctacatattcatctccaacatgattgaaaatcagattccaaatatagcctcacatgaaagcaaagcatgaaacataatcaacatttactttgatgaatccttggatcatgaaacctcaacatttcctccacatcctcccatgaagcctccgacgaccgacccgaacttgtagggcatcgtgacgatgtatttggcttccggcagcgcggaggggaaccaacgacggcagcagtgctgttgctggggaagagaatgatgttcgcagacgccgcagtgttctgggtgctggttgctatagaccccaatactttttttctcgaatgccattgttcctagtttcattgaacataagtgaggattttgttgtgtgataacgattccaagagtttttaaggggtttttgttcttcttttgacatcctcaattcaaaccttttcctttctttatttgttattaaatattttttctgattaagggtaacataataacaattgaaaagatgatgaattttggtttaaaaaaaaaaaaatatattacaattttaattgttggctttattttccaatttggtttttgtaattgttacttatttgacaatttctagaattaaaacaccacttgtagtgttcaaaaaaaaaaaaaaa

SEQ ID NO: 33461 - DNA, 588 bp, Glycine max
  unsure (1)..(588): unsure at all n locations
  Clone ID: PAT_MRT3847_130219C.1
gctcgatgggcgaccaaccgccgatggagccggcgacaatacctgccatggcggcaccagcgaaagcgacgttcgagcctgagcgcgagcgattacggcggcgacgagattcgggcgttggaggcgctggcgagtgagagacctgcgaagcggcgtcgtccatgtgtggtgttcctggagcctcagaagatgcgcggctgcggctaggagagcgggaaccgaggaggagctccttggggtgagcgacggcgaacttgagactgcgcagacggccgcccttgtatttcctaagccaggcgagttcctccttgatgtccatgaggccttggttgaattgccatgggttctcctcgtcggtgacgatgaggtcgtccttttgtttcctgttggcgtagcgcttgatgattgcagggcagcatttggcggcgaattcgtcagggaccaggcggatgataataccgatgggaatggagatggcgccgagtactatcgcgnacacccattggtatccaagctgatggtggacgtggaatgcctggccaccgacaaagatnatcagggtctgactcgcaccatgatgaggaagat

SEQ ID NO: 33462 - DNA, 231 bp, Glycine max
  Clone ID: PAT_MRT3847_13021C.1
tagcaaatggttaatcgaaacaaccttttgcgcttaaaactcatcgtataattctgttactgagtgatgtatacttagatacgacatctgattgcacttcttggtttaacagaccattatgcacaaatgatgtatgaaggaaaaagctctttttgagtgctccagttctcttaggattattttttcatcaaaattagtatcaagttgtcagaattcgtgtattcacccacc

SEQ ID NO: 33463 - DNA, 410 bp, Glycine max
  unsure (1)..(410): unsure at all n locations
  Clone ID: PAT_MRT3847_130220C.1
gattgatgcagcatcatgaacaaattgcagagtacttcagaatacatggtgtttcgctcatatttcttttcagaaggaatcttttgcaccagatggtttctgtacttgcaaatgaatatgataggaatgctaacatattgaatggaactcacaaatctcatgtgcattcaccccagaaggcagaaatacttacaaaatacaagccaacaatcaattcaacattgttaattgcacaacttaaacaagtaaataaaaccaccaccaaagctttaaaatatttcaagagcactcaacacattctcctatactacgaagacgtcgtcaagaatcgcaccagattaanaaacgttcanaatgttctgaaaaggcctcagatgaatttgaaaaatcgtggattgaagatacaacaa

SEQ ID NO: 33464 - DNA, 428 bp, Glycine max
  Clone ID: PAT_MRT3847_130221C.1
cgcgcgtgcacgtgtttaaattcaggtcggagagatacgctggagttcgtgagggatggtttgaagtcgatgcgcgtgaacccggggctgtcggtgttcgcggcggatccgcaggtcacgtgggggttaatggctgagttggcgaattctggaaccggtgatcccagggagagctgcggggagacggacataatgctgatggccacggaggtgcatgagatgctggacgcatgagagcatgaaaggattctggcgtagtgcacgaaggtgctgagagacgtacggttcaagttaagggacgaatgggcttcatgttatcacaggttctgataaagaatgtatgcttgtgttgttgcttattatgcacttggcactattggatgtgatcctttggaaactactgagattattgaacttggtggtgctta

SEQ ID NO: 33465 - DNA, 1496 bp, Glycine max
  Clone ID: PAT_MRT3847_130222C.1
cccacgcgtccgcccacgcgtccggtttcacgtgcatcattttgttgatggcatcaaatgcacacgcaagaaccatttaatttaagctgcgagaagacgacagtaggggaccgaatcacagttgtatgtagtctaaaaagttggcggaatataactctgttgtgtgcagtggtctctcacaagggaataatagtctcacatacattcacaaaaacctgagctttattgcgttgttgttgctgtagatggaaaagggtagaaccgtggtggtgtccgctctgcagtttgcttgcaccgatgatgtctcaacaaatgtcgccaccgccgagaggctagttagagctgcacataaacagggtgcgaacatcattcttattcaggaactctttgaaggttattacttctgtcaggcacagagagaggagttcattcaaagagctaagccacataaggaccatcccacaatcctcagaatgcagaaacttgcaaaagagttaggtgtagttataccagttagcttcttcgaggaggcaaacaatgcacattataattcaacagccataattgatgctgatggaactgatcttgggatttatagaaagtctcatattccggatggaccaggttacgaggaaaagttctattttaatccaggtgacactggatttaaggttttccagactaaatttgcaaaaattggagttgctatttgctgggatcagtggtttcctgaggcagcccgagcaatggtgcttcaaggtgctgagattctattttatcctactgctattgggtctgaacctcatgatggaagcattgactctcgtgaccactggaaacgagtaatgcaaggacatgctggggctaatttggtaccacttgtggcttcaaataggataggaaaggagattattgagactgagcatggaaaaagtgagataacattttatggaaactccttcatagcaggacctactggagaaattgtttcaattgctgatgataaagaggaagctgttcttattgctcaatttgatttggacaatatcaaatccatgaggcattgctggggtgtattccgtgataggcgtcctgatctatataaggtgcttttaacattagatggcaacaatcccgtccaatgatagataaacatcttaccttgtaactgttatagaattatacctggaatggtttaagcctttacaaacttccagagcgtttatcactcaccaagaaggcaagaacaaggtacaacgcaagaatatcatctgcttattccatgcaatttaataaatatgtggaattaatgatcaatcagctaagtaacttgatgttttgtagtgctcttattcataaacaattcatctgaatcatttgacaccatgtatgaacattgtatttcattttatgctatttcgacaccgaagttttctgtagtgttctaaatttgctgtttgcttcgggaagtgatttgttctgtgtttatatagatc

SEQ ID NO: 33466 - DNA, 362 bp, Glycine max
  Clone ID: PAT_MRT3847_130223C.1
aaggacgggacgagccgagggggctcaagcagcacgccatagtgcttttgatggaggctccgaatcctcacgagagagggggaagctctagcttgaagcaggggatgacgctgagtgacatgatgccaggggcaacaagccgggtaaaatgagaggaccggcctcagataatttaggcaaatagcgaaggaaggctacgaagatgttcctaaggagaggcggggaaagagatgaactcatgagccaggagaaggagctacagatgatatccgaaccagagaaaaaaaaaggaagtgaaaataagaaagaataccccgtcgaaaaatcgatgcctgacaaaaacaacaggggatattgaacag

SEQ ID NO: 33467 - DNA, 1480 bp, Glycine max
  Clone ID: PAT_MRT3847_130224C.1
ctgaaaactattgggtaaaatgaaatataatgttatacatggggtcaaatgattcaaatgatttatctatgcttaaagaggattacaaaacatagatgaaattagcagataatacatttgtgttatcccttattcttgacttcttggtgagtaaataattgctctggaagtttgtaaaggcttaaaccattccaggtaacattctataacaattacaaggtaaaatgtttatctatcactggacgggattgatgccatctaatgttaaaagcaccttatatagatctggacgcctatcacggaataccccccaacaatgtctcatggatttgatcttgtccaaatcaaattgtgcaataagaacagcttcgtctttatcgtcagcagttgaaatgatttctccagtaggtcctgctatgaaggagtttccatagaatgttatctcactttttccatgctcagtctcaattatctcctttcctatcctatttgatgccacaagaggtaccaaattagccccagcatgtccttgcattactcgtttccagtggtcacgagagtcaatgcttccatcttgaggttcagacccaatagcagtgggataaaataaaatctcagcaccttgaagcaccattgctcgggctgcctcaggaaaccactggtcccagcaaatagcaactccaatttttgctaatttagtctggaaaacctgttcagcaaacgcctcaatgttatatgatgttcactagtcataagaaataactataaaaccaaggtcattcgaagcagtgaatatcaaattatcaaataagcctaccttaagcacctaccttgaatccagtgtcacctggattaaaatagaacttttcctcataacctggtccatctggaatatgggactttctataaatcccaagatcagttccatcagcatcaattatggctattgagttataatgtgcattgtttgcctcctcaaagaagctaactggaatgactacacctaactcttttgcaagtttctgcatcctgaggattgtgggatggtccttatgtggcttagctctttgaatgaaatcctctctttgtgcctgacagaagtaataaccttcaaagagttcctgaatgagaatgatgttcgcaccctgtttatgtgcagctctaactagcctctcggcggtggcgacgtttgttgagatatcatcggtgcaagcaaactgcagagcggacacccaccacggtttacccttctccatctgtagcagcaacaacactcgtgtccatcaccaacaaattaattttaaatccttttataccatcttttcattaattcggcctaaatcaccttttttcttcttctcccaaatggtttaatatcttgtcacatgagtcacttgaactaaaaagatattgaagtagttttttgaaatttctatttattttatctgaatttttaaacttaatcacggcggacgcgtgg

SEQ ID NO: 33468 - DNA, 198 bp, Glycine max
  Clone ID: PAT_MRT3847_130225C.1
tacgccaaagctgagctatagtggaacctaaattcaatacactgaccgttgtttcacacgtgaaagacgtgggaaaaccatgacgtcacacaacataatagcctggaacaaaatgcgcaaatcgtgagctggcgaaagagcgaacaggcccacaccaatcgccctgcccaaaatgtgcgcattctaaatggcaaacgg

SEQ ID NO: 33469 - DNA, 528 bp, Glycine max
  unsure (1)..(528): unsure at all n locations
  Clone ID: PAT_MRT3847_130226C.1
cggactcggnattcccggtgtcgcacccacccgtccgttgttacgctattttactttctttttttgtttcttttcgttcggaacgctgaggctgtggtatgtgttttattggggggatgggaaccacgtcttgcgtaggaagtagttcgtcttgtacgtgagctgggacgaggtgttcttgtctaacgacaaggcggaggacggagtgttcattactcgccttattcgacgtatgcggttgttccgatctggccgtggttgggatactagactagtctgctctgaccctgtcgtctcgctacctcctgtcagcgccgggttgtttaggccttccttgaagctcttgttctcgcaacgagggtgttggtcggctggattcaatcgtgtcatggcgagatttccgctcgctggatctgaaattggctgattcgtcttcgggcgatgcggttatggtgtgaaagcctgggtatggaccttnnattgcccccttgctggacattggatctgggagtatgctcccttgtcctt

SEQ ID NO: 33470 - DNA, 274 bp, Glycine max
  Clone ID: PAT_MRT3847_130227C.1
ctcgagccgattccgctcgagctaaattgcaaagctgtctagctggtcataacatcaccattactgatggtattgacaaaactagtgcagctttgcaatttagaaagttagcagattgggattgtctcaagagaaactttaagcagatgtctaatgtgttgtgggtggctcctgaggacaatgcgagtttatggccacaacttcattatggttcgggtcataatctggaaatgcaagaagcttatgttgtcaatctcggcaatgtgttacgaga

SEQ ID NO: 33471 - DNA, 256 bp, Glycine max
  unsure (1)..(256): unsure at all n locations
  Clone ID: PAT_MRT3847_130228C.1
tttnnttnnnncnaggttttttacagagatcgatcttaaacatatggtgaagtctacgctcaaaaaacttccaccctaaaacaacggaatgaattacttaggccctcttccaccctagggggttgacaccctccccccatcagttaagggcttatgtctcaaaactaacctttaaacaaatgggtctagaactttttattcctcacttcaccatcattagtcccaaccagaggatatatgttcctagaaccaaatt

SEQ ID NO: 33472 - DNA, 650 bp, Glycine max
  unsure (1)..(650): unsure at all n locations
  Clone ID: PAT_MRT3847_130229C.1
tttttggaacaaatcaaaccaaaactttcttatgaatcataaacaattaatattatatatatagcattctactatatactatatataatttctctttccctctctaacatctaaaatccaatatcttctatattttcccttcatccacccccgcttgagcgtgaccttgggtttacgttgtacgtacagttagagcaacatatccttctttttctatatattgcttttgtctcccaagacatattagactccaagcagcacgtagtagagtatggttatgggcaatgcaattagcatcccaaatataaccgcagtactaagtatatctgcatggagattgtattctttggcgaacacaaagggaacgataccttggggaagtgcagcctggacaattgcaacatgcaaaagaactccacggagtccaatgcctattgaagttgcagcaatcacagctggacctgtcaagaacctaacagccatagaaaatgctgccacagattttccacaggcaatgatcttgggttgtaatgccatgaacagacctagactgaacatggccattcccagaccagcatcagacagtattgagatggaaccttttacaatagttggcatttcaatgtgccctcgtgccgaatncnnngcng

SEQ ID NO: 33473 - DNA, 391 bp, Glycine max
  Clone ID: PAT_MRT3847_13022C.1
ccctctccaggacttgatttatttatttattagaaattaacccgggaaaaggggggacctgggaaaaacatagttcctacaaaggcgggaaaaccccctcccgttaaaaaaaaaaagcaattccccaaagcccagggcgagctatgaaagaaaaaattcctgcccatttgctaaaaaacggaagccgccccattttgaatttgcccccctttggggacaagaaattaaaaaggccttggggaacaaccatttgccctgccaaataaaaaccctttttttgggaccggattttcatccctccatgacctggaggggggttccccccccaaatacaattggggacccaagtcctgccttcccaaattttgggcccttttgttccacattcccc

SEQ ID NO: 33474 - DNA, 253 bp, Glycine max
  Clone ID: PAT_MRT3847_130230C.1
gtcctggcacagcatcaaggagggcttctccttccagcccaagctgcgctcacccaggcgcctcaacagtagcccccgggtccccgtcagccccctcaagttctccccttttgaggggtttcggcccagccccagcctgccggagcccacggagctacctctacctccactactgccaccgccgccgccctcgaccaccgcccctctccccatccgtcccccctcagggaccaagaagcccaagaggggccgt

SEQ ID NO: 33475 - DNA, 363 bp, Glycine max
  unsure (1)..(363): unsure at all n locations
  Clone ID: PAT_MRT3847_130231C.1
actcatacggaaaacaacataatgnnattaacaaggtcattttttaaataacaccaacaaaccggcaaatggggcaattttattgggtgcaagagaaaccaaattatatattgcagcatcgagataagagattctgatacagaggagttgtttgtgataaatctgaacgacaacgagcctttggctctggatgcaattatagaagactgcgagatcaccactgagtactcgcttgatattgatattcacgacggcggtagcggcaactatgatgatgttgttatgtggcactaggcaaggatggagattagagcatggaagctctttcatgggcattgaaacaccccgtgacaccatctgcca

SEQ ID NO: 33476 - DNA, 472 bp, Glycine max
  Clone ID: PAT_MRT3847_130232C.1
caattcggctcgagctcgagccgaatcggctcgagtacggctgcgagaagacgacagaagggtggtcccatagatttaacaccaacacctcaagtttgtgtgtttctacctgaaggggaagctgattgtacttgtggttctatgattgtgtgcatatgcttgcctgagtctgctgcacagaagttcacacaagccttgcagttgctcgattcggtttcttgactcaaaccttgccttaattcaactgatcataccttatgttcctactgggtttagttcattatgctgttaataaaatgtcaatgtttatgcattttgataattatattcacatgtgattgatcctcgagtgttgttgccagatcgatgtgaaagtagtctggtgctagtgccatcatgtactggaggtgagatttcaaagttatacataactagatttacacatgtgcattgcacaactgtcttaagtaac

SEQ ID NO: 33477 - DNA, 322 bp, Glycine max
  Clone ID: PAT_MRT3847_130233C.1
caacactattaattacgaaattaacctctccggttccctccaatccattcactccctccctcttaaaacctccttacgaatcaaatactcccaaacagataaaagataaagtgctgcaaacaggacaatacttcatgatctttataagaaagaaagacatagtccataatataataatctctgcagacctagtacagaccttctgggtcttatagcgaagtatatcacagacatgactagcgaccgtgcgatggttgagaaggctatctcatcatcaaatgcttgcgatgatcaggtcaaggaacgtgggcagagcaggaag

SEQ ID NO: 33478 - DNA, 1599 bp, Glycine max
  Clone ID: PAT_MRT3847_130234C.1
ccctcgaacgccccattcggctcgagatttcctagcctcccaacaaggaggccccctatgctcaacagcagaaaataaataaagggcattggggtgcaatggccattgcaaagagtgcttccattcttattattttgtgctttgcattggcctgcaatgcggataatgctggaaaaccagacccagttgctggtcctgacatgttcagcaataaaaatgtggctaaggatgtgctccttcccggggagcaaatagttaacgtccaggattttggagccaaaggtgatggcaagttcgactgcaccgagtctttcatgcaagcatgggcaaagacctgccatcaatcctctgggccagccaggctttacgttcctgctggcagattcgtggtttcatcaatgtattttaatgggccatgcaatgctacaagtataacaattcaagtacaagggactgttttggctaccacggatatttccgaatatgaaaacggcgactggctctttttccagaaccacaatggcttgaaaattgttggcgggggcactttcgatggccagggtaaagattcatggcaatacgcccagaattgcgagtcagccaatgacggttcatgcgccaggaatccaagcaacctttatttcagcggaaacagcaacttggttgtacagaatatcagatcagtgaatcccaaaggctttcacatattcgttacaaaatgtacaaacgtcaggttgagaaaacttaagctggttgcaccgggaaccagccccaatactgatggcattcatgtcagccactctgacactgtgataatgtccagaaataccattgcaactggggatgactgtgtctctctgataccaggactcagaaacattttcatcaacaaactcaagtgtggccctggacatggtatcagtatcggtagccttgggaagtatgcagatgagggagacgtgagaggcgttcgtatcaagaactgctcattgactggcacaaccaatggccttagaatcaaggcatggccagagaggtatccaggtgcagcgtcagatgtaagcttcagtgacattatcatgaaagatgtcaaaaatcctatcatcattgaccaagagtatgaatgttatccagactgcaaaaagaagccgtcacttgtaaagctccaaaatattcatttctcaaatataaggggaactacaatttcaccacttgcagtggacttgaggtgcagcgggctattcccatgccaaggtgttacaattcgagacattgacctcaagattggactcaccccaaccacctcaagatgtgtcaatactcgacctctctttggaggcttgctaatgccccctgcatgcgcatagcttcctatccatccatcacattaattttcttaccttacttaattaccagctctgttgttgagaaaaaaaaaaaaaggttttagagctaatgggaatttattatgctaggagcatttttttaataaaatgtttgcactgtaaacaggaatggggaaaataatcttgttttttgaagaatggttttcattctcaattaattaactaaataaattccaaaaaccttcagtgcctt

SEQ ID NO: 33479 - DNA, 502 bp, Glycine max
  Clone ID: PAT_MRT3847_130235C.1
gttacatgtcctgtgaattgcaccggctcactaagctgcagtacgcgcgtggtcgtccttttttttttttttttttttttttttttttttttgttgtcaaactattatttttaaaatgattttatttagttgcttagttttatttaacaatttagagtttatttgggggcatatttgctactggaaagatttcgataatttgtttcaatgcaaaggttggaggttccaaaattaacctgagcttaatatctacttttaaaaggggggatctctagaaatatttttgggttgggccaaaaagagagttcttcttccaaagagattggtggtttcctttaactggaatattttggttttggaggagatgctccaccctatatgaggttgaacacccagattcctctgttttttgcgtttttatagtaccggagaaaaaaagacccatattttccaaccctgattaaaccctagggggggccctttttttttttgggtttctttt

SEQ ID NO: 33480 - DNA, 504 bp, Glycine max
  Clone ID: PAT_MRT3847_130236C.1
gaaccaaccaaaatttgccttcattttatcaccccaaccaaaaagaacggggaactcccaacccaaaaaaacttttttggggcccacagccaaaaggtactactaagtaaaacgccaaaaaaggtgatgacttcccaacctaacgccgaaaaaaaggtttcaatattccccccacgctgcacaagaaagcgaagaaaaaacccgacaattttggaccaggaacctgggtgagacccagaaattccctaaacggagcccgaaagaaagctcggctacccaatgggaaacctgttaaccggggaaaaagtaacccatacaatcccccaaaaaaaaagccagaaccctaaagtcaaaacccgggggcccaaaagaaaaaaacaaaccctggtggccctaagaaacggcccaatcaccaaagaggaaacccgcccacccccccgtaataaaaaaaaaaaaaaccgccccccccaaagaagctataataagaattctcccccccccccc

SEQ ID NO: 33481 - DNA, 733 bp, Glycine max
  Clone ID: PAT_MRT3847_130237C.1
cgtacagctcggaattcggctcgagaaacgattctcctggtcaacttggaaaagaggtagttggtgattgttaatagattggcaagtgtatcaattttatcacaagtagtaaagattaaaatggaagttcaagtatcgaatccacgaggactttggttgtactttagtgattctaacccaattattaagcaatgagaagaagtagaagagaaaatgaattgtaagtgtgaaaattgggagtaaaagaaaagaagataacaagaaaaataaataatagtttaaatgcgaaaagataaagttagaatgcaataatgttggggtctagtatgccaaaattacttataatataatgtagtagattttctctaattaatgaaatccctgttttcacctgtgtctactgaattatcatatttttggtttccagcatgaaggacctagtttatttatcattttcccccaaatttatttgcagatataaattaacacaccatattaagataagaaatgcaaaaattcttgggcaaaataaatgtcaatctatttctagtaatgaatttattcaaataccttttctcggttctttagaaaataatcatttttcaatgcattactttttaaacattatatgaatgatcagactataataacagaaaagcacatagaagaataatataaacaaaaaggggtaatgaaagaaaggactactaatagcaagaaaaaagaaaatggc

SEQ ID NO: 33482 - DNA, 801 bp, Glycine max
  unsure (1)..(801): unsure at all n locations
  Clone ID: PAT_MRT3847_130238C.1
gaatncggctcgagcttgttgcacttgcaaccgttgccatattaattatcttccaaaattgtaatcacaattcataaaaacaagcaagcatcgaaggacccagaaggatctcaacaacaaagaagcaaacttttcatcaattttggcatcaagaagagaagggttgtgtagtggaattggtttttggcaaaaggatatttttcgtaggaattgaaaacaagtaccaggaatttatagcaactcaagcttccgttagtgttttagaaggtggtttttggtgatggtgattttaaaccttgggagaaaggaggagcagggagtgcgacttgggaaatacgagttgggaaagacacttggagaaggcaattttggaaaagtcaagttggcaagggacactcattctggcaaactatttgctgttaagatccttgacaagagcaagatcattgacctcaataacattgatcagataaagagggaaatatcgaccttgaagctcctaaagcatccgaacgtggttagattatacgaggtcttggctagcaaaaccaaaatttatatggtacttgagtacgtgaatggaggagaattattcgacaaaattgcatccaaaggtaaactgaaagaagctgaaggtaggaaaatattccagcagttgattgattgtgtgagcttctgcccaataaaggtgtcttcacagggatctcaactggagatgtacttgtggatgccaaagggaacataagaaaccgatntaatcttagtgctttgccccagcatttaggcagatggggtgctgca

SEQ ID NO: 33483 - DNA, 457 bp, Glycine max
  unsure (1)..(457): unsure at all n locations
  Clone ID: PAT_MRT3847_130239C.1
ccaaaaaggttnctnacctgggcaatnngaaaggggcggtaanncanccnatgatgaatagttgntnggattggtggngattgntngtggggctnttcatnatngngcgtnatgatagatcgtnngcgcgactgtggatnannttnnantgtcnacgatntcgngtgtgcgtgtgtgngagngnttgtgatcgagggatgtananggngngtgngngcttggtgngatgctgncnnnnagatcgngggtgngnnanagantgtgntngttgtgtgngggantgtgtngtggatgngngtgttnngatgngggngngntgagtgaagnnattnntgaatnntgnnatagngaggannacatgcaagnttatgangagtngnctnggttgtnnncgancctngtnacnngagtgntgctggatnncctgacancagttangngnngcncgaatgntncn

SEQ ID NO: 33484 - DNA, 475 bp, Glycine max
  Clone ID: PAT_MRT3847_13023C.1
tttttttttttttttttttttttttttttgttacttttatttttacattttctattttttacttttgctattgtttttggggaaaaattgactaaaaattacaagagttccacaggttctttgtgtaggaaaaaagggtgtttttatcacccttgaaacacggggaaagggggaccccgtaccttgggaaaaaaagaatttacagtttataaaaaaaaaaaaaagtgaatgaccgcctccccgcgcttgagagaaaaaaattttttaccgcggattgggaaattttgaaccaacacgaagttgtctttttttttaaaaaaaaaggggggtaaaccacgaaggcgaatattctgttttattggaatcaaatgtgatccttggggggggggggaggggtttgctttttttgttacgaagggaaaatattttgaagggggcctgtttttggcttttccaaaaagggtgtggcgcttgg

SEQ ID NO: 33485 - DNA, 261 bp, Glycine max
  Clone ID: PAT_MRT3847_130240C.1
agaactttgtgggacaatgctactttggaattccttgaaatgtagagtgaaggagcttggctagtatttcattgatgaaattatattttgcccagagcttttaatcacaaggagtgtaagggaaataaaatataataaaaattcagaaaagtacaagtcaaacccctctaattcatcagggtgaacatgtagtcgttcccttccctcctatttgaattacaaattgtccgcttaatattgttctttcaattttgctagtta

SEQ ID NO: 33486 - DNA, 331 bp, Glycine max
  Clone ID: PAT_MRT3847_130241C.1
aatgtattttggggaaaaacagctcatggtttaaaaacgctaccatttaacatgcctatagggaaccatgcgtatcacactcttcaaatgggtcattgaaatattgctaagttaatgcacatctcattccttggacataatgcatttgatctcctatcttattgaatactactacaatatcgaattccttggtaggcctagtctcttctgtgggccttataatattgcttgataaatgctcaatgttgctataaacctataccacataagagcatatttatgttggagtaatcatactcgaagatgatatagacgattataggatagactc

SEQ ID NO: 33487 - DNA, 424 bp, Glycine max
  Clone ID: PAT_MRT3847_130242C.1
ggctcgagcattaatgttactactgtttgatataaagctaacaaaaaccgtgtacatatctgcatgattcattgcaaatggctctcgacgatgccgctcaggcttctgttggggctcccactgatcatagaacattgccccatggaccaaagggtccacctaaacttatggaggagattgaaaattccctgacgaccatcgacctaatacgatctgagtaaccaacccgaatggtttctgggagagactcctgaagggaaggtgccagtggctcttttctgatcggcaactgggaggctcattctcatgctaatgtgggcattctcgaggaaaagaaccctggaccctgtgtacaagctgctctgaattcgccttcgagggatctatgtaatttggctcttctgtgagatttctcactagcatg

SEQ ID NO: 33488 - DNA, 444 bp, Glycine max
  Clone ID: PAT_MRT3847_130243C.1
atccccaaaaaaacaaagggataaacaaatttattttggcttcccccctgaattattcaacatactaaccagggaaaataaggggggaaaaaaaaaaaggtttttttaaggacataatcttcacatttactaaaggggaaaagccctccccttttttgggcgggggcaaaacattgcccaccgggaaaacttcattggcttttaccccgggaaaaacccccccccccaggccccagggggggaaaaaaaaagccctggggtttatttatttaattaataaaaaaaagggccagggggaccataaaaaacattgaacaaggccctaaattttattagtccacttcccatttaatttagggccccccaaaaacggggatgaagtgccaaggataaggggtggggtagggggccacattcccccggggggaaaaaaaaaagggcggg

SEQ ID NO: 33489 - DNA, 303 bp, Glycine max
  unsure (1)..(303): unsure at all n locations
  Clone ID: PAT_MRT3847_130244C.1
tttgccgcnnaaggaaaggcttttttactttttttttccaaaagatggggcaatatggctaatttctgatgttcaattcaagatactacattcccttaaaatttacacaaacatgttaatatcacaatgcctttgccttcataaaaaaaaaaaacaccagtgccnaaaggtgtggggaaccnccncccgnannnacaaaccaaaaaaggcccccaggggggggggggccggggacacaaaagggaaccccccaaaaccaaagacggaaggcaaaaggaaggacagacgggaaaggacagggaa

SEQ ID NO: 33490 - DNA, 378 bp, Glycine max
  Clone ID: PAT_MRT3847_130245C.1
gaacagagggcccaagcggtgctgtctttttccatgtacgtgtaggggaatcaactccactactcagttggcaattgatcagcagatgtaggcgtgcgaacgatactcactactgtgcgcacgtatgacctgtaagtaacatcttttccattcgcaccaccacgacaagatcaacagcgcatcggagcacacgcgctaccacctgcaactgtcccgatgattcatactgcaccaggaccatctggctgcggacccttttgataatcgccctctccgcttactaacccagctccctaagattcttatcaccctggggtgctttactagccgcctactggagagagatccactggcagaatgatgaacgcacccccgacc

SEQ ID NO: 33491 - DNA, 1991 bp, Glycine max
  Clone ID: PAT_MRT3847_130246C.1
aggaagacgtggaaatgattctagagaatcttccagctcaaaggcagagcatgcttttctctgctaccatgcccagttgggtgaagaagttggcgagaaaatatttgaacaatccactcacaattgatttggttggtgatgaagaggaaaagcttgctgaagggataaaactttatgctatagcagccactgccacttcaaagcggacaattctttctgatcttgtaactgtttacgcaaagggtgggaagactatagtttttacacagacaaaaagagatgctgatgaagtatcattgtcattaacaaatagtataatgtctgaagcactgcatggtgatatatctcagcatcagagagagagaacactgaatggtttccgtcaaggaaaattcacagtgcttgttgccactgatgttgcagctcgtggactggatattcccaatgttgatttgattatccattatgagcttcccaatgatcctgagacttttgtgcatcgctctggtcgtactgggcgtgctggaaaacaaggtaatgccattctgctgtacaccagtagccagaggagaacagttagatccctcgaacgtgatgtcggatgcaagtttgaatttgttagtgcaccggctatggaagaggttttggagtcatctgctgagcaggttgttgccacacttggtggagttcatcctgagtctgttcagtttttcacccctactgcacagagactgatcgaagaacaaggaacaagtgcccttgcagctgcacttgcacaactgagtggattctcccgaccaccatcatcccggtctcttatcacccatgaacagggatggattacattgcaactaactcgagattcagatagtagaagatatttttcagcaagatcaatcactgggtttctttctgatgtttatcctgcagctgctgatgaagttggaaaaatccatttaattgcagatgaaaaggttcaaggagctgtttttgatcttcctgaggagattgctaaagaattacttaatagggacataccacctggaaacaccgtttccaagatcaccaagctaccttctttgcaagatgatgggcctccaagtgatttctatgggaggttctctgacagagatagaagtagccgaagaggttctacttctaggggaggttttagttctaggggaggttccgcttctagggaccggagaggttttaaatcctcacggggctgggatggggaagactctgatgatgatgactttggtgatcgatctagttggagaggtggtagaaattttaaaactggcaacagctggtctcgagcagcaggtagaagcagtggggatgattggctaattggaggtagtagacgatcaagcaggccttcatcatcagacagatttggaggggcctgttttaattgcggagaatccgggcatcgtgcatcagattgtccaaacccttcaaacagacgaagcttttaagttcccacatatttatttttgggcccccctttgttcaagacgtgagctgcttgctgcccctgtttttggcctaatgggttccggaaaattgaaagatgcttctcaaaagagttacagaattgatattaatttgcatctcacgtgttggcgtgatctccatagggacctctgtttttcgtcctgagtctcaatgaaatttagtatttgttttgggaagtggtattggataaagaatagtcttaacagtatggttatgtaatcttatttttggggtgagttgggggattgtatggttctgtattctattttaaccatgctactagtatttaacatctttttgaaccttcctggtttaggaacagacaggaaaaatgaatgaaagatgaaatcccaaaggtttatgcagaagattcattttcattcacttttcctgcgtcatattttcaagtattaaataaaatcataaaatgtcatccttttctgcataaaaaaaaaaaaaagggaggg

SEQ ID NO: 33492 - DNA, 302 bp, Glycine max
  Clone ID: PAT_MRT3847_130247C.1
atctctaattttacaaataaaaaatccttcttattctcaatattccttctcaatacatctacaccaactacaattatacatatctcaatcaatattataacaattataaataccaatacctctatattctttcattatcatataatcaatttattcatcatcaaccataaatcactcatcaaattatccattttatctacaattcctacaaatctaaattccccatcttatataatatttaaaccaatccttacaattatactccttattacaaattcttcaaatattacaaatctctaatt

SEQ ID NO: 33493 - DNA, 158 bp, Glycine max
  Clone ID: PAT_MRT3847_130248C.1
atttgtattgtctcacaaggcctccgtctattctggtctgatattcgtaactgcactcactatgtgacgaatactaatagcgaatagtggacatgctcattacatctacaatgggtcaatctctcatgcgtaattgagtgtgagagccaaatgcatcg

SEQ ID NO: 33494 - DNA, 1014 bp, Glycine max
  Clone ID: PAT_MRT3847_130249C.1
cacacacttgttctgttcctacggttttgttatggctcttccttcactatcctttctcttcatcttcacttccttcatcgtctccgtctcacactcaataccctttattgttattcatggaattggggatcagtgctctaatcgtggagtgaaaaaattcacacagcaattgagcagcttctctggtgctgaaggatattgtgtcgaggttggaaatggatcatgggattcatggtttgagcctttgaaagagcaggctgagattgtttgtgaaaaggtgataaaaggattgctgctgtcttgtgataattggtaacatttcatactaggctaataagcttttgaatttaaacttgctactccatttctcaccatgtacaggtgaagcaaatgaaagaattgaaggaaggatacaacattgttggactttcccagggaaatttaattggtcgaggcgttgtggaattttgtgaaggaggacctcctgttaaaaactttatctctttagcaggccctcacgctggtactgcttcagttcccctatgtggttcaagtatcttctgcgttcttgcagacacccttcatcaaggagaagtttacagtaaaaatattgcaggaacacttggctcctagtggatatcttaaattaccgaacgccatacctgattatttggagaactgtagatttcttccagtgcttaacaatgaaataccagataagagaaattccacttacaaggaaagatttagtagcttgcagaatttggtacttatcatgttagagcacgacactgttttaataccaagggaaacttcctggtttggatattacccagatggctacttcaagcccgttttaccaccacaatcgatatgatccccaattcgactcgggtagatcttttcctgtgataaaacttttcttactccggcttttcctttgcatttattaaatgatatcaatggagttgcctccttaagcttctattacctattaaggtcataaatatgaaa

SEQ ID NO: 33495 - DNA, 3734 bp, Glycine max
  Clone ID: PAT_MRT3847_13024C.1
ccgcccacgcgtccgcccacgcgtccggaatgacagtgaggtgattaacatgattgcacattcatctgaatttgagaatattgctgttcgggaagaagaacagaatgagctagagatgttggcacgcacatcatgtccattagaaattaagggtggtccttccaataaacatggaaagatttccattttgattcagttgtacatatctcgaggttctatagattctttttctttagtatctgatgcttcatatataagtgcaagcttggctagaataacacgggctttatttgagatttgcttacgaagaggctggtgtgagatgtctttgttcatgttggaatattgcaaagctgtggatcgccaagtttggccgcatcaacatcctcttagacaatttgacaaggacctttctgcagaaatattgcggaagcttgaagaacgtggggctgacctagaccgcttgtatgagatggaggaaaaagacattggggcattaattcgttatgcgcctggaggaaggttggtcaagcaacacctagggtattttccatcacttcagttatcagcaactgtgagtccaattaccagaactgtgttgaaggttgatctggtcattacgcctgttttcatttggaaagatcgttttcatggtactgctcaacgttggtggattttggtagaggattctgagaatgaccacatctaccactctgaactctttacgctgacaaagcgaatggctaggggtgaaccttacaagctttccttcaccgtaccaatatttgaaccacatccaccacaatattacattcatgctatttctgattcttggcttcatgccgaggcattctacactattacttttcacaatttaccattgccagaggctcgtactgctcacacagaactccttgatttaaaaccgcttcccatgtcttcccttggcaacagtacttatgaagcattatataaattttcacattttaatcctatacaaacacagacttttcatgtcctgtatcacacggacaataatgttctgttaggagctccaactggaagtggaaaaactatatctgctgagcttgccatgcttcgtctttttaatactcagcctgatatgaaggttatttatatagctcctttgaaagctattgtcagggaaagaatgagtgattggcaaaagcgtcttgtctctcagctagggaaaaagatggttgaaatgactggagactatactcctgatttgacggctctcttgtcggccaatatcatcatatctactcctgaaaagtgggatggaataagtcgtaattggcatagccgtagctatgtcacaaaggttggacttatgatattggatgagattcacttattgggggctgatcgtggacccattcttgaggttattgtttctaggatgagatacatatcatcccaaacagaacgtgcagtacggtttgtaggtctttctacagctctggctaatgctggtgatctagctgattggttaggcgttgaggaaattggactcttcaatttcaagccaagtgtgaggcctgtacccctggaagttcatattcagggttatcctggaaaatattactgcccaaggatgaatagcatgaataaaccagcatatgctgcaatatgcacacattcacctgcaaaaccagttcttatatttgtctcatcacgacgccagacaagacttactgcacttgacctaattcagtttgctgcatcagatgaacaatccagacaattccttaatttgccagaagaaaccctacagatggttctgtctcaagtctctgacctaaacctaaggcatactttacaatttggcattggattacatcatgcaggcctgaatgacaaagacagatctctggttgaggaactttttgcaaacaacaaaattcagatattggtttgtaccagcaccttggcttggggtgtgaatcttccagctcatctagtgattatcaaggggacagaatactatgatggaaaagcaaagaggtatgttgattttccaatcactgatattttgcaaatgatgggtcgtgctggacggcctcaatttgatcaacatgggaaagctgtgattcttgttcatgaacccaagaagagcttctataaaaagttcttgtatgaacccttcccggttgagagtagtttgagagagcagttgcatgatcacattaatgccgaaattatttctggaaccatttgccataaacaagatgcagtccattatcttacatggacttacttatttcgtagactgatggttaatcctgcttactatggattggaggatgctgaatctgaatttctaaatacatatttgtccagcctagtacagaccacatttgaggatttggaagacagtggatgcataaagatggatgaagacaaggtggagcccatgatgttgggtacaattgcatctcagtattacctcagctacatgactgtatcaatgtttggttcaaacataggtccagatacatcacttgaagtctttttgcatattttatctgctgcttctgaatttgatgaactacctgtgcgtcataatgaggaaaaatacaatgaagcactgtctgagaaagttaaatatccagtggataagaaccgtctagatgaccctcacatcaaagcacttcttctatttcaggctcatttttctcaattggagttaccaattagtgactatgtcacagacttgaaatcagtattagatcagagtatacgcgtaattcaggccatgattgatatttgtgcaaacagtgggtggctttcaagctcaattacttgcatgcatcttctgcaaatggtcatgcagggtttgtggtttgacaaggaatcttccttatggatgctgccatgcatgaatacagatctgataagttcactaagcagaagaggaatttctagtgtacaggaattactagacattccaaaagcagcattgcagactgtaactgcaaatttcccagcttcaagattgtaccaggatcttcagcatttccctcatgttaaaatgaaattaaaagttcagaggaaggacactgatggtgacaggtctcgcatattatctgttagattagagaagaccaattctagacgacactcttctagagcatttgtacctcgatttccaaagataaaagaggaacaatggtggttggttcttggtaatacctctacgtctgagctatatgctttgaaaagagtttctgtttcagatcacttagttacctcaatgaagttgcctctgactccagctaatcttcagggcgtaaaactgattttagtctccgattgttacattggatttgaacaagaacactccattgaagaacttgatgtatgttaagtagtggagacaccattggtcagtgccattgtacatacaacgtaaacgtaagatttcttgaagagggttggggctgcccaggttgtaccaaaaaatgtttttttttaacttgagaaaaagtcaatatgtatatccataggatttgcaatctcttgcatttaattgttttataggtaatcataatgatcttgtttttagattttctttatttattttccaagtcgtgtcgccatttgtaagtataaaggtttacagtgcaaggattgaaagatgtctgaacatttataaattgtgaaggaatggatctccgcaagcataaaaaatccagcatttatatgcgagt

SEQ ID NO: 33496 - DNA, 377 bp, Glycine max
  Clone ID: PAT_MRT3847_130250C.1
atggctcttccttcactatcctttctcttcatcttcacttccttcatcgtctccgtctcacactcaataccctttattgttattcatgcctgttgtaatccgtaatttccatccacttaatattttgggaatttttggaactctcattgcctggttgtacttgaattctgtctttggtttgccatacttgatggcaggaattggggatcagtgctctaatcgtggagtgaaaaaattcacacagcaattgagcagcttctctggtgctgaaggatattgtgtcgaggttggaaatggatcatgggattcatggtttgagcctttgaaagagcacgctgagattgtttgtgaaaagggtgaagcaaatgaaagaattg

SEQ ID NO: 33497 - DNA, 454 bp, Glycine max
  Clone ID: PAT_MRT3847_130251C.1
tttccgtcatcactgtatgacgtcctccttctttgggggggggggggggaacaaagaattataaaaggaagacgttaagattacaaacgcgataacgctttgaaaaaatgcatcacaggaccgacaagggggcgatcttaggttgagagaggacgtgagataaaggtagttgaaggaagggcaaacgaagcaagacgagagctagaagatagaagataacaatgcaatatagatcaccgataaggttaacgtaaataaagaaacaacccccggacgcacgattgaaatatatcggaacataaggggggggagaaaaaaaactatagaaacgtaaaataacggtaacagcgcattgtacaacaaggtgtggagcgagccaagaggtaccgaatcgcgcgcagtgacgtggcgggcggagtttgagtggttacggcagtctgaggtggccatgggg

SEQ ID NO: 33498 - DNA, 171 bp, Glycine max
  Clone ID: PAT_MRT3847_130252C.1
ccactcgttcgttctagaagtcgacttttagagtatgatggtataaatattcggaccggggcttatatgtagttatggctttaatgtagcctgatgaggttaaaatctgatgttcggatctctaattgagatggttacattattttctagagcgactatggattatctaac

SEQ ID NO: 33499 - DNA, 449 bp, Glycine max
  Clone ID: PAT_MRT3847_130253C.1
tcccacgcgtccgctttatgaatataaaattttggtggatgcccaaaaaactaacctttttattttttgcaggttggacagcatttggattcttgtgtttttcttggagcaaacagtagctattcagctttagaggatgatcatgtctacttggaagaattagttgaaagccctcagtctaggtctttgagaggaagtgtggatgaattaccatctcagaatagtgcagttaacaactccacagaattgatcattgagcttcaggctgttggcccagagcttaccttttataacacatcaaaagatgtaggagggttattaaacctgtctaataaacttctacttgcacagttggatgcattttgcaggtgagttcctctacttaatagattaatatgttaggagggctgaacatttggcatggtattcaagtgtatctgagtgctaat

SEQ ID NO: 33500 - DNA, 364 bp, Glycine max
  Clone ID: PAT_MRT3847_130254C.1
ggtgagacgagggtaatgtcgcgttgtggtgccgcgtgtcgggctctgcctctgtgtgtggcgtttgtgtttagagaccacactctatctgcgtatcggacccatgtagaccaaacagggtggaagatctgactctttgaagacacccaagtgtgataacagggatcacgacgagggtgacatggctaacattcaaaagaaacaggaagaggagagcgctctaagagacttgagcgccagggcacaacaaaagggaatctttagaggctgtgggctcaaaaaaagtggagagatataggggctctatatcaagagtgtatacatactatattgacccctggagtatattaccatgatcacttgt

SEQ ID NO: 33501 - DNA, 178 bp, Glycine max
  Clone ID: PAT_MRT3847_130255C.1
taaaggactaagagatactctgtggcttggggacaatgttatacaagactatatatatcaaatgaaaagaagaaaggatactagatttcattatctgaatttggataaaagtattccaacgactaaaacaaataacgttaccttgtgaaacattataatgacttgtaaaggttactaa

SEQ ID NO: 33502 - DNA, 267 bp, Glycine max
  Clone ID: PAT_MRT3847_130256C.1
atgcctcctacactcagcaagagaaggaccacaccctctctggccttgctccctccttcttccctgtttgtgagggcttctcctcttagaaacacttttttgccaccacacctctgttgccaaaagtgcttattttatcacggactcgttgtgcgatgcgaggtcgttgtggcggggaaggacaaagccactagggagaattttgagtacaccaaaatgaggtggattttcaatcaatttgttgaattgttgaaaatgtttgattga

SEQ ID NO: 33503 - DNA, 648 bp, Glycine max
  Clone ID: PAT_MRT3847_130257C.1
aaaaaaaaaaagcgaacttgttttcaggaactgggatcaataccaatccaataaatcctaatagggcaaaaaacccccaagggcccagccccaaaaatgcttttagcacaaaaaaatcacccccattttaagggggccgttacgaacataaacacaatctaacattcaaaaaagaaaaaaataaacacaatctaacggcaacaacaatatcactgagagagctaagtcctccagataaaacatgcgtccctaccaaccagacacgtaaaacatgaactcagaatcagactcgagtcgcgccatggtttccggcgccaaaaccacctccaaatcgacggcgccgccgccattcctcccgggaaacgccgacatcttgccgtcaaacttgttcgctccgccgctgcgcacggctaagggccgcccccatccaaaatcattgtcgtacatcggaaacctcggcgagcttcccatctgcacggtggcgccgtcgtggtttcccaactcgaagcacttaggctcgcgctcccaattctccaagttacggcgcaccgtagcaccatcgaaggccttcacgcttttgttcagctgctccgcgcaccagcgaagctccttagacgccacatcaccagcttctgcgcacgtggcaat

SEQ ID NO: 33504 - DNA, 312 bp, Glycine max
  Clone ID: PAT_MRT3847_130258C.1
ccatttttctcaattcttaacttttcagtttatagacatatttatttggataaggtcttctctaaaccgggatttattcattaattccaaacacaataccccattcattctttttattcatcaaattcatactattatatatcaaatatatacattaatttttttattcaattatcaaatataacataccctcaatcaactttttacataaatttatctattctatttctaataccactatcattatcattactactactaacatctttaacattcttcattctccattatttactccattactattttata

SEQ ID NO: 33505 - DNA, 261 bp, Glycine max
  unsure (1)..(261): unsure at all n locations
  Clone ID: PAT_MRT3847_130259C.1
tttctttcaacttaccttgtgtctcaactgaacgattatctacaccgggagtgtctaaaacgggtactcctcntaaaacttattattacacctatacacaccaacatcatcatcacaaccaccataacccaatcccttctacattaaaaaataatttataattattgaacttacctcagtggtccataacacattcaaattccccgaaaacatcttctaactatatactaataaggtcaacaacatatgcctatataccat

SEQ ID NO: 33506 - DNA, 636 bp, Glycine max
  unsure (1)..(636): unsure at all n locations
  Clone ID: PAT_MRT3847_13025C.1
tgatgcaaatgtcccaggttttgcagtgatgtctgtctgatgatcatattgtgcgtaaaaatgatccatagaggctccttttgaatggcagcatgtctcggtctctggtttgggttgatgagttcattgtcatttgcattgacttatggaataagaaatcccttatttcatgcccacgcgtccgaaaaacacgtcacaacgtcacaaaaaccttaccttacctctctctgtgaaacgttgatcacagtgagtgaccgctatcaacggcatacacagcgcgagtttgtttatccacattccgcaatgagaagatgatgacgacgccgtttcagcaaccgccccaaaccgtacggagactggtggtggaagtggtggacgcgcgcaacctgctccttaaagatggccaaggcagctcgagcccttacttggtggcttgacttcgacggtcagaggaagcgaacctcgactcggttcaaggagcctgaccttttttgtaacnnnnnnnnnnnnnnnnnnnnnnnnnnnnnnnnnnnnnnnnnnnnnnnnnnnnnnnnnnnnnnnnnnnnnnnnnnnnnnnnnnnnnnnnnnnnnnnnnnnnnnnnnnnnnnnnnnnnnnnnnnnnnnnnnnnnnnnnnn

SEQ ID NO: 33507 - DNA, 888 bp, Glycine max
  Clone ID: PAT_MRT3847_130260C.1
gccccccctattttttggttttggtccgtaatttttctccgggatttataaaattttagtttctttattatcctttttttttttttttttttttttttttaaaaacagtgttcattcaatcacggaaggtataattattgtttatatgatatttattccccttaactaaacctactttcattgtaggtatactattacaaaaaataattattcaaggataacatgaaaacagacgaatcagaaaccaaacctgattggcactctcagggcaccactctataagtgctttgagaaatatcgaatattaaatgtactatatgaatacccatatttcagacagtcttccacatgtaaatttgatcaaagtcttccactttcacttgtactttcaaaaccttttgcaatgtactatatgaatacccactgtagtttttgaaatcaacttcacaaaaaatattaactcaaagccattgctggtttcgaggccaagaacgtgaatattagtttaatgaactgggagcacagatctctcaatgaatgctaatgtaggcaacacaaaactcattggtgaggatccacatgttttctgaacatggcatcagcattactgtatatagccacaacgtttgagaacacagccagaaaaatcatgacaatggataaaatcttgtccttctttgttgcaatgccatggggatccctaagagcaattgcagcagggaaaataaacccaaggcaaacggtggcagttgctcctgtgaattgaaatgcatcccagatgctaggtacaaaatttgcagccacatagattaaagcaatgagtccagtggtgatcaagacaaacctacacttatccaaatccaagggcctagctgaaggaaagataag

SEQ ID NO: 33508 - DNA, 325 bp, Glycine max
  unsure (1)..(325): unsure at all n locations
  Clone ID: PAT_MRT3847_130261C.1
gtcgcangcacgcgtacgtaagctcggaattnngctcgagntcgagccctcgagccgattcggctcgagactagttctagatcgcgagcngcngccccttttacnttttttacttttntnnannnggntgcaaagccntnttnngaaaactttnangttcttaaaaantttgttaccccnaannntttaaancnatngagnaggcccnaaacnngaaggttttnnggccaaaanaatgtgggcccnnattgntncngggggnattgaaaaagnnccctnaaatnttttnaaggggcaagggggataatttgnctntttggggccc

SEQ ID NO: 33509 - DNA, 330 bp, Glycine max
  Clone ID: PAT_MRT3847_130262C.1
tccttagcctggattcttttaagccggccgccttttttttttttttttggatattttggttaaaaaaaattggccaccaagggaaccccccctgcgctggtggggctgggaccttggacctaaacctttacccttgcaaccccacttgggggccacttccaaaaaacacactcacttagccagcagtggtccttattttccagggcttccaaggaccaccaaactgggttttttaatcatcctaattagcatcttcctaataaccattgaaaccatcatacgtttccgcctttagggacgtggctggaacctctttctggttactactag

SEQ ID NO: 33510 - DNA, 439 bp, Glycine max
  Clone ID: PAT_MRT3847_130263C.1
ccacgcgtccgcccacgcgtccggactagttctaggcccgagcgaagaagaaaggagggtgctctgccggcggcggagcggagatgtccgagaggaggcgcggcgccggcgccggcaccggcacccgcaaggatgaggtggtgacccgcgagtacaccatcaacctccacaagcgcctccacggatgcaccttcaagaagaaggcaccgaatgccatcaaggagatcaggaagttcgcccagaagaccatgggtaccaccgatgtccggatcgatgtgaagctcaacaagcacgtctggagcagcggtatccggagtgtgccgaggcgagtccgtgtcaggattgcccgcaagaggaacgacgaggaagacgccaaggaggggcagtactctctggtcacagtagctgagatccctccggagggtctcaaaggtttggg

SEQ ID NO: 33511 - DNA, 686 bp, Glycine max
  Clone ID: PAT_MRT3847_130264C.1
cccacgcgtccgttcttcttttttttttttaaaacgaactgacgaaaattgttcagcaacacgcatgatttatagggagcctaacaatagacataaacactcgatacaaagtccatttgaagcagcaagaaaaagataaatttatgcatatagaaattagggagtgcaggacgaactgtcaaacatctaaagaaaatacacggggcaagcacacacaaagtgacaaacggcaaagcaaaccggaggcccttataactccggtgcccacatagaaacacgagtaaggctcatgaccgtgaaccttaaagcgaaatatacatgcgtgtgaagggcctccatggctggacgaaaaagcaacccttaccgcgatgatgacaccaaaagctgctgaattcaacaccttgaatgatggaccattgctgttttgaaggccatatgaaaagtctgccagaagaagcatttttttagcattaattgcagaatcaggattattctcctgcaaggcaaacaaagaccctggggtctttaggagcactcgatctatcatatgcaacactcttctgtacatgttccaaggggacagccccaggaatgaggggagggcgggaaccaaaatggaaaaaaaccctttactaatccttaagggggagaaacaactggcccagggttcaaccaaaaagccctgg

SEQ ID NO: 33512 - DNA, 635 bp, Glycine max
  Clone ID: PAT_MRT3847_130265C.1
ccacgcgtccgacggctgcgagaagacgacagaaggggggttgaaaagcatgatgtaatggaggcatttcggcttttggaagttgcaatgcagcagtctgcaacggatcattctactggaactattgacatggatcttattactactggagtttcggcaagtgaaagaatgaggcgagaaagtctgcaacaagcaactcgtaacataatcatggagaaaatgcagattgggggaccatctatgcgcttattggagttattggaagaattgaagaaacaggatactggtagcgaagttcatcttaatgatctaaggaatgcaattgctactctggctacagaaggatttgttaccatgcacggtgacattgtaaaaagatcttgatggcacgagacagtagtgacatcaggggactgtcttatagttattaattatagtgggttactgtttttattctttaaccttcttacccaatcatatgcatccggagttcaatgttacgtacatatttttatatacggtgtcttgtgaatgcatctattggtagttatttggttttatctttttccttatccgaacatctttactgttaggtgtttcattttataattaaacatgtattacctttcttggcc

SEQ ID NO: 33513 - DNA, 402 bp, Glycine max
  Clone ID: PAT_MRT3847_130266C.1
cccacgcgtccgtcaagcattgcatccctattgatttgtaactcggttcgcgctttaaataaaaggtctgggaaatcaagatgggttttaagatcatagtgtgtgttttgcaacaatggctaagtcctttgctgctatgatctaggcactctttgccatttccatacttcaaacagtggtaatggctgctaatgaacaaggaggccacttgtatgacaacaatagctaatatgcacgtggaagtgtccatagttaccaatgcccattacaatgctcgacgagatctagcctgacccattaccacatgctctgcatgtttttctgtcagaagtgctctaagacatgcctgtgtgtgccctcggagtatgatggtaatatagctgtgtgctcttgctacaacaa

SEQ ID NO: 33514 - DNA, 241 bp, Glycine max
  Clone ID: PAT_MRT3847_130267C.1
caattgactactacagatatggtgttactattagtggcctgtatatggtcatgggtgttgcgggtgtaaaccagttagcggatattcaaattgatatcagaactgacgatgcatcatgatacatctgcatcaattgtccttgtaacaagttcatcatattgactacagttagccacaaaaggtatgctgctttatgtagaagcttgaactaaaccacatcttaatctattggatgcttcaa

SEQ ID NO: 33515 - DNA, 1178 bp, Glycine max
  Clone ID: PAT_MRT3847_130268C.1
tctcaatcaattcggcgaacgtcttcgcccgccaccccctcgcggctgccgggtctagctctgggaggggaccttctggtgcagtcctcaccgcctgggtattcggcaggcggggtggtggaccttggtggcggggccatgggctcgaacggggtgactggcaatcctggcccttcctattcccctcctgggggttgtactggtagggttcctctgggtggggctcttgccccaggtgaaattgacatacttgatgatggatataggtggaggaaatatggacagaaagtagttaaaggaaacccaaacccaaggagttactacaaatgcgtagccccgggttgtccagtgagaaaacatgttgagagagcttcacatgacatgaaagctgtgattacgacttatgaagggaaacatatccatgatgtaccattaggacgaggaaactcaagctatagcatgaacagaaattctctaaacaacacctccaacaacaccaacaccagcaatgtaacagctcctgctcctataaggccctcagcactgactaactattctaactcagcaagtttcacaaactcacttcatgacacaaagcaaccaacatctgcaggtcaagaaccttttccaatggacttgctgctgagccctggaagcatcggattttcggctaatgactcattccttcagtcttttttgtcaaagaacttttaaatttggaagcagaagaacactagaacgttacacataaaaatatcactgatatgtttatgtatagcataggggaatagaataagaaaatcatgagcatctactaattttagtgcactaagattagagactagaactacagcattctaaagcttgacaagagttagtccttgtttcaactttcaatttagaacaccagaacgttacaataaaaatatcactgatatgtttatgtatagcatataggaatagaataagaaaatcatgagcatctactaattttagtgtactaagattagagactagaactacagcattctaaagcttcacaagagttgggcattgtttcaactttcaatttagtaataggagagacagaaaacatgttgaccttgaattctattattcttttgttgcttttgttcaattgttttctaagatttatactagttgttgccaatgtctac

SEQ ID NO: 33516 - DNA, 530 bp, Glycine max
  Clone ID: PAT_MRT3847_130269C.1
ctgttccgcagaaaaccctagcccaaccggatcttcacgactagggttcgctctgtgcaaattctctaacttgttctcactttgttgatttcctcttcatttcgtaacattttgtgcattgaattgcagagatggcaaagtcgaagaaccacaccgctcacaaccagtcctacaaggcccataagaatggcatcaaaaagccaaagaggcatcgccacacttccaccaaagggatggatccaaagtttctgaggaaccagaggtacgcgaggaagcataacaagaagagcggtgaaacagccaccgaagaagagtaaagtgccactctcaaatgggcctattaggatttgatttgttatttaagccccatatgttttgtgtcgaatctatctttagtagtatagtcatttttatgagttaacttaatccagagagaatgcagtacttactcttatagcatcgttgttggtttttgttaaggacccttgaaattttatcaatggattattattcagttgtttatgcttttc

SEQ ID NO: 33517 - DNA, 725 bp, Glycine max
  unsure (1)..(725): unsure at all n locations
  Clone ID: PAT_MRT3847_13026C.1
tgcttattatggattggaggattaaccatcagtctacgaaataagtaagtccatgtaagataatggactgcatcttgtttatggcaaatggttaatcctgcttactatggattggaggatgctgaatctgaatttctaaatacatatttgtccagcctagtacagaccacatttgaggatttggaagacagtggatgcatatagatggatgaagacaaggtggagcccatgatgttgggtacaattgcatctcagtattacctcagctacatgactgtatcaatgtttggttcaaacataggtccagatacatcacttgaagtctttttgcatattttatctgctgcttctgaatttgatgaactacctgtgcgtcataatgaggaaaaatacaatgaagcactgtctgagaaagttaaatatccagtggataagaaccgtctagatgaccctcacatcaaagcacttcttctatttcaggctcatttttctcaattggagttaccaattagtgactatgtcacagacttgaaatcagtattagatcagagtatacgcgtaattcaggccatgattgatatttgtgcaaacagtgggtggctttcaagctcaattacttgcatgcatcttctgcaaatggtcatgcagggtttggtggtttgacagggaatcttncttatggatgctgccatgcatgaatacagatctgataagttcactaagca

SEQ ID NO: 33518 - DNA, 707 bp, Glycine max
  Clone ID: PAT_MRT3847_130270C.1
atcagattaatatatgttagtatagttttgaaaatataaatatggctatttaaaaattaagagataaatagataatgtatatattattttaaatttttaatatgattttttttcatgtatgataaatgtgctaaatatttaaaaactaaataaaaataaatacataactgaaaagaagtaattaattatgttgcgttaaacacataatataaaagataataaactaagaaagaatttatgtaatattttctcagatatttttggtattattttttgataaaagccaaagaggcaccgccacacttccaccaaagggatggatccaaagtttctgaggaaccaaaggtacgcgaggaagcataacaagaagagcggtgaaacagccacggaagaagagtaaagtgtcactctcaaatggggctattaggatttgatttgctattcaagtcccatatgttttgtgtcaaatctatatttagtagtatagtcattttgatgagttaatttaatccagagagaatgcagtacttactcttatagcatcgttgctggtttttgtttgttaaagacccttcaaattttatcgatggattattattcagttgtttatgctttcagtaactgctatagtaatgtttattttttagtatgcttatgaatataattatatctgggcagatgtcttggatttgcatataacgtgccca

SEQ ID NO: 33519 - DNA, 490 bp, Glycine max
  Clone ID: PAT_MRT3847_130271C.1
gcagaacttagtcaccattaggcagggtgtttgactgaagaaagaccctttgaaggtaacaagttaagaaaatttcccatcatcatgtacttactattgaacatgaaataatcctaggtgttgggggggaaagtactgtgaataatgtgtgtgaaggactttattccgactaatactctttttgtcgcattatatacccagtaaaaaagaaaagagaacataagcaaaatattggtgcactaatgaggaaaaaaagtatgaaaagagaaacagcatcatatttaaaaaatggacagagatagaaacatagttacagatttaaaaggttctgttgaatattatgcttttttctaatatgtttgaaaatttaaacaaaatggtttttaaggaaaatatacatcaatattgactccaagaaaattaggactcttcaaagactctcataaacacagagaacagggaaaaattagcatgtgatcagttaactatt

SEQ ID NO: 33520 - DNA, 279 bp, Glycine max
  Clone ID: PAT_MRT3847_130272C.1
gattgtatatcatttacaatttcaatctctctctctctctgtctctctctctctatacttagattttgtgaatgggtgaagtggaaaagggatatgtcatcggcgtccataccgttgatgagtggaagctgcacctcgagaatgcgcaatactcgaacacactgattgtggtggattttactgcttcctggtgtggtccatgccgttttattgacccagttctatgcagacagtgcattagtaactcctgatattgattctcctcaaattggatgtgga

SEQ ID NO: 33521 - DNA, 495 bp, Glycine max
  Clone ID: PAT_MRT3847_130273C.1
acggtttatgattctttatatgcagcctttcccatatccatttttcccatcttgaaaatctctcctttctttaaatcccaatattttctgcgcgaattttgctagaaaccgttagtgggtatcctcaaaatactagattttcgattcgtttggtgaacggatttttaggtgtgattattacgtttttttcctgttcaacaagctatggaggtttcggcgattggaagctcacaagcgaagctgggcgcgcctgaattggctccgagggaagtgggatgtcgcaatctttagaacaacggaaaggttgtggttgatcacaatgatactggaatggcagcactttctggttcaagtgagttggaaagtgctgcatctgaggatcgcagtgggaggtgggcaaggacaacctttaaaatcattctttcgtttcacgggggcccatttgatgggtggcaaaagcagccaggcttgaacacccgccaaagcatagttgaa

SEQ ID NO: 33522 - DNA, 623 bp, Glycine max
  Clone ID: PAT_MRT3847_130274C.1
ttaacaaaacaagaaaacttacaaaggtcaatagacttgtcgaaccacatgaaccaaataaaaaaaatctaaaaaattcatacctttaaaattcagacttaaaaagtccacactataccttaaaattttcaaaaaattcagaatacaccaattcacttggaaacccaccaggtcaccaattcactcagactagttcgactggtcgaatcattggtccactaggaaaactgaccctgttatactggatcacaatggttacaaacgatttcagatccaacaaccaatttagaccagctctcaatcggaccagtccaagccagattagattttactgaagaaaagtgtggacaatggtgtccacagtgcaaatatcattttgcttttatccaagtgtctggaaattagttttcccttcattacctttcactttcatctgctagcactaagaaaacaataactgacagtggatatgatactgcaccaaaccatgtgaaaggtaatgtagctcaaccgtcatatttccgccttatctaagccttctgatcttccttctgaccacgttttcttttgagtgatccactcatagcagccttagcttttgcccattccttcaaagatgcagc

SEQ ID NO: 33523 - DNA, 277 bp, Glycine max
  unsure (1)..(277): unsure at all n locations
  Clone ID: PAT_MRT3847_130275C.1
tcggcaagtgtaacccaaaaccctagcggcgcctgctttcttcgttcggcttttgcaggagccatcaagattgagtctcaagtgaagcatgctcttggtggcaaaggtatgggtcggactggatccaaaggacaagtgactcaggttagagtgaagttttggatgatcagaacctcatatcatgaggaatggtaaaggaccagtgagagaaagagacattctcaccctactcgagtctgaaagggaagcangaaggttgccctagagggtatttttt

SEQ ID NO: 33524 - DNA, 474 bp, Glycine max
  Clone ID: PAT_MRT3847_130276C.1
ggaaagaaaaaaaaaacccaaaggttaagggatcccccggggcaagagagccaaattttaaccccccggggggtttttttccccccccccatttttggccccctgcgggggggaacaaaaacaatggggggaatttggaaaaagaattttgaaatggaaattcccttttccccaacccctttttaggccatggcatttaaaaccccgaaaaaaaaaaactccgcccttccgggggggttctgccccacaaaagttttttccctgggggctttccccccagaaacccttggttgtcttggggggcccttttgaaaaccagggctcccaaaaaaaccaattgggggcgggggataacccccaaccgttttccccgtttttggggggaacccattccccggggggggggccattttttttcgacccccccctttccggggggggaaacccccttatggggcgaaaccccccggaccc

SEQ ID NO: 33525 - DNA, 1536 bp, Glycine max
  Clone ID: PAT_MRT3847_130277C.1
aattcggctcgagatcagcagaagtccatcaaaaggatacagaaagctacaagctgtcttaaaaacaataatgttacgtcggacaaaaggctcacttcttgatggggagcctatcatttccttgccacctaaatctgtagagttgaaaaaagtggaattttcacaggaggaacgagatttttattccaaactagaggctgattcccgagcacagtttcaggaatatgctgatgctggaactgtgaagcaaaactatgttaacattttgttgatgcttttgcgccttagacaagcatgcgatcatcctctccttgtcaaacgttacaattctaactctctctggaaatcctcagttgagatggcaaagaagcttcctcaggaaaaacgattatgtcttttaaaatgtttagaggcatcattggccctctgtggtatctgtaatgaccctcctgaagatgctgttgtttcagtttgtggtcatgttttttgtaaccagtgcatttgtgaatatcttactggtgatgacaatcagtgccctgctccaaactgcaaaactcgactaagcacgccctcagtgttttccaaagtcacactgaatagttctttttctgatcagccttgtgataatttgcctgattactctggttgtgaagtggaggaatctgagttttgttctcaggctcagccatatgattcttcaaaaattaaggctgcacttgaggtgttgcagtcgttgtctaaaccacaatgctttgcttcccaaaacaattctgtgcagagcacttctggggaaagtaccgatggccttggtagctcctctagtgctgacagaatgaaatccttgaatgaaattcctgagagtcaaaatgtgcttgaggagagaagctctaataattcagttggtgtaggggagaaagctatagtgttttctcagtggacaaggatgctagatatacttgaagcatgtcttaagaattcgtcgatccagtatagaagactggatggaacaatgtcagtcactgcaagagataaagctgttaaagattttaacactctccctgaggtttcagttatgattatgtctttaaaggctgctagtcttggtctgaatatggttgctgcctgccatgttcttatgctagatctatggtggaatcctacaactgaagatcaggcaatagaccgagcacatcgaattggacaaactcgtcctgtcacagttttacggttaactgttagagatacagttgaagaccgtattttagctctgcaggtgtcagtgggttgttctttttggtggaagcagaagaaacagggtgctgaaaattttgtagcatggcctctgttgacactcgacatgaagattatatgaattgtcttttatagagagatgattcaattgtttaccttgaaattttggtttagttgttaacatttgtataggttgtagagagtagtagcatagacagaaacatagaaattgtgctcattgtaaatattatagatagataatatctcttttccttttccaatctt

SEQ ID NO: 33526 - DNA, 2124 bp, Glycine max
  Clone ID: PAT_MRT3847_130278C.1
cttatgatgatcatgcagtatcaagtaagaaaaggaaatgccctcctagttctaaaagtggaaagaagggattggacagtgcgatgcttgaggctgttgctcgtcctcttgcaaaagtggcttggtttagagttgtcctggatgaggcccagagtataaagaatcacagaactcaagttgcaagggcctgttggggtcttcgagccaagcgtagatggtgcttgtcagggactcctatccagaatgcaattgatgatctctacagttactttagatttttaagatacgatccttatgctgtgtacacatcattctgttccacaattaagatccctatcagcagaagtccatcaaaaggatacagaaagctacaagctgttttaaagacaataatgttacgtcggacaaaagccacacttcttgatggggagcctatcatttccttgccacctaaatctgtggagttgaaaaaagtggaattttcaccggaggaacgagatttctattccagactagaggctgattcgcgagcacagtttcaggaatatgctgatgctggaactgtgaagcaaaactatgttaacattttgttgatgcttttgcgccttagacaagcatgtgatcatcatctccttgttaagcgtgacaattctaagtcgctctctaaatcctcatttgaggctccgcaaaacaattcttcgaaaataaagtctggacttgagatgtttcagttggtgtcttaaccacaatgtggtacttccaaaaacaattctgaacatactgctttttgagatggtgctgatggcctttgtagttagtgtactggtgatgtaatgaatgaagctatagagttttcccaggggacaaacatgaaagatatactaagcacgccttcagtgttttccaaagtcacactgaatagttctttttctgatcaggctggtgataatttgcctgattactctggttgtgaagtggaggaatctgagtttttttctcaggctcagccatgttattcttcaaaaattaaggctgcacttgaggtgttgcagtcgttgtctaaaccacaatgctttgcttcccaaaacaattctgtgcagagcacttctggggaaagtactgatggccttggtagttcatctagtgctgacagaatgaaatccttgaatgaaattcctgagagtcaaaatgtgctttgaggagagaagctctaataattcagttggtgtaggggagaaagctatagtgttttctcagtggacaaggatgctagatatacttgaagcatgtcttaagaattcgtcgatccagtatagaagactggatggaacaatgtcagtcactgcaagagataaagctgttaaagattttaacactctccctgaggtttcagttatgattatgtctttaaaggctgctagtcttggtctgaatatggttgctgcctgccatgttcttatgctagatctatggtggaatcctacaactgaagatcaggcaatagaccgagcacatcgaattggacaaactcgtcctgtcacagttttacggttaactgttagagatacagttgaagaccgtattttagctctgcagcaaaaaaagcgaaaaatggttgcgtctgcctttggagaggatggaactggtggttgtcaaagtcgccttacagtggatgatctaaaatacttgtttatgatgtgattagacatatatccatacagatatataattttaattttttggattggtgattttttttttctgggagcaggtgtcagtgggttgttcttttggggggaagcagaagaaacagggtgctgaaaattttgtagcatggcctctgttgacactcgacatgaagattatatgaattgtcttttatagagagatgattcaattgtttaccttgaaattttggtttagttgttaacatttgtataggttgtagagagtagtagcatagacagaaacatagaaattgtgctcattgtaaatattatagatagataatatctcttttccttttccaatcttaatctatttcgtttcttttaattttcaggtggttttgacttttcattttaaagtgaaccttctgataataaagtgcacttgttgaatttc

SEQ ID NO: 33527 - DNA, 961 bp, Glycine max
  Clone ID: PAT_MRT3847_130279C.1
gctgttcccgtgggtaaagcagagtccgcatacgcagtttgcattcgtttgaactctgttctgttgcctccacaaaccaaaccaggcccaagagttctcggcgcagtttgccttcgtttgagctctgttctgttctgtgcctccacaaaccaaaccaggcacaagtaatactgtgtaatccaacaaactgaagtatagctaggtgaaaggaagtagtcaagtacaagagaatggcgaagtcattgagatcgaagagggagaagaggctgagggctattcggagggagattgttgaacctttctatgacaagaaagaagctgctaagcttgctgcccaagaggctgcccttgccgcccctaagctggaggttccttcgaaaccaaatactgctatggaagcatccgcttccactgacaacaccaacatggatgtggaggtggctgatggaagccaaagcatggcttccttaaagcctgttggtggaatagggaagaaatccaaaaagaagttgaaaatagctaaaaacaaacgccgtggtaatggaaagcacaggagaacccgtaagatatgactccaagtaaagaatggttctggtatcttgaatcatgaagacagttcaaattttgattaaaaaaaatatatgaagaccttaggttgttgattacaagttgaggaccttttagttttattaactaggcttaactattgaggtacaacacaatttggagaagtggttgatgttgatgattcgttctgaacatgaaggattggatcaccaaacatgtattttgaatgtggaattttgatatggctattttatatctctagttttctcagtttgctcctttatgaaagagaccttgaagaacatgccagccgtccgatctacggtgcgcaagttactttttaaggtagtctatcatcagttgaaatgattagtcactgagttcaatatataat

SEQ ID NO: 33528 - DNA, 514 bp, Glycine max
  unsure (1)..(514): unsure at all n locations
  Clone ID: PAT_MRT3847_13027C.1
gtaggactcggattcggagctgtggatcgccaagtttggccgcatcaacatcctcttagacaatttgacaaggacctttctgcagaagttcactcttaactaatgttttttcactgtattccctagctatatttcagactggtgtgtgacagtctttttttgttcatagatattgcggaagcttgaagaacgtggggctgacctagaccgcttgtatgagatggaggaaaaagacattggggcattaattcgttatgcgcctggaggaaggttggtcaagcaacacctagggtattttccatcacttcagttatcagcaactgtgagtccaattaccagaactgtgttgaaggttgatctggtcattacgcctgttttcatttggaaagatcgttttcatggtactgctcaacgttggtggattttggtagaggattctgagaatgaccacatctaccactctgaactctntacgctgacaaagcgaatggctaggggtgaaccttacaagctt

SEQ ID NO: 33529 - DNA, 414 bp, Glycine max
  unsure (1)..(414): unsure at all n locations
  Clone ID: PAT_MRT3847_130280C.1
gcgtagacatccatcataaacatacacaatattctctttcaaatggctcaccaacaacaaaatcacctaaacgagttgtgtaactacgagagggcgtatgatgtcctccaccnctatctctcttttgcttaaccacttcttaatcctaacttccatataccccgtggcgaactactcttactggaacatatggagtggcgggtacttatcgccacccacatgacaaccgtattctctccctaactattcaccctcatggtttcaatacactactccttattgcactatttgtgctcctcccctgtaatgctctcctactcaatgccattgaaccacttatcgcttccctgtttacccttaaacgaacaataatattgacattaatatgaacactaacatgggtacggatcataa

SEQ ID NO: 33530 - DNA, 540 bp, Glycine max
  Clone ID: PAT_MRT3847_130281C.1
gattaggtggcgagtgaagagaagatcggtgaaggagtgaggtagcaacagcactgccactgccactaccaatagcagaatgggaaccttgggcagagctttctacgccgtcggattttggatccgcgagaccggccaagccatcgatcgcctcggctctcgtctccaaggcaactacctctttcaagaacagctatctaggcatcgacctctgatgaatctgttcgacaaagctccctcggttcacagggatgcatttgtggcccccagtgcctccctcctcggcgatgtccacgttggcccagcttcctccatttggtatggatgcgttctcagaggtttggggaggtaatccggcaaggttcttgagaaagctcacagaagatgaaatgaccttcttctcacaatctgccttaaattattctaatttggctcaggctcattctgctgaaaatgcaaaaggactcgatgagactgaatttgtaaaggttcttcacaagaaatttgctcgtcatggtgacgaatatcattcagtgctag

SEQ ID NO: 33531 - DNA, 1595 bp, Glycine max
  Clone ID: PAT_MRT3847_130282C.1
cggccgctcgagccggccggccgggaaatgtactcagaacggtatctcggctcttgtctcgatgaagaacgtagcgaaatgcgatacttggtgtgaattgcagaatcccgtgaaccatcgagtctttgaacgcaagttgcgcccgaagccattaggccgagggcacgcctgcctgggtgtcacaccaaaattgagcagtgttgtaattgaagagggaactagattaggtggcgagtgaagagaagatcggtgaaggagtgaggtagcaacagcactgccactgccactaccaatagcagaatgggaaccttgggcagagctttctacgccgtcggattttggatccgcgagaccggccaagccatcgatcgcctcggctctcgtctccaaggcaactacctctttcaagaacagctatctaggcatcgacctctgatgaatctgttcgacaaagctccctcggttcacagggatgcatttgtggcccccagtgcctccctcctcggcgatgtccacgttggcccagcttcctccatttggtatggatgcgttctcagaggtgatgttaacagcattactattggatctggaactaatatacaagacaattctcttgttcatgttgccaagtctaatttaagtggaaaagtcttgccaactatcattggagataatgtcactgtaggtcatagtgctgtgttacaaggatgtactgttgaggatgaggcatttattggcatgggtgcaaccttgcttgatggtgtatatgttgagaaacatgccatggttgctgctggagctcttgtcaggcagaatacaaggatcccttatggagaggtttggggaggtaatccggcaaggttcttgagaaagctcacagaagatgaaatgaccttcttctcacaatctgccttaaattattctaatttggctcaggctcattctgctgaaaatgcaaaaggactcgatgagactgaatttgtaaaggttcttcacaagaaatttgctcgtcatggtgacgaatatcattcagtgctaggtggtgttcaagaaactcctacagagcttaaatcttcagataatgttttgctagacaaagttcccaaggcttagtttttattccttcttttatagtgtctttatgtgcgattttccagagaatggctgcttttgtttcctgtaagtttggagagctcacactgttatctctaatatcaacacatgctgcacgagttggcatgtggctttgctcactgtgcccaataagaagccttactttttgtttcttgataatgactacaatggaacagtttggtaatagttcagtcatccagggacacacatctacagttttacagcactgtagttgggcatgtattttaaaataaagaatgtcaattcagatatgccggttgaacctgtattttcatggattatgatatttcttttcttcgtcccatgccagctatacctctgctgtctaggatgttaatcaccactgttttccccttctattggttcaaaggagagaagagtggttatgttatttttgaattgaaacttcaatctcaatatagtattttcatggttttgtt

SEQ ID NO: 33532 - DNA, 384 bp, Glycine max
  Clone ID: PAT_MRT3847_130283C.1
ggtcacgaggaagggcgcacgggctaaccctgacgaaaacgcctttcaattccgataactctcgttgtgccgaaaccctaaccttaaccggattttctcgttggttgggattgaattgacatcggatggaggcgatcgattgcaaaattggttgtatgtaatttagcgttgaacaacgatatctgctgctgtttgctagaagcaagacatctttatacgaagagcttcctgcttctccgacactctacaagaagctccagtgttcctcttcgacaatttgatttcctcctccctctcacgccaaccaactatgacctctctttccccacatggacaacttgattcttgagagacctctccaagaatgtggcaatgatataaatg

SEQ ID NO: 33533 - DNA, 897 bp, Glycine max
  Clone ID: PAT_MRT3847_130284C.1
ccggtccggaattcccggggcgaccacgcgtccgattccatgatggttgcttctctcttctacctttctctttctctttccctcatcctaaccctctcctccgccgcgcaccacaaacccccccactcaccgtccaagccaccggctaaccccgccgtgaccgccgcctccccggcaatcgaacaagcctgcgccgcgacgctcttcccgcagcaatgcgaagcctctctctcccaatcccagaacctccctccgaacccgacccctctccagctcctccagtccgccatcgccctctcctccgataacctcgccaccgcgcagaccatggctaagtccctcctcgacgcctccgccgacagccgcaaccgcaccgtcgccgccgccacctgcatcgagatattagccaattcccatcaccgcatttcccttgcctccgacgcgctcccacgcggcaggaccaaggacgcgcgtgcgtggctgggcgccgcactcgcctaccagtacgactgctggaacagcctaaaatacgccaacgacacccaaatggtcggcaaaacgatgtcgttcatcgataacctcgaaattctctccagcaacgccctcagcatggccttttccttcgatgccttcggaaacgacatcgcttcgtggaagccccccgcgacggagcgcgtcggattctgggggactgtggggtcgggtgggcccgggcccgcgggaggggttccgttgaatttgacgcccgacgttacggtgtgtaagaatggaggggatggctgttataagacggtgcaagaggccgttaacgccgcgccggataacggcaaccgaacgaagaggtttgtgatacacattaaagaaggggtttatcaggagaccgttagggttccgtta

SEQ ID NO: 33534 - DNA, 1367 bp, Glycine max
  Clone ID: PAT_MRT3847_130285C.1
gatataaaataataataaaatgagtgtaaaccgtgaagtgatttctgagattggatgcgagagttctgagaagaaaagagaagatcggtgagtgaggaagcaaatagcaatagcaccgccaccgtcaccactgccactgccactgccactagcaacagcagaatgggaaccttgggcagagttttctacgccgtcggattttggatccgcgagaccggccaagccatcgatcgcctcggctctcgtctccaaggcaactacctctttcaagaacagctgtctaggcatcgacctctgatgaatctgttcgacaaagctccctcggttcacagggatgcatttgtggcccctagtgcctccctcctcggcgatgtccacgttggccccgcttcctccatttggtatggatgcgttctcagaggtgatgttaacagcattactattggatctggaactaatatacaagacaattctcttgttcatgttgccaagtctaatttgagtggaaaagtcttgccaactatcattggagataatgtcactgtaggtcatagtgctgtgttacaaggatgtacagttgaggatgaggcatttattggcatgggtgcaaccttgcttgatggtgtatatgttgagaaacatgccatggttgctgctggagctcttgtcaggcagaatacaaggatcccctatggagaggtttggggaggtaatccggcaaggttcttgaggaagctcacggaagatgaaatgaccttcttctcacaatctgccttaaattattccaatttggctcaggctcatgctgctgaaaatgcaaaaggacttgatgagactgaatttgtaaaagttctttacaagaaatttgctcgtcgtggtgaggaatatcattcagtgctaggtggtgttcaagaaactcctgcagagcttaacgttccggataatgttttgctagacaaagttcccaaggcttaattttttttttctctcttatggtatctttatgtgcgattttccagagaatggctgcttttgtttcctgtaagtttggagagctcccattgttatctcaaatatcaacacatgctgcacgagttggcatgtggctttgctcatctctgtgctcaataagaagccttacttttaattccttgataatgactacagtggaacagtttggtaatagttcagtcatcctgggacatctacagttttacagtactgtagttgggcatgtattttaaaataaacaatatcaattcagatgtgccttgaacctgtattttcatggattatgatatttccttttttggtcacatgtcagttatactgcttttgcaaaataaattcaatactttttttaagac

SEQ ID NO: 33535 - DNA, 368 bp, Glycine max
  Clone ID: PAT_MRT3847_130286C.1
ttttaaaacaaagaataaggggcggggtttacaagagtccaaatgcttatcacactctatacatcccatgtaattatacacccattgcatttaagaagagtccagatatgcttcaatcacagttgttgacccaaccatgcggttctaggaacttttttagcgccaaaagattccccatcgtggtcagaaacttcagcaacaatattaagcaatgaggtttctcatgctagccatcctgtcctatatggcggattgagtgctatacacatgctgacctgttcagctatttcaatgtgatcgtcccaccaattggcaatgaactctttcaaagcacaaggctcttgatttacaaccttatttgccagaac

SEQ ID NO: 33536 - DNA, 372 bp, Glycine max
  Clone ID: PAT_MRT3847_130287C.1
acggctgcgagaagaccaccgaaggggactcaacattcacatatcctttacataggcagggcacacttcagatggtggttgcctgttagatagtgtgctctcaaactgaataacaaaacgaagactctactattgctgctgctcatggctgcaactctcttctgcatgccaatcgtgttctatgcagtgtctaatgtcaacattcaagaccatgtcaccaatattcctgagctggcaaaaggtccaaatctaacgcttttgatatttgtcgatcgttgagagaggtacatggtgaggtgcatttagtactcaaggccaaagatctgcacgagagcttgcagtacatgcatattgaggtgcagatgtgtttct

SEQ ID NO: 33537 - DNA, 473 bp, Glycine max
  unsure (1)..(473): unsure at all n locations
  Clone ID: PAT_MRT3847_130288C.1
ttacaaacaaaannctgannctatttnnnatnanaanggggtgtgtganactganattancattaaatttattctgtacatatttttgatgcagatgttgattttttataccttttccccaagcacaatcaaccggggaaaattgtgtattatttcaaaatattttttttagagatttaacaacctatgggttaattatcttactttaatgtagttagcaaacaccatctgaaacctatgcctaatttgaagctataattatggtgtgtgacatgtgcactaatgatctgcttagaaactcctaaggtattgatccctttgcaattgttataaatacagctgatgccttaatagcgatatagatgtgtttaatgacaccattttgcttgataccaccagcggatgactaaatactctgagaagtgatgtttttaattgccgcctcaaccctggagaaagctgggtgtgcaaaa

SEQ ID NO: 33538 - DNA, 306 bp, Glycine max
  Clone ID: PAT_MRT3847_130289C.1
caaaggcggatctaatgtcagcatatgttaactaacaactatgcaactagtacaatcacatttatcatgacttaaggaatattaaacatactacactactatgactagaaacctaactgcgcattgactaactacaacgcttctcgaaaccacctccgcgatcgcctggtagaactatgctaggctgactcatgacctacccgcgtccaagattgatgatcaggtttaggaaatcgcgtgacatatcgattgggctcaccagagtgtaacaaggcacctattgaacgggaacaggttaatgaggat

SEQ ID NO: 33539 - DNA, 129 bp, Glycine max
  Clone ID: PAT_MRT3847_13028C.1
gggtcgagccacgcgtccaaacatacatgctgatccttgtcttaattttgcagttgtactctccctcctcaattgacaatcaatattaagtgcctatttattgagactattctgggtactggggacagt

SEQ ID NO: 33540 - DNA, 509 bp, Glycine max
  unsure (1)..(509): unsure at all n locations
  Clone ID: PAT_MRT3847_130290C.1
ggctcgaggtgatggagatggatcagctaaggagagtggcagagtgcagaactctagggttagagtagcttccataacttgcatacaggatctttgtcaagctgattctaaatctttatctatgcaatggtccttgcttttgccaactagtgatgtactacaaccaaggatgcatgatgcaactttaatgacatgcttgctatttgatccttgtttgaagccacgcatggcatctgcatccacgctagtggccatgttggatggtctctcttccattttcctgcaagtagctgaatataaggaatctaataaatttggatcttttatggcactttcaagctcccttgggaagattttaatggaactccatagaggtcttctttacctaatagagcatgaagctcacagtaaattgctgactttgttattcaagattctcagacttttgatactatctacaccatattcaagaatgcctncaaatttgttgcctatcgttgttacatcta

SEQ ID NO: 33541 - DNA, 555 bp, Glycine max
  Clone ID: PAT_MRT3847_130291C.1
ggctcgaggcacttgcaatcctgggccacagatcaacacactccttcccaaaaggaccagtgatagctgaacctttaattacacccatgatattcactaccacaccagcataaaagacggtctaccaaacacacctgtgctgacacaaccatcattcaatcaccattcagtgtttggaagcacttcagtttttgcagtcttggactaataatacattgtgacttgaagccggagaatattttggttaaaagctatagcagagatgtgaggttaaggtcgttgatctgggaagtagctattttgagacagagcacctttgctcgtatgttcagtccaagtcttatcatgctcctataggacaagaaggttattttgtggcttctatatgacaagaagattgatatttggtcacttggatgcatcttggcagaactttatacttataatgttgtataaattatttattttatattataatcattttacaaaattatttgagcatatatatatatatatatatatatatatatatatatatatatatatttctttatt

SEQ ID NO: 33542 - DNA, 616 bp, Glycine max
  unsure (1)..(616): unsure at all n locations
  Clone ID: PAT_MRT3847_130292C.1
gcagcataaaattgaattttaatataatagtaacgtggcaattacaattttacattgacataatataactctctttacagtagtgaagtttgttatacttcctcgcatttttttagcccaacagcaaggagtcaatttgatcccataggcttctccacagtaatgaatgtaaagcatggatatgtaatctgctacaaaattgcatttgaggcaacaaacctacaaaattacatatttcaatcagaaaatcaagccattcagatcaccttaaaccaattatcttaattacataagaagaatcatgatcctatgcttgaggtgcttggtaagccttgcatgcattagttaacccgaaaattaatgtagccaaggaggatcaactgaaaatcatataactaaccctctgataacgagttcctgactgttgaagctactatttctaatttactaaataatttatctcgtttagttaatagccactatttttcttccctcatttttcttttctctacaaattcgatcttattcttttgtatttttgcctccagctcataaagtaaaccagacggacggngaggtgctctgctggcattttcagcttctcacactcaatctc

SEQ ID NO: 33543 - DNA, 151 bp, Glycine max
  Clone ID: PAT_MRT3847_130293C.1
attatagatttagttagcatagtgcttttgagatatttttctttgccgggggccaaaggggtgaatcccggggtagagaggacagacccccgaaaattgggtttacaaggctcaataaccaaaacaaaatggcccattggaaaatgggaga

SEQ ID NO: 33544 - DNA, 212 bp, Glycine max
  unsure (1)..(212): unsure at all n locations
  Clone ID: PAT_MRT3847_130294C.1
agaacctatagcgtgcttcatgtagtactaactttaagtttacatattaaaattaccatttattgtactcaaaaaaaaatgcaaacttaactgttactatccaaacaatctangtcaaactgataaaacccaaagggccaaatatgattccctgcctaaagccaccaggcacttttgtcctcgccccttgaaacatgtttatgggggaaaaa

SEQ ID NO: 33545 - DNA, 296 bp, Glycine max
  unsure (1)..(296): unsure at all n locations
  Clone ID: PAT_MRT3847_130295C.1
ggctcgagctcagagctgttatttttgtctattgagtgattgcggaatgtggtgctttcgtttcatcatggcaagtgattggcactatgtgacctggcaaggtgaatgcttgacatagggctaccatgaccacttcntcggaccacatgctctaaaccaagtgatgtcacaatgaggttacacgtacagatggcgccctctgatgacttgataaacacgaatcttatcattatacataacggagaagtccatggtagcctcctagacacagtgagagacctagatctgttgtttca

SEQ ID NO: 33546 - DNA, 111 bp, Glycine max
  Clone ID: PAT_MRT3847_130296C.1
ctggccatgatcatcaggcactatgagaatctgcagacacaggagaggaatggatctcctgcgcatattattcccgagattgctcagttattgcagttccacacaacatac

SEQ ID NO: 33547 - DNA, 1177 bp, Glycine max
  unsure (1)..(1177): unsure at all n locations
  Clone ID: PAT_MRT3847_130297C.1
ggctcgaggtgcgccaccattccattccattccagcataatacagtgtgtacagaataaatcagtaaaatacaacatacagtatggctgagagaacacgacagatcgttggtgtggaacgtgacaatggtggcgacgaacgtgaaggcagaaaccatgtctctgatggacaagcgcagcgccttggaggctgagatgaactccatcatcgcccgcctctcccagcccggcgctcctggcctctccggaaatctcgtcgactctgagggttttccccgttccgatatcgacatccccgttgttcgagccgaacgacgtcgcctggcagagctgcgcagtgaccacaacgaagtaactgagaaaattaacctaaatattcagattctccattcggcaagactcggaaataggtcattcaagaattcagcgatgaatactcaggtctcatcaaatatggacactgttgcatcaacaccgtcacaaaatgtccttctgatacgatctcccaactctatggatgtgaacgtgttgattagtagaccatttgcaatggtagacgagatagcagatgcatcaccagcagtagaggatggtttacaacttggggatcaaattttgaaatttggcaatgtggaagcaggtgataatttgctccaaaggctttcttccgaggctcagtcaaatctgggttgtgcagtaccagttgttattatgaggcaaggcacagtaatcaacttaactattacacctagaccttggcaagctagaggactattgggatgtcattttcggatcttgtaggtgccatgaactaatttttcacatgatggtggtcacggtttttccttttgatgcatttcccaccctgagttctttaccttatgatattcatcttggcaagactccatatatgtaataaataattacattacagccgacctttgattgtggtgcactttctttgactcaataacgtgttactctttttatgatcaatgtgttacgctttttatgaaccactctcttttaaaacgcaaaaaaaatttagaaatcataatggtaaatttatgtcaagattccttgcatatgaactgcattcataagcttatgtagctttctcgagacagaaagtgatgggctcgggcacatannngttnnngatcatttcatgcacgana

SEQ ID NO: 33548 - DNA, 369 bp, Glycine max
  unsure (1)..(369): unsure at all n locations
  Clone ID: PAT_MRT3847_130298C.1
cccacgcgtccgctcactgcatctatcctcgtaaaacaaaacaacctaagttaaaccttcggacgtgctttcaccatgtcctggttcagacacctctccaccaagttttccgccatcaccaccacaagcacgcaccgcttaagtcttctgccccggtttagcacctcgaccgctccggttcggcatgcgggcctggagcccactcaggcccacgagaagcccacggtggtggttctgggctccgggtgggccgggtgccgcctcatgaangggctcgacactcaaatctacgacgtcgtttgcgtgtccccgcgcaatcacatggtcttcacgcctctcttggcttccacgtgcgtcggaactctcgag

SEQ ID NO: 33549 - DNA, 1091 bp, Glycine max
  Clone ID: PAT_MRT3847_130299C.1
tggatcctctagagcggccgcttttttttttttttttttttttttttttttcagataaaattgatacaattcttggaccaactaataatatctttagataactgaacatgctggtacaatgagacaaccatcactgatttccctgtgtcataaaatgcttaattaatatctgaaatgatattaatatcaactacaccttaaaatattctacatacaactgaaatttaaatgaaacatatgaaatgatattaatgaagataaaagagcaacaaatagttcactggctgtgtatcatcgcttgctggatatgctgaatgagctaactttcattggggtagctatgaccaatggagcctcaggagaatcagtgactgcaaacttgtcatgcataaatcggctctcaacaatggaatcatccctaaggactatcttgtagcagaagcagctctttagaccctgttggttacggtagcactcatgagaaccatccttgacttgttggaagttccatatcacactgaacttccccaccgccggctactatatgtcgctcctgtttcccattctctgtcacccacgaaaactgagcattgcggaacttattattttgctccatccagatgtgagtcaagagggatgagtttgagcaacctacctggggccagcattccccccccccgtccggcaaacccagtcttcgtcgttccatctttgtcagtatagagggtacagataagaatcaagtaggaatcagtagtacccacaatccactttccatcaaaggttacatccacatgagtaaccggcgatccaaggccaggaaatgccgtcttcgcctgcctcatcgtgttcaccgaatacagccttatcttcccatccaaagaccccacaacaatggacccatcaccagtagtggcaaagcactggaagttagtccccctcgagaactgatgcccttgtgcccaattcaacacgggggcattggaatcagccaagttctgaaccatcccattacgatccctcatatcccacctacaaagcctgttatcatccaaccctagaaaagttgacccagaaggatccaactgagc

SEQ ID NO: 33550 - DNA, 199 bp, Glycine max
  Clone ID: PAT_MRT3847_1302C.1
ggagtagcgatggagaagatgatcggttagctacagtcaattgtccttcccttcgtttccattattctgatgcttccgcgagtttagagggcaagactcttctccgtgcgcgacgtgtactgcgccatcttcggtcaacgggcataatgcccccatttttggacggtgcatccacttccgatgcgagtcactgtggggg

SEQ ID NO: 33551 - DNA, 443 bp, Glycine max
  Clone ID: PAT_MRT3847_130300C.1
ctcgagccgttccaatctcaattgacatggctatttatgtaccaagattttgtggcagttcgcgccatgccttatcatgtcaaaacattctatacaactgcatgaacaacagggatgaagtatgttcatgcatgacggcttaagaggatatccatcacgttccaccattcttcctctacaatttttttcacagcagctgcatcgcggaattttatgtagagtcagcaaaggtgttcatctcagtgtgataagtgtttccttttaagcaagccattgtatgggtaatgaagacagaaacctgtagtcttattacccatgcttgaaatatatcataatccacaattttacctcaaaaaatgaaacatggatagagataaaaaaaggtggatttccatttaatataaaggatatcagtgttatttttttatgaaatgtactttttt

SEQ ID NO: 33552 - DNA, 437 bp, Glycine max
  Clone ID: PAT_MRT3847_130301C.1
tccaaaatctatagcaacacctttctccgtttatttattaaaacccctacacaaacacactcatcttaagctcaagttcagagtgtgagcaaaatgaaactgtgtttacttttggtgttgttgttggtcacattcacagtggccttatctgggaatgtcagctacgacggtcgctcgcttctcattgatggccaacgcaagcttcttatctctgcttccattcattacccacgcagcgttcccgcggtcacactccactgttgccattttcttttatttgtctgatgtgggactttgtagttctctaacaaataatgtgttgtttttttgtggcagatgtggcctggtctcgttcaaacagccaaggaaggaggggtggatgtgattgaaacctatgttttttggaatggccatgagctttctccaggcaacgtgag

SEQ ID NO: 33553 - DNA, 124 bp, Glycine max
  unsure (1)..(124): unsure at all n locations
  Clone ID: PAT_MRT3847_130302C.1
acacaatcgnccttcagccagtganttattggaccaccnttttgtaaaatatgctgcacntttagaaagacctnntctggcgtcctgagtctccttcagacccaggcannatcagggatcacac

SEQ ID NO: 33554 - DNA, 317 bp, Glycine max
  Clone ID: PAT_MRT3847_130303C.1
aggctctagcctacattcaggatatatgattgacggaagagttcaattaaatgagtttaaccatgagggatctggggatttcttttctgaggttggtaactagacctgatgcatatagtgaatatattttaggatggctgataaatggatcatttggactgatggctgtgatatatgatgatgttaagtggtatcaaaggatctcaataaataggattaaagttgtagtaggagaaaagaagaaagtttagaaaaagtttaaagtatcagtaatcggagcatttgtgggtggaagattttaattatagggaacagtc

SEQ ID NO: 33555 - DNA, 256 bp, Glycine max
  unsure (1)..(256): unsure at all n locations
  Clone ID: PAT_MRT3847_130304C.1
gtctncaactaatcatacagatccgntaatcataatcatatcnatagctaattaacttaattattttcatccctcnactcttncttctctcctcnaaactcncttttccantcntgcttccnttgtggggtgtttgagttttctttccttcaatttaattgaaagatggcntgcttgggancncgctcgggagggaantccanngggnaaaaaaaatgggcggccgcaantgtgggggcaaaccctnanaaaaaaa

SEQ ID NO: 33556 - DNA, 1231 bp, Glycine max
  Clone ID: PAT_MRT3847_130305C.1
taataacttagaccctgcaaataagataggtgaaggaggatttgggcctgtatacaagggtgtgttgtcagatggtcatgtgattgctgttaagcagctctcctccaaatcgaaacaagggaaccgtgaatttgtcaatgaaattggaatgatatctgctttgcagcatccaaatctggtgaagctttatggctgttgcattgaaggaaaccagttgctactaatatatgaatacatggagaacaacagtcttgctcatgcactttttggtgaacaagagcagaagctgcacttggattggcccacaagaatgaagatctgtgtggggatagcaaggggattggcttatcttcatgaggagtcaaggttgaaaatagtacacagggacattaaggcaaccaatgtcttacttgacaaggatctgaatgccaagatctctgactttggtttagctaagcttgatgaagaagagaatactcatatcagtacacgtatagctggaacaattggttacatggctccagaatatgctatgagaggttacttgacggataaagcagatgtatatagctttggagttgtagctttagagattgtcagtggaaaaagcaacacaaaatacaggccaaaggaggagtttgtatatcttctagattgggcatatgttctccaagagcaaggaaaccttctggaattggtggatccaaatcttggttcaaaatactccccagaggaggccatgagaatgctgagcttggcactcttatgtaccaatccatctcccactcttagaccaaccatgtcatctgtagtgagcatgcttgaaggaaaaattccaatccaagcgccgataatcaagcgcagtgagagcaaccaagatgtaagatttaaagccttcgaattgctatcacaagacagccaaactcttgtttcttccgcatactcacaagaaagtatgaagcaaagacacatatcagaagatggaccatgggttgactcctccatatctcttccaagtggagatgattattcttcaaccagtaaacttgtttaagattcacttgatgtgtgacttcattaaaaaaattaaagaggactactaaacgttaaattccagttcttttttgtaggagataaatttgcagcacagagagatagcacctacaatatacttatctaatagcatatactcttcaacgcgttttcaacacattcttttataatctttatt

SEQ ID NO: 33557 - DNA, 2090 bp, Glycine max
  Clone ID: PAT_MRT3847_130306C.1
aagaaataaaatgctttaaatcattttactcaaacttaaagaagtatttttttacaggtcccacaaaaattattttccttcctttctatttatcttcttaaacaaataataaaatttgatatttttatctcatttttcttgttttttttttatgttattccatttcattttcaagaaggaaagtaagattatgtttgattttagaggagagaaatagaataaataaaaataaaaaagagataatttgaaaaataagaaataatgtaaaaataaaatgacatgttatattgtttggttttaagaaaaataggtaagaaatacaacataagtaatattgtaaagttgttggatataaatgagataaggaagaaagaatctagatttttgttctaaaaaaataatttttgttgcctaaatataatctgataattagataatcaaagaaaaaaattcttaaaaaaattaatttcttacaaatttattttgtggcctaaaaaaataattttactacaaccggaaagaaagaaaattgatgttacggatctcacaacttgtaactttactttctctaaaatcatcacaaccaaactcgcatacttcatttccgtccaccggtaattcattccatcttttgcaaaccgaacacagcctagaagacaaatctcattattcccagtatatactaaaattaaaaataaacaaattcttatttgctttttttaaaaaacaacacttgcagttaaaaatgtacataataccttaatttcacactcaacttgatgttgaagaagattcctattatttagtgtaacccaactgtacaaaacagacaagaagaggccttcactctgaaccaaataccatagtcttctctttgtctgagaaaatagttccccccaaaaataaaatgaacaagggtctctcctttgtgctgctgattcttctgatccactacaacaacgttgtcaacgccaacaacaaaaactgtgtcacagaggattgcctcatcggcaacaatgatttggaatcagaattctacttcggttcccatgtggccagaatgctctacgatgtgagccaatctgtgtctggccaaacaggcaattcaaacaacaaagctgttaattgtccacaaagcaatggctaccgaacctgcttgccttccaaaaacggtggtggccctaaccaatgttggggcgattataccaggggtcgagaaagagacgaagggggggccttcactctgaaccaaataccatagtcttctctttgtccgtgacaaaacagttcccacaaaaaaaagaaaaaagaaaaaagaaaagcactaaaaaaaaatgaagaagggtttctcccttgtgctgctgattcttctgatccagtacaacaacgttgtcaacgcctacaacaacaaaaactgtgtcacagaggattgcctcatcggcaacaaggatttggaatcagagttctactttggatcccatgtggccagaatgctctacgatgtgagccaatctgtgagtggcaaaacaggcaataaaaataacaaagctgttaattgtccaaataagcaaggctaccgaagctgcttgccttccaaaaacggtggtggccctaagcaaagttgtggcgattacaccagggtttgctaagaactcgttccaacccttgtgatttcatttctgatttttaagattgtgatatgatggaatcttatttatgtcaatttgtttagtttaatttccatatgttattgttttttttaatattaagtcaggtaccagaaaatttgcatcaattcacactcatgagtcacctgaacaagagctagacccggttttattgtttgtatcactgtatgtaatatttaatgttttcggttcatacttttgttgcggttgtattgttgttgtgtatcatctgtgccattagtttatttgatgttgataagaataattccatgtgagatgggaaataataatatattattgcctgcagaaaaaaaagaaaaaaaaaaaaaaactaaaaaaaaaaaaaaaaaaaaagggcggccgcgactagtgagcatgtgacccggaataaaatccggccgg

SEQ ID NO: 33558 - DNA, 285 bp, Glycine max
  Clone ID: PAT_MRT3847_130307C.1
ccaggcgtgcgaacaggtgtaaaagaggctccgatgggtcaaactgagcaacggttcaatgctgcttactgtttattctatctaccatatatttattttttttttttagtgacacttcgccagaaggtaatatggcccatgaaaaataaatatacacatgtgtatcaagaaaagaagggcactctatcaaggtctgggtccagatcggccttactgtgctaaattcgtgattggagcaggagcctaataggatgggtgccttaaagacctgcaccaagaggaaca

SEQ ID NO: 33559 - DNA, 184 bp, Glycine max
  Clone ID: PAT_MRT3847_130308C.1
ggcatctgcgggtgtatcacctgcttctggggtaagagatgtgaatgcaagttctgttgctgttgaaaggctgcctgattagatgaatggcatgaaaattacggatgaaatggaaatggaatcaactgtcgtacatggaaatgggactgacacaggacatatgattgttactaccattgctggt

SEQ ID NO: 33560 - DNA, 251 bp, Glycine max
  Clone ID: PAT_MRT3847_130309C.1
atatttagggggcagcattccattttcataataaccttcgttagctatctgtgttttttttttaaaatataaaggggaaaaaaaaaacgagaaaacagtgtcataaaaagaggccttccttctcactggggctggggcaaaaacctcaacaacacactcttcaattttgtagggtttgaggttcgctccctttttcttcgccttctccaagggccgataactggctcctgagatccgcgcttctcgctcct

SEQ ID NO: 33561 - DNA, 267 bp, Glycine max
  unsure (1)..(267): unsure at all n locations
  Clone ID: PAT_MRT3847_13030C.1
agaaagacaatgaaattataatatcaatagactcatgtaacacttgattcacaaatggctatattctttagtatagacggttagggagtgaactataagcgtaaagaatgacttctgatggggccggggggggggggganctcactangcatctcacagctcgatatctaagatccaggggtgaaggctccatttttgaccgccccccaaacaaatgggggatgtaatctatacaaacaatggtgacagggaggcaacataaacaac

SEQ ID NO: 33562 - DNA, 260 bp, Glycine max
  unsure (1)..(260): unsure at all n locations
  Clone ID: PAT_MRT3847_130310C.1
atnaagcttcacttgggntatggacctcaaccangccctatgntgaatcnttttggngtcacaggggtnantgcacgtgcctagggatgctnnttatgtanaatggccaagtgctgcagtantgtatgcacattccatatgaccantttanacaagctgttttccaggntgccatttgggtcaangcnccagnnagtttcgattatncncaggaattactagatggacgtttggnganagnngttccccatttgggtgcc

SEQ ID NO: 33563 - DNA, 998 bp, Glycine max
  unsure (1)..(998): unsure at all n locations
  Clone ID: PAT_MRT3847_130311C.1
gacccaggagcacgaaaagtcatttaaattctgcaagcttcagcagaatctagctccaaacaatggtctcggcagcaccaaatgcaatgtattcccagttgtccaaccttagtttctcccatcacttcttagtgatgttgttatccattttcttcatcttcattatcccttgtgctttccctctatcctttttttttttagtttcgatccaaatgacaagagcataatatatgagggagcaccaactatccaactcacacgaaaccaaatggacaagggcatgattggaagcattggtcgagccacatattaccaacctatgcagctgtgggacaaagccacagggaatctcacagatttcacaacccatttttcttttgtcatagattcacagaaccgaagtaaatatggagatgggattgcattcttccttgcccctgctggttcaaagattcctaatgccacaaaaggagcttctatgggtcttacacttgataaccaacaattgaactccacagacaattcatttgttgctgtggagtttgatatctatcagaatggctgggatccaccccatgaacatgttggaatagacatcaactctatgagatctgcttctaatgtaacatggttggctgatatcaaggaagggaaactcaacgaggcttggatcagttacaactccagttcattgaatttgagtgttgtgttcacaggttttaacaatgataccgatcataccattcagcagcaacatctatctgctatagttgatctgagacttcatttaccagaattggtttcttttggcttctcagctgccacgggaaatgcaactgctatacatagtctctattcatgggattttacctcaactttggcagcacaagaaaacataacaaagggagcagacccagttgcaaggtctccaacctccaatatagctcccagtcagaagaaaaagaacangacaggcttggcagtgggattgagtattg

SEQ ID NO: 33564 - DNA, 156 bp, Glycine max
  unsure (1)..(156): unsure at all n locations
  Clone ID: PAT_MRT3847_130312C.1
aanctangnattnnaacgnaagctcggaattcggctcgagngggaacgntgtggctanaacnnanacnggggntnaccatnntgatgtcactatgcacgnnnacccnnngggatatcgatgatgggganaagntcaaagantggantangaggann

SEQ ID NO: 33565 - DNA, 536 bp, Glycine max
  Clone ID: PAT_MRT3847_130313C.1
ttcgcgaaaacctgaatttccctgttttctctagtctcttcactatttaaaccaaagcaccagcgagtccagagagagaaattaagggaaaaatatatataagttatggctttgtgttcagtttttctcaatctacatcttctgctttttgtttgtttgaccaaagaagctttaggtgtggcaaagccttcagtagctagttaccttagtcaggagatactggcagagcaagaagctgatagagtgcatggattacctgggcagcctccggtgaagttcaaacaatatgctggttatatcactgtcaatgaaactcatggaagagcactgttctattggtttttcgaggccactcacaaaccagaacaaaaacccgttctcttatggctcaatggaggtatttttttttttttactaactcagctcttcatgtatatatttatattgcaatcgtttttatttagtgttcactctcatgactaatacatgtatctgggtaaataatgtcataatgcatagttggtatgagtcttatc

SEQ ID NO: 33566 - DNA, 247 bp, Glycine max
  Clone ID: PAT_MRT3847_130314C.1
tagtatgacccgtttacagacaacagcccatatttgaggtaagtgtacacgtcattccaggagctagcaacatttatggctcacggtaacactgctcagctctcgaatgaaggcggtgatccagtgctggcgcgcctatgctggaccatcgcatcgtacgagatgccgcacgataacacgttcttaagaatcgtggaaaaacttctggaaatagaccccaccggtgcaattgtggccataaggaaca

SEQ ID NO: 33567 - DNA, 209 bp, Glycine max
  Clone ID: PAT_MRT3847_130315C.1
ctagactacggtaggctcttacatgcttatgcattattgctctgactatactactaagcttattaatcctcatcatcatatatagcatgacttcattattacagttgcttatgctcatggagctatataccctattatacattatcatcctcaactgtatgaagatcttgtcttagcaagagtgtatgaccattaacaacctatcatat

SEQ ID NO: 33568 - DNA, 530 bp, Glycine max
  Clone ID: PAT_MRT3847_130316C.1
cacgcgttcgcttgacttttgtaattcatcatgcacaacgataccgaaaacaagggtggcagctctaaagttcaaggacaccatcgaggctgtcttgagattataggaaaacaaagggcatcaacaatactgcctctataacccacgaagaagccttgtccacctattaaatataagtgactgcctctcaccttggacttaaccttcacctcctctgacaagaactgatccccactgaacatagtctttaacttttcataagatgaccaatgataacattgggctatcctgaatgataagaacattgaccatagctgcctgatgaaacaagcggggggggaagaggaggtgataactgtggtctcatcggtgatgacgcgccctgccctgttgatacatatgatggtggagaaacccctcattttgctgaaaagagggctgttctaacacaccgattactgtgaaactacggaccgctcgggaccacatacgttgccacgatgtacgacccctccttattcactccctga

SEQ ID NO: 33569 - DNA, 817 bp, Glycine max
  Clone ID: PAT_MRT3847_130317C.1
ggaaagatgcatcggagtagccttagtaaaagaactgtttgggcagtcatccggttacatgcccagggatatatttgcttgaatttctgatgctgatgcaaacttatttctcagaaacaatgctaaagaatgcaaacataaatatgctgatgcaggtatttacgctttttgtaagaatgcttggttcaacaatgaaaggaacgtatttttgagagcaaatggagagtctgacttgctggatgattaagaacgttctattattggagaagcaaatgaattgggtcaggtataagttgcgctggtgaaatggctcgctatgggtgggctcaacgatgtcaaaaaactgagtcagcatattgaaggcacctctaaatgagttttggtattatttgtttctggattacgtatgcgatctggtgttcttttgtatggtccccctggaactggcaaaacattattagcaaaagctgttgctacagagtgctccttaaattttcttagtgtgaaaggtcctgaactgatcaacatgtacattggagagtctgaaaagaatgttcgagacattttccagaaggccagatcagcacgtccatgtgtcatcttctttgatgagcttgattctcttgcaccagctcgaggtgcctctggagattctgggggtgttatggacagagtggtttctcagatgcttgcagagattgatgggttaagtgattccacacaggatctgtttattataggtgcaagtaatagaccagatttgatagacccagcacttctgcgccctggtcgatttgacaaactgctatatgtcgga

SEQ ID NO: 33570 - DNA, 315 bp, Glycine max
  Clone ID: PAT_MRT3847_130318C.1
aaaacacaagaggaggcaaacggaaggccatggaagaggaagaggaatgaaaaacctcgacgacaacagccatcgggaggaacagcgacgtgtcgtcggagaaaacaacggaggaaggagaaaacgagggggaaagagccctaccatggaccctagcaagccatggaaactttggaagagggtctttcccaccaaggagaggcatctcgaacttttataaaaggcaaggctaagacattcacaaccctggctgaagcaagaggcctccccatcagggaaagacatagcaaaagcccaagagaaatgcatacacca

SEQ ID NO: 33571 - DNA, 353 bp, Glycine max
  Clone ID: PAT_MRT3847_130319C.1
gatattggtttttgttttttttttttttttttttggcatgtagaagctgccatcacataccataacacgcaacaaaaaacgatatagtccagaacattgagaatataaagaaaaacatttaaactaatccgactcagacagattaaagcacgaacccggaccagaaatgaccgcagatctcagaagccttttaaataaaaatgccctaaaaaaatgagggggagagaacgacggctacaactgcctactaggacgtctacttggcgatcttgggaacaagctgggtcttgacgaccagaggctggttttgagggaaaacgcttttacccaaaaccttaaagtagccgaactgg

SEQ ID NO: 33572 - DNA, 229 bp, Glycine max
  Clone ID: PAT_MRT3847_13031C.1
ttattctccgcaagcacaggaagccggacgttagaaccgggtacataagcaatgggaggttgattatgaaaatctgggacttgcttactacttatgtgggaacgaacccatacggcatggaatgtactgctctgtgctgtccacaaccgaggtgagtcatcgattttctcgctctgagactatgctgcgtgaacactggttctgattccaaacagactatgagtcagat

SEQ ID NO: 33573 - DNA, 393 bp, Glycine max
  Clone ID: PAT_MRT3847_130320C.1
agcaatggaggaacccaagcactttaattttagagcgacggtagtcattccccacatacaaattgcctccgcggcaaaaagcctaaacgaaaaacacaatattcccccaaacaaactacagaagaggtgggctataaggcactaccaaaggggccctctccgtttaaacacagaaaacaaaagattctcaaccttccctaaccaaagaaaagaaaaagtgccgatcaaaagggagacaatcatctaccaacgtatattaattccacacaccccaagcgtatcttaagcacacccttttggtgaaccccagggataacgcttttggggggcccaaaaaaatgttctccaggagggggtttgggggtttccccccccccaacacttgcgaacttt

SEQ ID NO: 33574 - DNA, 474 bp, Glycine max
  Clone ID: PAT_MRT3847_130321C.1
cggcaggaccgggcccggaattccggggcggaccacacccgtccgaaataaacgaggattctaataatctccctaatttttcctctcctctctttctccgaggcttttgtcctaaattttggggtggcaaataatgcaggtccaattggacctgcaggatattcttgcaggaggccttaaagggtaacagcaaatgattttgttaacaggggcctgggcattgttggtaccacctaaaacattataaaagttgcagggccccttgcattggaggctaagttggttggtttaaacggtttgggcatttccgaagaacgtttggactaaccaccagggggggtattacaatttaacactaatccggaagcttaagaataactggtggtaattgaagggggcatcttagctggattaattcttttggccaccattgtttacttaaaaactcttaagaagggggatgttatggcattc

SEQ ID NO: 33575 - DNA, 376 bp, Glycine max
  Clone ID: PAT_MRT3847_130322C.1
ttatacgcaatttaagaacactccatacccgaattcacctttttgccgtggtgttcttgaatctaatatcaagatttctgatgttggtatgaataataagggtgttgatgagtatcctttctgtgttcatctggttatttgggataaggataatgtttctattgaggtcctataagctgttcacatagcttgcaacatgtacatggactaattagctggaaaaggatgcttgaactatatagtcagggtgcacccatataatgttcttatgatcaactagatgctttcgtattctagtgctaatatgctccaaactgtaatgaaaggtgcttttagaaatgcacaagatgcttatactacaaatgctgttaaacaa

SEQ ID NO: 33576 - DNA, 546 bp, Glycine max
  Clone ID: PAT_MRT3847_130323C.1
gtggcatgctattaaatattctttaattttgactttctatgaaatgccttttgtatttgtagtgttgtaacccggtagtaccgttggtatttttgtttagtacatatctatcttaagttaccagttaccatgtttaaattaatgtttggtaaaatttattcgatttttgttgcaggttcagctcacaattcaggccattcaaatgaatcagataagtccagagagcatgtgtgatacactttaagatggaaatgttattatttgtggtttgagttgtgtttatgtaaagaattttgatgtattatttggtaatgtttagtttggacatatgttgtaattgtattttaaaactcttgccttgagtcacaacaaatttcttaccacgtaatctttgattaaagaccaagactttggttgaattctatatttatatgaattttgtatctgtgatcaggtttaatgtgaatgacataaaatcatatctgctgtaattcttatctgcagaagtaccaatttaattgtgacaagatgttcatgtttaataat

SEQ ID NO: 33577 - DNA, 112 bp, Glycine max
  Clone ID: PAT_MRT3847_130324C.1
catggatagcattagtctagggaacgtgccaaaatgaaacctgtatcgtgagatagacgcctctccatactgtgttaagctcaggcagaactatccaccaaaatgcctcaaa

SEQ ID NO: 33578 - DNA, 424 bp, Glycine max
  Clone ID: PAT_MRT3847_130325C.1
cgctttagggggctcgttcaacagctggaggagtatcacaaggcgctggcatcagcagctctgagaatagctaggcctacttccatctctgtcgttctgcagggggcctatctcctaggcccgcgttgaacgagaaagaaaggaacccgacgccacaggaggacagtggactgcatgattgacactttgagatgctcagtcttcatactacagatttgacactacaagacccagatgaataggaaaagggtcatgcgatacttggcctaacttaccattaataaggatcctattgtctccatcatgataaaacagaatactcgataaatgcatgctacatctcgtgaaaaatcttggaaacctttgagatgcatgcatgcacctaagtaatgttgcctgctgcttatcacgagggcaccacaaa

SEQ ID NO: 33579 - DNA, 382 bp, Glycine max
  Clone ID: PAT_MRT3847_130326C.1
ggggatccccaaaagcggaatttttttttccccctttttaaaccctaaaattccacaccaaaaaggacctttgggaacgaggttttaaaaaggcaaaaattaagggggggattttaaaggggggggctggacaaaccaagggttaaaattttaggggttaaattaaacttcataaccccaaaaccccctgggggggaacccttttcccgggggccgaattccgggtttaaaaacccgggcatggaaagggaaaacctttttttaggggcaccgaaattcaatttacggggcggggttttacaaacgcgggaggggaaaaaccctgggggtccccaaaaaaaacgccttggaaaacaacccccttttaccagaggggggaaaa

SEQ ID NO: 33580 - DNA, 638 bp, Glycine max
  Clone ID: PAT_MRT3847_130327C.1
cccacgcgtccgtttacgcgttcgctctgtttgctcttcacttttaccttcatgaacgcgtacagtcattgtcaaaggtctccttgtcgtacgacgatgctacaaaatcattttgttttccaatatctgtttttttcttgcattatttattttggatcttaggagtagataagcataataggttatttgaagatttggtgtaatggggttcattcagctgctttctgttgcctctttcccggtgataaaagtgttgctggttactgcaattggcttgtttcttgcactggatgacatatcaatattgggagaagattcaaggaagaaagtgaatcagcttgtgttttatgtgtttaatccgtcgcttgtgggtagcaatctggccaaaacgataacttttgagagtattgttcagttgtggttcatgccgttgaatattctttgcacattcatactaggctcggccttgggatggattttgattaaaatgacaaggcctccgaaacacatggaaggtttaatcttgggttgctgttctgctggaaatttagggaacttgcttatagtcattatttcagctatatgtaaagagagtggcaatccttttggagactctgatgtctgctatcaatatggga

SEQ ID NO: 33581 - DNA, 1415 bp, Glycine max
  Clone ID: PAT_MRT3847_130328C.1
acggctgcgagaagacgacagaagggggcaatgagtatcttgtgattccggaacagctctgtttgctcttcacttttaccttcatgaacgcgtacagtcattgtcaaaggtctccttgtcgtacgacgatgctacaaaatcattttgttttccaatatctgtttttttcttgcattatttattttggatcttaggagtagtaagtaaacacagcacctcaggttttttattttggcagatatacatgttttttgttacacaaatattttgtatctttgcttgaagcgataagcataataggttatttgaagatttggtgtaatggggttcattcagctgctttctgttgcctctttcccggtgataaaagtgttgctggttactgcaattggcttgtttcttgcactggatgacatatcaatattgggagaagattcaaggaagagagtgaatcagcttgtgttttatgtgtttaatccggcgcttgtgggtagcaatctggccaaaacgataacttttgagagtattgttcagttgtggttcatgccgttgaatattctttgcacattcatactaggctcggccttgggatggattttgattaaaatgacaaggcctccgaaacacatggaaggtttaatcttgggttgctgttctgctggaaatttagggaacttgcttatagtcattattccagctatatgtaaagagagtggcaatccttttggagactctgatgtctgctatcaatatgggatggcttatgctgcactttctatggcgattggagcagtttttatatggtcatatgtttacaacatcatgaggatttcctctagtagaattcaaaaagaagacaatacaggcaatggcattaacatattgaaggcttcagcggaagcatcagagtcacgcacagacaatttttcagaaacacttaatcctacaaaagacgccacggatgatgcatataccttattgcttcctcatgcaaaaccagaggaaaaagtttcaatctcaagaaaaattaagcaccacttgggggtgatttcaagcaacttaaatttcaaagccatgtttgcgccatcaacacttggagccattgccggatttatcattggtgtaatctccccaatgcgtaatttcattataggaagtagtgctccgcttcatgtggttgaagaatctgtgttcatgttggggtatgcatctcaaaagttattttaagcagtgaatgtttgaattaaagttgaaagaattgaaaagtatttttgctctagaaataattattttttcatttgatgtattagaattgttttgttatgtattttaacctgactggactttcttaattttaatctaaacatagcataattttctagttacaaaagatgcgaaaccaaaaattttgtcgt

SEQ ID NO: 33582 - DNA, 280 bp, Glycine max
  Clone ID: PAT_MRT3847_130329C.1
aaaaaaaaaaaaaaaaaaaaaaaaattttaaaaaaaaaaaaacaaacaaaaaaaaggggcgcttataaaaaatcccagttaacctacacattcatacaacataaaaaggtctcttcttttaaaacctccattcttccatctgcctcttttctactaacaaccccatctttaaactcccttaatttccccttcttgtccatctttcttcaacttcctactttgaaaactcccttcttacccaaaatcacccttctaaaattccttcccatcttctccactt

SEQ ID NO: 33583 - DNA, 487 bp, Glycine max
  Clone ID: PAT_MRT3847_13032C.1
gccgagtaaaacttttgccaatttcttagtaatatgtcatttgattcgtcattgtcttgaagcaattggatctacaatacatttcccttacatgtagttagggaccttttggttggcttttccaaattcaacttacctgcttcattgtttgatgataaagaaacgtatatagactacttccaaacaaaaatcacgaagacatcgagatggatgattagtgacttctcgacagcaacacttttctggtatgagattgaatgcttttgcatacaacaccccctataaaaatataaaccgaagcatgattatcattgaacctatacatgcaccagtctcgcgtttattgagaaatctttgaggatttccactttgcattcccatttctcccatgcatataccatacacaaagcacaaaagcacaacagaagggtgataataatgagttgtacagcttagtccttgtgaggggaatggtgactatattttt

SEQ ID NO: 33584 - DNA, 165 bp, Glycine max
  Clone ID: PAT_MRT3847_130330C.1
gagacctgaggtcatgcggggctacccgctgagtttaagcatatcaataagcgcgcaataaaaaaaaaaaattataatataaaagcgggcgctctagatgatccaaacttacgtacccgtgcatgcaacgtaatatcttttctatagtgtaacctaaattaaatt

SEQ ID NO: 33585 - DNA, 171 bp, Glycine max
  Clone ID: PAT_MRT3847_130331C.1
tttcccttgtctacccacgcgttctgttcttgacaaaccagtgctcacaggttgggggagctttaaaaccggaatcgggtgcaattctcactcgatctcaagaatctctcaatgtctccctacaactctgtgtacgatcttcttaagggaaagaaaaccactctctgtgct

SEQ ID NO: 33586 - DNA, 476 bp, Glycine max
  Clone ID: PAT_MRT3847_130332C.1
ccacgcgtcctgttcaattggggctctctctctcgccgagctccgcactcttcagggaatttcctcactcagattccagctgaaaattgcgcagtgagttcacttcaaattcagagatgattaattgaagttttttgcaataatagttcaataactgattcctgtctctaattctgaagttattacttttaaaggtttaatggctgtgtcatgacttttgtaactttgcctactgaagtgaaatgatagattttttgaactcttactgggaatttcatccaaaggtaaagtaagcattagatctggaggatcacgtagacattgcaatgacacaatttcagagaagggagatcattctccatgtggatcaagatcgccttcacctttcaaagtggcacggtgtctaagttttattgatagggcttatgctcagccacttccacttactggtctgcatcctttaagtgtaggcccgg

SEQ ID NO: 33587 - DNA, 282 bp, Glycine max
  unsure (1)..(282): unsure at all n locations
  Clone ID: PAT_MRT3847_130333C.1
cttggggttattttcattcctgctgttgcttatnttttactggctgtnttttacctgcntgantctcctaggtggcttgtgagcaaaggccggctactcgaggccgaaagagttctgaaaaggcttcgtggcatcgaagagtttcangggaatggcgttgctggtcagagggtctcagccctgggggtgaagccacatccatagaagannatgtggttgcccccagctagtggagcttcttgttaaccangaagcagancnaagattatataaagttntatg

SEQ ID NO: 33588 - DNA, 236 bp, Glycine max
  Clone ID: PAT_MRT3847_130334C.1
atcccggtcgaccacgcgtcacgccacctacgcttagctccttagtgctgctccttgcagctctaattctatcccctcaagttcttgcaaactatgagaatcccccagtgacaagcctccactgagaaaccaccagtttataagccccagttgagaagcctcctgcctacaaacctccagctaaaaccccccattttataagcctccacagagaagcaccctcgcaccagccctca

SEQ ID NO: 33589 - DNA, 446 bp, Glycine max
  Clone ID: PAT_MRT3847_130335C.1
gtccggttaatttgtgaaactaacaccaccacagggccttaataatggcagttgtttccccaaggggaggccaattaaagtccaccttaattgggacttttgtagttccaaagggcctttttgctttttaacaatttaacctggggccttttaaaaggcaattaagtttaactgttaaggccatccaatcagagaagccaccctataaagggattaagccaataaacggggacccattaattggaggcctggaaaccccagttccatccagccctttgatcgcatggaacttgtccaacctgcccgaatacaaaaccgaagtgggcccactactaaaagggatcgaggggggcctggcccacggataccttttgtggggcccattctggaaggccggcccttttaggaacaccaaaatcgccggccaagcggcttttttggccgcc

SEQ ID NO: 33590 - DNA, 636 bp, Glycine max
  unsure (1)..(636): unsure at all n locations
  Clone ID: PAT_MRT3847_130336C.1
ggctcgaggacaaacaacagagtttatttctttttggttccttggttcacgctggctgcaaggcttgtgtttggtgggagcagcttctcaccgtgacgctgctctacgaagacgacgacaacctcgtgtgacaacatcaaataatgggaaaaggaaacatggaactcgagacaaacaaggtctatgactacgaggatgcacgaggggacgttgaagtcccagataccgctcatcagataagcactgagtccaaggttgagaagctgaatctatggaaatggtaggaagtaggaagaacgcaattaacccatgctttttctttaacaacaaaaaacatgtagaggtcacgggcaaataattgaattttcaaaactacccttttgtttttacctattgattgtctacgagctgagtcaaagtttcgacttgtgtgatacatttatgtctgaattttgactttattcaaccgcctcttacctatgttcaatgtgttcttttcttttgattatgattgaatcgtgcttatgttacaattttattgtactactatttaaatattgaaattgtaaactgagggaaatatacaatttgtatcttgacatagtataaatnaagagcatgttggattctaacatg

SEQ ID NO: 33591 - DNA, 266 bp, Glycine max
  unsure (1)..(266): unsure at all n locations
  Clone ID: PAT_MRT3847_130337C.1
ancaccacantaaagagacacgccatgctgcttagagcattctgtgccggccaatgataatttgatgccgcattttgcattatatctgtcttgaccagatttgataactatggattgtacgttgcaggtactgaatgcgaaattcagacaaggtccttatacaacatcgggagtttaaagacaatgccgttaaagaatctcggccttaacgaaaactactcttgaattgtaaggtgactttcagcgtttatttccgttactacact

SEQ ID NO: 33592 - DNA, 262 bp, Glycine max
  Clone ID: PAT_MRT3847_130338C.1
ttcgtattgtcgcagagatagataaccctagctcaccgattcaatatgcaaatcgtcgttaagaccctcactggtaagaccatcactctcgatgtcgagatgtcatacaccgtagtcaatgtagaggccaaaattcaatactaggaagggattccactatatcagcatcggctcatatatgctggcaagcagcttgaggatggacgtacccttgatgattataacatccaaaaggagtccactctccactttgtttttcgtc

SEQ ID NO: 33593 - DNA, 196 bp, Glycine max
  Clone ID: PAT_MRT3847_130339C.1
gttgagggcttaccatggaacctgtggaaaccgctttggttgggtacaagaacggggaactggccttacatgccaagggttccaaaagctccggaaaggtggttttttgcccccttaccatgaccatccccatggcgaaatctatctcaaattcaaaggtgtgcaaggcggaaaccagggccttaaaggccctaat

SEQ ID NO: 33594 - DNA, 324 bp, Glycine max
  unsure (1)..(324): unsure at all n locations
  Clone ID: PAT_MRT3847_13033C.1
cggccgctcaggcggcgggcgggtgttcctgaatggacgacgcctactcctctcacgaaaaagtctcctcgctgaacgagctgctgccgctgctcgaggcgggtgcagaccggcaagccgctggtcatcgtcgccgaggacgtcaaggcgaacgcttgcgaccctggtcggacgtgcgggtctgaaggtcgcggcgcagtccgggcttcgggatcgccgcaaggcatgctgcaggaatcgcgatcctgaccggcggcccaggnggatctccggagatctcggcatcagctcgagacgtcacgctcacatgcttcgccggggcca

SEQ ID NO: 33595 - DNA, 269 bp, Glycine max
  Clone ID: PAT_MRT3847_130340C.1
catcctctattactctatcctactccattttcactcgccttcctcatttctcacgaacagtttataacaaaaagtgggcaggccaaatattattctgtcaatgcaagcttatcaatcatatacacccaaaagcaagaatagttaatgaacatctaatgctcaatcatcaacaacttctactcctaaacccaatatacccttctatacctcgaataactttcatattgtaatgttatacaatgataaatatctaaatagcatcaattatc

SEQ ID NO: 33596 - DNA, 316 bp, Glycine max
  Clone ID: PAT_MRT3847_130341C.1
ctcgagccgaatcggctcgagacggctgcgagaagacgacagaatggtaagtgaagtcattgctttacacaggttcatacgacgagtatggacctgatgattctgatgagtcattgtttaaagtatatggagctcgcaaaggaaaggatagagcaacaaccactgccattaatggtattgctagactccaagcccttcaacatttgcgaaagttgcttgatgatcccaccaagcttgtgcagttctcatatttacagaatgcaccacacggtgatattgtcctgcaaactttagctgataattattggggaggtcc

SEQ ID NO: 33597 - DNA, 1722 bp, Glycine max
  Clone ID: PAT_MRT3847_130342C.1
ggctcgctcctgggaaaaatgaaagaggtaaatgcattcgaacaagagttgcttgagcatattgacatgataaagcttgcgcgcgaagagaatcatgcggatttggaatcgttggggactcacttcatcttctcctaggaatcattgaaagcattgcttaacatgagaagaaatgcaaaagagaaagagctagaagcattgctttctggggagcaagattcttgttcatgctacattgaggttcaagctggggctgggggtattgagagcatggactgggctgcaatggtcatgtagatgtataagttatgggcacagcgacgtggatataaagtaactgtagtggatgaaatgcctgcgagctaccatcaaagtagatggtgagtttgcatttggatatgccaaagcagaaataggagtgcacaggctcgctccctgagaatacggctgcgagaagacgacagaaaggggcgacagagcatgtcccgtttcctaggaaaatcccttaggactaaggggcccttgtttctgcacaaaattttgggaatctcgtccgagtcgcataacatcctggttttatcaaggtatcgccgccacttttcacattcccttccccacaatacttcaaatttggttccaagtaccgggtctctccaaattcggttctttgcctctgaggccgctgctgccaccactgaaccctcaacctccgatgggctcacggtccaaggaattctggccaataattggaacattctcgacgaaaacgacggcgattggaagagtcatgccaccgccatagctcaatctattcacttgatcaaacgccgtttacattgggaaaaattgaaggtgtggaacgatcaccttttgacagtaataagcaccggcatacttcatttgctgctgtggcagtgattccaattcctggtgatggatctacccatgtacaaattaatgaatctgatcttcgtattgaacgatgtcgtgctggtggccaacatgttaacacaactgagagtgctgtaagaatagttcatattcctacaccaggtactgcaacttgtcagaatgaaagaccgcagcatcagaataaggcttcagcaatggctgtacttcagtcaagattagaccaactggagatggcacgccaggcacagttcaatgcacaacatacacaatctctcaccgacataacatggggcagtcagattcgtagttatgttctccatccttaccgtatggtgaaagatcttagaactaactatgaggtttcagatcctgactctgtccttgagggagatctagacagtttcatcttaagctatctgtcagcttctttggataaagatgatgatgcttaaatcattcgaattctcaatctatggcagcatattgtttatttagtgctgtaatgggtatatgcttgtgcatgttcagcgtctgaggtaaagtcagccgtcctttcagttactgcctttcctcatcaaggcttatcataatataaggaagcctatttggcttgctataatattttttgggtgacaaataaatgaatgcataccattgaattttgaatatggaattatgatgccttgtgagcttcacgtcttttggcttgcgctgtcgggatgacttccctttgtccgctggtgctgctgacagctgagtaagaagcccattgggatgatccggtgcgtgcaggtaaaataagccgagagc

SEQ ID NO: 33598 - DNA, 440 bp, Glycine max
  Clone ID: PAT_MRT3847_130343C.1
gtggtttaccatgtatctactagcatcaaccaggcgatggttatctcggtgacaatgggtgcaccaaaaacaacctttgggttttgatggccttatgcgagagtgtcaacacatattgctctgggaagccagagcaaatgcatcacctatggtagatttaggaatgtcagatgtgggctttgacgaaatctaaagtaatgcaacaaatgctgattgcattgctggtgccataggtgacccaagaatttggtctcatgtggtaaaatgttcccgaggcagattataaagggacagagtcataaaggatgtgccatggttcttgagttccttcttagccttggtggcgatagaggcagcatggggtagaagctcattgaaatcatggagagagctgcatgaacttgcccaaggtaggcagtcatgggcatgccaaattgcta

SEQ ID NO: 33599 - DNA, 1320 bp, Glycine max
  Clone ID: PAT_MRT3847_130344C.1
agggggttggaattttcccctctgtcctgtttcaattgttggtctcttttttatctgatttatttttacccatagtttaatatagtttgatgcaagatatgcttgacgtacatgctgctaataaacaatcattttaacccgactccgaagcatggttcgaccccatacaatacgaagtttcggctgcgagaagacgacagaagggggatcgaggaaaaaaaatatcattttttagctctcacagaaagagagagagagagagagagtgtgtgtttatttgagtttgcgatttgtgatttctgatttgttggcccaacttggcaaagcaatggctctttctgtatcccttatgcaactcagttgcgtctctcttcttcacaataatccctcatcatcatcatcaccggtgacccttttgcccaaatccctctttccttgtggaatttccctgaaactgaaagggttggttttttggagtaaaagtagttcagtgtgtggaagaagaagagtgggagttgggagtatcagtgtgaatgcctctttggttgaggctccagttttgtgggctggaaggctatgcatcttctatgccctcctcaaggctggcttggctggatctcaagccaacccacttgtctcagatttggaaattggggatactaatgatgaatctgctcctgctgctgctactgacttgggattctccaaatgggcccagaccatactaggaaaaccagcaaaagaagctgctaacggaaggaaacttgttagtaaatggcatcccacaacaaagggtacacttagaagaaactatagagtcccatccaagctcgaggggcgacgtcttcttaaagctattgcatctctattatcagatgatgatcactttgttgatgccacctctcacaagggttgccaaatccgtagggaaagtgctcatggagaaagtgtgtgttgcaacaatgtgagagctctttttgatgagctcccaacaccccatatcattgtggaaatcacaccttttcctgctggaccccttaatgacaatgattacattaaagctgagaagcttgagaaggttctcaggtctagtccttctgtttgatttgtctatgtatgggtgtttcatgctttcatgtacatattctttgctaccttgtaaatattgacttgatgaacagaaatttgtatcctttcaactcctcaacgttttacttttgaggtgaatcatagttacacctttaaaagacaataacatctttccatatttagtttgagaagacatttaacatggaaagaagaaaatgaaaaacaaaggac

SEQ ID NO: 33600 - DNA, 329 bp, Glycine max
  unsure (1)..(329): unsure at all n locations
  Clone ID: PAT_MRT3847_130345C.1
ttttttttttttgnnttttttttttttttttggtttgttttttttgtttttttttttttttgggaacaaaaataaannnccttatacattcaaaagccctggtttttccattttcggggcgtttccaatgggccccccaaaagaaatatttaaaataaaatgaaagcccttgggggggttttgttccccttaactaaccctgcgtttgggggttcaaaaaaaaaaaaaggagtggccaaaccttttttttttttttccnnnacccccaggggggggcccctcctttaacattttcccaaggccaacttaattgtttggggggaggagac

SEQ ID NO: 33601 - DNA, 144 bp, Glycine max
  Clone ID: PAT_MRT3847_130346C.1
tccccttcttattccccacaataaaaattcaatccgtctctatatcttctgcacacccacaaaacatgccctgttccctactttctacgtacaactaaagcctttacttaaacaacataacaatcggtacaaatttccccattt

SEQ ID NO: 33602 - DNA, 297 bp, Glycine max
  Clone ID: PAT_MRT3847_130347C.1
gaacagagcaggcgaagggccgaccctctactactactcacacggccttccttcgcgtatattcagactcaccagatcgtacacccgcagatgcacgacgcataagcgcacgcgactgcgacagatggagcgttgctaagaatgagatgaactatttacacaccatcatacacatgttgagaaagcttccgttcccgcgcagcggtcgctccaaaggatctcaccctaagtccgcgtgcatgctacgtcgcatcgctcctcgcgtgtgacatacactcaaggcaatggccgtcgttt

SEQ ID NO: 33603 - DNA, 307 bp, Glycine max
  unsure (1)..(307): unsure at all n locations
  Clone ID: PAT_MRT3847_130348C.1
cactcgtgggggtgttttaatttttaggggcggtattaacaaatngcaaaaatactattattttcccaaaaaaactatttcattcaaacatgttgatacgttggttatcccatttttatgagaacgacaattttcacaagcatgtctggagttgattaactattgtacttaaggtgtctttttgctctatagcacacaatccatacctttcaagaataaatatngctcgtccttatgcttcaaaaaaaaaagatacaaatgatccatctggcacttttataaaacacaaaagtaaattaactaatta

SEQ ID NO: 33604 - DNA, 377 bp, Glycine max
  Clone ID: PAT_MRT3847_130349C.1
gaagctacgaagcatggcgtccgtcaccgcccgcgccccggtcgcggcccttcgcccgtcgtcggcatcgctcaagtcgtcgtcggccttccttggccactctagccgcctcggccgcaccgcgtcgcccacgaggcgcagcctcaaggcggaggccaagggcgagtggctccccggccttccctccccctcctacctcgacggcagcctggcgggtgacaatggcttcgacccgttgggcctggcggaggaccccgagaacctgcggtggttcgtgcaggcggagctggtgaacggccggtgggccatgcttggcgtggccgggatgctcatcccggaggtgctgaccaaagccgggctgatcaacgcgccgcagt

SEQ ID NO: 33605 - DNA, 363 bp, Glycine max
  Clone ID: PAT_MRT3847_13034C.1
ggtttttcatttttttttgttcaacacaaccatgctagcttagatgctaggaccatctaatagtgaaaaacaaggataaagatggtagtggtgcttagttcagagaacccacgtttgaaaacatacaaacgcgaggcattgtgccacatagcagctatgctgaaggaaggcatacagctcaaccttaataaccagtgacggggagcggttcttaagtggatggggatagaaagaaaacctctgatacgacttgcgcattggtcggaccagcaaatgggcctgccccatatacccaatggttgaaccagggccaaatgacaaaataaaggccgcacgacactgcagggttcatggatgcaccat

SEQ ID NO: 33606 - DNA, 1422 bp, Glycine max
  Clone ID: PAT_MRT3847_130350C.1
aacataaataataaaatatttctttgaacatttcttaaaaagtatgaacataaatttaaattattattttatatttaatgtatttacattaatttatttgtcttacatacacttgtaatgttctccttatatttattaaactataatatagtatatataaagaaaagattttgaaatttgaataaaataagagtgtccaagtcagaggcgagcacgtgccagataccaaagcaacggtccagatcatggagcactcaccaaatccaagggctcctatttgtccgtgcaaactcacacttatcgactaacaacggtccacaaagcgccacgtgttctcaagataaagcgttattaacccttctgatccaacggatcctgctcattacctcccaaacaaacccttccgttccgtttcacctttcctcttcccgccggagccgccgtcacccgccgccggcaatcgtatcagaccctcccaatacaccgtctccgacttccacgcagaattgcacgattcattgatttcaattttcaagtcttgaggatttcgtttcaacagcgcttcaatttgacgcagaaaaactgagtcaaaccaattctcccagagttcgtgacttggattctcaatttatcgttcattccgaatagaatttgaaactccgaagaaaactgcaccgaacactgaatctcagttaccgaggagcttcttctacgaaccgtgcttaattccacacagaaacaccgagtcaaactggttcgtgctgtgttcgtggttcagattctcaatcgaaatttgaaattcagaagaaaaccgcaccgaacacagaatttcagaatctgaacaagtttcttccgttaacagcacttcaacttcacgtggaacaagaatcaaaccgtttcgtggttcggattctcaattcctcgtccattcgcaatcgattttcaaattccgaagaaaaccgctccgaacactgaatttcagactctgaacagcgaacagtacttcaagttcacgtggaacgagtcaaagcgattccaatcaatttcgcgaactcctccacggtgaactccgatattttcctgcactgacttagtgattcgtttcatatttctcagcttcgattatccgtttgtcgatggcggactcggacaacgactccggcggcgcgcacaacgccgggaaggggagcgagatgtcgccgcgggagcaggaccggttcctgccgatcgcgaacgtgagccgcatcatgaagaaggcgctgccggcgaacgcgaagatctcgaaggacgcgaaggagacggtgcaggagtgcgtgtcggagttcatcagcttcatcaccggcgaggcctccgacaagtgccagcgggagaagcgcaagacgatcaacggcgacgacctgctctgggcgatgaccactctcg

SEQ ID NO: 33607 - DNA, 704 bp, Glycine max
  Clone ID: PAT_MRT3847_130351C.1
ggcccaaaatggcaaaaagggctttcacatctgcacattaaaaaattgtcacggtcttggtccaccttctatcctaaactttgagtgtgcatcaaaggctacaaaagggaacaaaagtgttgcaatcacacctctgatattatggccaattaagataattttgtataaaacctttttggtttcccctatagatatagaaccaccgtttgacgtgtgcgcggggtttagttagacgctcacatccaaaatgataattttatttcattatgctagaaaaacaaaaaggggagccataacaggtggaaatttcgtttttccaataccatccatgtgtgcgttttctcaagaatcaaacgcccatgatttcccccaccacgtcttcctttgaatttaagtagaggggtgagtctctttcaccccaatttttcttcaagattcattatggcttcacactagcacaagtcgctattttgatgacatacttcgaggcaccgtgatgcaggcgccaatcagaaaacgcacacacaatggtgacctcatcggaaaaagacgagataactcaaaccgcctcgaattgtgccaggaaagagagggagaagactaaagagagactgtgccagaaaagggaaagagaatactgataaccatcgtctgtctgttgtcctctaacatgaacaagggagtttgcgttttgccatctttgc

SEQ ID NO: 33608 - DNA, 276 bp, Glycine max
  unsure (1)..(276): unsure at all n locations
  Clone ID: PAT_MRT3847_130352C.1
gccggagagaganggccagggagggggggcggggccggcgggcccggagccagacacccagaagaagggggccagaaccaaaggggggaagagaccgngccaagggacagggaggccnanggaacagggccggcaggcncaagcaggacccgagcgcacccgcggcccaanggaagaagggagacgaccagaggggaagcaggaagggacaacaccgaaagcaaggggcgacgagacgaaaagacaccgggggccaacacaagaccaagaaagagg

SEQ ID NO: 33609 - DNA, 475 bp, Glycine max
  Clone ID: PAT_MRT3847_130353C.1
aaccatgaacaacgagtgaacgaaacggcgaacagaacaacagcaacgttaacaatgggttctcggtacgaagtggaagtgaagcccttatcagcacgcgcgctcaagaacgtgaactggcgccacggccccaacctcccctacgtcgttcgttgggccgaccgaagctacttactctccacgtccgtggacgagaacggcaacaccgacgcgaattggaatgaaacgctcacaattccgttgccggctaagcccctcgaggatcaaaatttgttcatccacgtggtccacgccggctcgggggaggacaccaagtcgctgatcggcaaggcttggctccggctggtggatattgtcaacgacttcggaatcggtgagcgcgtgagatgcacgctctcgctgaagcgtccctcggggaggccgcaagggaaggctgaggttagcgtgaccatcagggagtcgagctatggtgcgc

SEQ ID NO: 33610 - DNA, 1354 bp, Glycine max
  unsure (1)..(1354): unsure at all n locations
  Clone ID: PAT_MRT3847_130354C.1
aattcggctcgagacatctctgcagtaatccataaaacacacaaaaactcagggtagggcagagagagagagagaaatgggaggttgggctatcgcggtgcatggtggcgctggtgtggaccctaatcttccactcgagcgtcaagaagaagcgaaacaacttctcacgcactgtctcaatcttggaatctctgctctaaattctaatcttcccgccatagatgtcgttgaacttgtgatttgacaagtgtttgtgacaggtgagggaattggaaacggatccgctgttcaattcgggccgtggatctgccctgacagaaaaaggaacggtggagatggaggctagcatcatggatggtccaaaacgacgatgcggcgccgtttcgggtcttaccaccgttaagaacccgatctcgctcgctcgtttggttatggacaaatccccacattcctatctcgccttctccggagccgaagaatttgctaggcaacagggtgtggaggttgtggacaacgagtactttatcacacctgataatgttggcatgctcaagctggcaaaggaagcaaacacaatcctgtttgattaccgaatcccaacatcggggtacgagacgtgcggatccaatgtggagagtccactgcaaatgaatggactcccaataagcgtgtacgcgcccgaaaccgttggatgcgtggtggtcgaccgggagggccggtgcgcggcagcgacatccacaggggggctgatgaacaaaatgaccggtcgcatcggtgactcgccgctgataggcgctgggacctacgcgtgcgacgtgtgcggtgtatcgtgcacgggcgagggcgaggccatcatacgtggcacgctggcgcgtgaggtggcaacggtgatggaatacaaagggttgaagcttcaagaagctgtggattttgttatcaagcaccgtctcgaggaagggatggctggtctcattgctgtgtcaaatgctggggaagtggcttatgggttcaattgcaatggcatgtttaggggctgtgccactgaaaatggcttcatggaggttggaatctgggaataggttcatttatttggttcctggttgtttcgattcaactattgaatttgtgtatcatgttggagtttagtagggtcttgctgggtgctggattgagttcattattattagtctaatagtcttgtttctaagaattagaaaacaaaaaaaattgtgaaataatagtggtaactttggttgtctttttcttgaataaagacttttggtagaccctcgacacacccgtgtagcttttttcttcgtagcaactatgacttaattaatttctaaaanaaaaa

SEQ ID NO: 33611 - DNA, 986 bp, Glycine max
  Clone ID: PAT_MRT3847_130355C.1
caactggcagtccgatggccttttctcctgatagtgcaaatgctaaaggtgatcagcagccagaatgtaaaggagaacaacttgatctaggtgtgaggcttggtttgctgaaattagtaagtggaatatctggcttgacacaagatgatctcccagaaactttatctcttaacttcctgaggctgaggtctgttcaggctcaaattcagaagattattgtgatttctacaagcattcttattcgcggtcaggttctcttgagtgaaaaggcagtagctagccctgcagatatggaaaacttagtgtctaagtgtgcagcacaactcttggatctcctaaaccgtgttgaagatgctgatattgaagacattgtagaagtgatctgcaatttgcccacagttgacggtgaagatacagggaaacttgagtcaaggaaggtagttgctgctagtatgctaggaaagagcttacaagctggggatgttgttttcgagagggtgtttaatgctgtctattcagctttgcgcggcgttgtgcttggtggaagtgggatccgtgggaggaaattagcagaaatggctctcatgaaagttggggctggtattctgactgataaggtagtggaaactgctggtgttttgattgtggcagccactatttcagttagtgttcatggaccttggtataaacatttgactgataacctgtgatatatttgctacgtacatgcgtaataataataataataataataataaatacacacatttgtacataggagtgtgtaaaattgtaagctgtgtatcttaggtttgtagagaagtgacattgtttgtagaattcttttgatgtaacaaacagaaatgtatataggtgcctaaaccttaacattgaattgctaatatatgattggatcttggaacttttcatttcaaaacccttcatttttgaatcttattatcagtagttcaaaatattttaagcac

SEQ ID NO: 33612 - DNA, 4012 bp, Glycine max
  Clone ID: PAT_MRT3847_130356C.1
ggctcgaggctattcagcatcaggtctctgaagattaaaaacttttgagagaaaaggtgctgcacctgagtggagatgctggaattgagcgtatggaatctgcattatctgaaacaagatctagatactttggctcgagggatgacggaagtccagtggggtctccaatgattccatctatgcccgcaagcccaactccactttctactgctgccagctcaagtgaaagaaatatttctgatgagagtaatgatagggcaagccgagtagttcgctccctctttaaggaaacaaacacttcccctggagagtctagcttctctgcacccagaaccagttcagatagtcagcttggcacatcctctgagaagttgctagcagagaatgaggttcttgtaaatgaatttcttcacgagcatcactatagtgttactgatgaatttgatgtctctgatcacattcaaaacagtgttgaggggaaaataaagcagacaatggagaaggccttttgggatggtatcatggaatctgtggaggtggaccatcccaactatgaccgaattgttcaacttatgggagaggttagggatgaaatttgtgagatggctccaaaaagctggaaggaggatatttttgctgcaatcgatttagaaattcttttgcaggtgctgaaatcaggtaacctggacattgattaccttgcaaaaattctcgagttttcactcgtcagtttgcagaagctctcagctccagcgaatgaggagatgatgaaggccgctcacaagaaactatttcatgaattgagtgaaatttgtcattcaagggatgagtcaaacaattcatgtgttgtagccttggtgaagggcttgcaatttgtcttcggacagattcagattcttaagaaagagataagcaaagcacgaataagattaatggagtctttggtgaaggggtctgctggtctggactaccttaggaatgcctttgctaacaaatatggatctccatctgatgccaatacctctctgccttcaacattgagatggatttcatctgtttggaattgcaaagatcaggaatgggaagaacatgtgagttcctcatcagcattggcttctaattcatcccaagaatggcttccttcaactactctcagaactgggggaagtattctgctcaaaacaactggcagtccgatggccttttctcctgatagtgcaaatgctaaaggtgatcagcagccagaatgtaaaggagaacaacttgatctaggtgtgaggcttggtttgctgaaattagtaagtggaatatctggcttgacacaagatgatctcccagaaactttatctcttaacttcttgaggctgaggtctgttcaggctcaaattcagaagattattgtgatttctacaagcattcttattcgcggtcaggttctcttgagtgaaaaggcagtaactaaccctgcagatatggaaaacttattgtctaagtgtgctgcacaactcttggatctcctaaaccgtgttgaagatgctgatattgaagacattgtagaagtgctctgcaattttcccacagttgcgctccagccggaatctgtctaaccaccctaaagatccggcggcgagccccaaaaccaacacccttcttaaaggagaatccaaaattgaatatcaccacataaaagtggaagtgggagggagcctataaaaaccactttgcgtcaccttggctcattgcagcctcaagaatccacacaaactcagggtagggcagagagagagagagagagagagagagagagagagaatgggagggtgggctatcgcggtgcatggtggcgctggtgtcgaccctaatctcccactcgagcgccaagaagaagcgaaacaacttctcacgcgctgtctcaatcttggaatctctgctctaaattctaatcttcccgccatagatgtcgtcgaacttgtggtgagggaattggaaacggatccgctgttcaattcgggccgtggatctgccctgacagaaaaaggaacggtggagatggaggctagcatcatggatggtccaaaacgacgatgcggcgccgtttcgggtcttaccaccgttaagaacccgatctcgcttgctcgtttggttatggacaaatccccgcattcctacctcgccttctccggagccgaagaatttgctaggcaacagggtgtggaggttgtggacaacgagtactttatcacacctgacaacgttggcatgctcaagctggcaaaggaagcaaacacaatcctgtttgattaccgaatcccaacatcggggtacgagacgtgcggatccggtgtggagagtccactgcaaatgaatggactcccaataagcgtgtacgcgcccgaaaccgttgggtgcgtggtggttgaccgggagggccggtgcgcggcagcaacatccacgggagggctgatgaacaaaatgaccgggcgcatcggtgattcgccgctgataggcgccgggacctacgcgtgcgacgtgtgcggcgtatcgtgcacgggtgaaggcgaggccatcatacgtggcacgctggcgcgtgaggtggcagcggtgatggaatacaaaggcttgaagcttcaagaagccgtggattttgtgatcaagcaccgtctcgatgaagggatggctggtctcattgctgtgtccaacgctggggaagtggcttatggtttcaattgcaatggcatgtttaggggctgtgccactgaaaatggcttcatggaggtcggaatctgggaatagcttcattattttccttcatggttgtttcgatgcaacttttggatttctgtaccatgttccactgtagtgtagggtctttctgctggtgcccgatttagataaaaaatggtaaccttgtttctaagaattagaaaaaaatgtgaaataataatatggtaactttgttgtctttctcttaaataaagacttgtggtagaccctcaacaaacccgtgtacctttttactatcacttacttaacttccttctctttttcttcaattcttatattatttgcaagattgtggcagcctctatttcagttagtgttcatggaccttggtataaacatttgactgataacctgtgatatatttgctacgtacatgcgtaataataataataataataataataaatacacacatttgtacataggagtgtgtaaaattgtaagctgtgtatcttaggtttgtagagaagtgacattgtttgtagaattcttttgatgtaacaaacagaaatgtatataggtgcctaaaccttaacattgaattgctaatatatgattggatcttggaacttttctatttgaactggttctgggttcagagaagctagactctccaggggaagtatttgtttccttaaagagggagcgaactactcggcttgacctatgattactctcattagaaatatttctttcacttgagctggcagcagtagaaagcgaagttgggcttgtgggcatagatggaatcattggagaccccactggacttccgtcatccttcactacaaagtatctagatcttgtttcagataatgcagattccatacgctcaattccagcatctccactcaggtgcagcaccttttctctcaaaagtttttgatcttcagagacctgacgctgaatagctttcatatcatgactaagcttaccaccagctccttctggagttaacttgcaagtttgaatcatagaagcttcaagctggcaagctgctctaaccaaatcttcctccagtgatcgagcatccttaaccttccataccacaaaacaattcaagtatgagcaccaagctttatcaaaagcagcaagctgagatctgaaagtacaacacttcatggatgctgagacagactcttcatcaaaacttcgtattggcccatctagtataatccggacgcgtgggcggacgcgtgggcggacgcgtgggcggacgcgaaagcga

SEQ ID NO: 33613 - DNA, 362 bp, Glycine max
  Clone ID: PAT_MRT3847_130357C.1
aaaatagaaaaaaaaaaaggaaaaaaaaaaaaaaaaaaaaaaaaaaaaaaaaagaaaaaaaaaaaaaaaaataaaaaaaggggggggcggatttaaaggggccgagctttgtcatcggtgtatgcaatgtcaacgcttatattgttaggcctggagtgccttaatgagggacgtgagtataacaagttggggtgggggaaaaacttggggttaacaaatgtaaaggcgtggtagcaaatacccttttccccggacgggttaatgaaaaacgggcctgaacggagcacttttcccaacgggggcgccgtttaaatgggaagggggccccccccttggagggggcctaaccccgggtggggggg

SEQ ID NO: 33614 - DNA, 317 bp, Glycine max
  Clone ID: PAT_MRT3847_130358C.1
aagcgatacgacaacagaaagggggcaaaaaccgctcaatggatccccgtactcgagggggtattacacatgcaatagcgtcaaaaggtctccgacgcggacacacatggaccgtactccggacgatccggcaatgtcgactgtgacatatgaatgagagcaccgtcactcgattccagagaacatttccggtcgagtgtgtttgagattcaatcacagtcaaggtagctgcaagcttaatctgacattagtacatcagtagattaaatcacaagggaaacatagtcggctctcaccaagatcatcgtaatcaacat

SEQ ID NO: 33615 - DNA, 300 bp, Glycine max
  Clone ID: PAT_MRT3847_130359C.1
cccacgcttacgaagactgctagaaactgagtaattcaattgtcggaactggataagtgagcaacttcattggagggggcaaggggatgccaagcatacgatatctaacctctaggactgatcactgactgtagtgaccgaactactgacgtgaaaatcgcacattggtggcttgctacgaaagcacaccgcatcatatgcgacgataccattacagacgagtgcatcgtactaccaatggattccatgcgtggcgaactagatagatcagactccagaccagtcaaccaactaatttac

SEQ ID NO: 33616 - DNA, 292 bp, Glycine max
  Clone ID: PAT_MRT3847_13035C.1
acccatggcacatgcagctatcacgtgcgggcaggtgacgaatagcctgatcaattgcattggttacctccagaacggaggaacgccgccgtcgggatgctgcaacggagtgaagagcctcaatgccgccgccaagaccaccgccgaccgccatacggcgagcaactgcctcaagttcgccgcctgccaaatctacggcttcaaagccaacaacgccgtctcgctccccggcagatgcggagtctccatcccctacatcatcggcacctgcaccaactgcgctaccattaag

SEQ ID NO: 33617 - DNA, 232 bp, Glycine max
  Clone ID: PAT_MRT3847_130360C.1
ctcgagccgaacaattctaacaaaaacacaagaaggctatctttaattggggccgctacactaacaattggcgcacggcatctaaaatattaaatataatttggctgccgtcaacatatgagcttcctgacccgaaacaatcaccctgctttctgcttttgttgtggtctctcctcaagtggacctcaacttacttatctgcttttttcctcatgatcccaaccaacattca

SEQ ID NO: 33618 - DNA, 340 bp, Glycine max
  Clone ID: PAT_MRT3847_130361C.1
acaaagcgttcccatggcaaacatgattgttgcttccaccaaacctctggttccagtcggcacgcgagttcccgttcccccacacccatagtccccattctccacatttcactccccaaatccccaaccttgaaacttatactcccgatttcaaagccccatatgctgtcccttcttgtagggatagcaccactgttcttgatcatgacccttccttgcatatgaaattgataaagcatcacttcttgactttaaccttacccttcctataataatgttggagtttctacttcttatggttgcccttgacaagatattgttcaaccctcttgtgaaattt

SEQ ID NO: 33619 - DNA, 569 bp, Glycine max
  Clone ID: PAT_MRT3847_130362C.1
ggagccctcgcgccgaatcggctcgagtgctcttctctctcactaccattgatttccccgcacgttcctctcctaattcccctcctttttcgctactctttttcttttggggtgaaaactgaaaactagaaagaagcgtacggagagaaccaaagaaaacgaatccaatgggaggatgtgcaactaagccgaaggtctcccaggacgatcccgatggaaagcccaaggcaccccaaccagaaccagaacctgaacctgaacaccaacaacccaacaacaaagacaccctgcaaaccaaagtaccccaagtggaacaaggtgctgctcacaaagaccacaacaaccttaatgtcaacgaaattgttgacgacgaccaagcaaacaaaccacgctctctcagctccttgttcaagcagaatgaagataaaaggggttccacagaaaatgagaaaaacaaagttgaggagtctgtgaaagaagaagtgttagaggtcaagatacctgcggaagatactaaaagcaatgagccaacagttaaacaagaatctctaaagccagaggagaagctg

SEQ ID NO: 33620 - DNA, 254 bp, Glycine max
  Clone ID: PAT_MRT3847_130363C.1
tgtaccacacgttttttattatcttttaaaaccataatctaacgggggggttattaatatcacagggggagacaccaatttgtgtctaggaagattgtcgactattttgaccatggacaggttggaactgtgggtagaataggaattgactgaagcgattaaaagaacgtttaacccgtcgtacacagggagcacttctgagaatacacgcctagaagagttctggattatgaacagttctgttttggaaccgg

SEQ ID NO: 33621 - DNA, 816 bp, Glycine max
  Clone ID: PAT_MRT3847_130364C.1
ccacgcgtccgaagcactcttgtgttttgtctctctacctctctcactactctatagtattctctcaatttctgttcacattctaccaaaatgagtggcttgagtttcaggggcttcacatacatgctcctcattgcatttctcatttggtccttcaattttgaagcctgcattgcaagaagaggcaagcactggagacaaagcagggatgtctcagcttctgtgtacaagaaaaaaggcaaaaattatggcaatgctcacaacaagtaccatggtggaggatcaaaatcaaagcctccatcatcacacaaaggcacaccaacattaccaaaggctccgccacaacataaaaacactccctcaccaccatatccaacaccaccaagtgatgatacccccacaactccaccaccaaaggcttacaatggtggtggccattcttccgccaccaccttcaatgtgctagattttggagccaagggagatggaaaatctgatgacaccaagagtaagagcaaaacaggtagtgaaaaatacagaaaagtgaagacccaagaacaagccagaggggtaggacccacttgaaaaatgattctcgttacgacagttaagtcacactttctacaacaatttttagtttatagaacacaaaacgctggtaagctatgtttttccaaataggacaaacctagtctggaatcagtgatctcagcaccacctagtatttaatatagtatctttttaacgtatagaaaacgtattttaattgtgaagctattaaatatgcaaataaaatatgtttttaaattcaataca

SEQ ID NO: 33622 - DNA, 710 bp, Glycine max
  unsure (1)..(710): unsure at all n locations
  Clone ID: PAT_MRT3847_130365C.1
ctcttgtgttttgtctctctacctctctcactactctatagtattctctcaatttctgttcacattctaccaaaatgagtggcttgagtttcaggggcttcacatacatgctcctcattgcatttctcatttggtccttcaattttgaagcctgcattgcaagaagaggcaagcactggagacaaagcagggatgtctcagcttctgtgtacaagaaaaaaggcaaaaattatggcaatgctcacaacaagtaccatggtggaggatcaaaatcaaagcctccatcatcacacaaaggcacaccaacattaccaaaggctccgccacaacataaaaacactccctcaccaccatatccaacaccaccaagtgatgatacccccacaactccaccaccaaaggcttacaatggtggtggccattcttccgccaccaccttcaatgtgctagattttggagccaagggagatggaaaatctgatgacaccaaggccattaggagcataaagaattgttttcttctgtcttctctgtttgggatgttgcttatgccattaaagaaagtttaccgtgaccatagagtaagagcaaaacaggtagtgaaaaatacagaaaagtgaagacccaagaacaagccagaggggtaggacccacttganaaatgattctcgttacgacagttaagtcacactttctacaacaatttttag

SEQ ID NO: 33623 - DNA, 318 bp, Glycine max
  Clone ID: PAT_MRT3847_130366C.1
aaatcaagacttacaaagggtgtacttgaaacacaccaaataagaggaagttagcgaactagaaaagaaaaacaaggctgcaaacgttgatgacacaatgacgaagaattttatccagtgacgtcatcggatataacaaaaacatgcttaacactgtctgtcgtgtgtttgaagagtgtcggtgtcacacatgtggacacgacattcatcaaaagtgtttgtgcttcctaagttgcaacaaaacaaattagtataaagtatattcaatgagattgtaaccgaatatccatagaaaggaatgtataatggaagatgctc

SEQ ID NO: 33624 - DNA, 2012 bp, Glycine max
  Clone ID: PAT_MRT3847_130367C.1
cggctgagagaagtcaacagcagggcgtccgcacaaagaaaagaagcactcttttgtgttgtctctctacctctctctctctctactctctatagtctattctctctcaatttctattcacatttcaaccaaaatgagtggcttgagtttcaagggcttcacatacatgttcctcattgcatttctcatttggtccttcaattttgaagcctgcattgcaagaagaggcaagcactggaggcaaagcagggatgtctctgcttctttgtacaagaagaaaggcaaaaactatagcaatgctcacaacaagaaccatggtggaggatcaaaatcaaagcctccatcatcacacaaaggcacaccaacattaccaaagcctccaccacaacataagaacactccctcaccaccatatccaactccaccaagtgatgatacccccacaactccaccaccaaaagggcccgatatggtggtggccattctcccaccaccaccttcaatgtgcttgattttggagcatgaggagattgaaaatctgttgacacaaaaacaatttaataatcaccagctgaagcttgtaaagtagaatcatcaaccatgctcgtcccagcagactacgtattctttgtggggcccatttcattctctggcccatactgtaaacccagcatcgttttccagcttgatggcaccattgttgcaccaacaagccccaatgcttggggcaaaggactactacagtggttggaattttccaagttagtgggaattaccatccaaggaaatggcatcattgatggaagaggctcagtgtggtggcaagacaatccatatgatgatcctattgatgatgaagaaaagctcattgtccctttgaaccacacaatagggagcccgagccctccactgccgattcaaagtgagatgggaggaaaaatgccatccgtcaagccaactgcattgcggttctatgggagttttaatccaacagttacaggcataacaattcaaaatagtccacaatgccatctcaagtttgacagctgtaatggggtcatggtccataatgtgaccatatcatctcctggggacagtcctaacacagatggaattcaccttcagaactccaaagatgtgttaatatacggcagcaccatggcctgcggagatgactgtatttcgatacaaactggatgctcgaacgtatacgtacacaatgtcaactgtggaccagggcatggaatcagcattggaagtctaggaaaggataacaccagagcctgtgtctcaaacattactgtcagggatgtcaacatgcacaacacaatgaatggtgtcagaatcaaaacatggcagggtggatcaggttctgtacaaggagtgctattctcaaatatacaagtttctgaagttgaactcccaattgtgatcgatcaattctactgtgacaaaagaacctgcaaaaaccaaacgtcagctgtgtctctcgccggaatcaactatgaaaggataagggggacatacaccgttaagccagttcattttgcctgcagtgatagcctaccttgtgtggatgtttctctaacctctgttgagttaaaaccaattcaagaaaaataccatctttacaatcctttctgctggcagacttatggtgaattgaaaactccaacagtcccaccaattgattgtctacaaatcgggaagccaacaaacaatcggattcagacagatcatgatttatgttgatcagatatgaattcaaaattcaaatgcttagcttgctagctaaagtatgtatattgtaaaaatcctactatataggaaattttcttcattagggtgatactgatttatcattgtgagaatataccggccctgctattagcaagaggtcgagaatagtataataggcagccttctagctgtggcatattgcaagagtgagatatttatacaagttttagtagcatctatgaataaaaatttctttatttatacaaagtcag

SEQ ID NO: 33625 - DNA, 254 bp, Glycine max
  Clone ID: PAT_MRT3847_130368C.1
taagctacggattcggatcgagttaatgatcaattgatgcatgtatgaacgacgtggataataagagagaataaagtcttacaaaccacttacatccaagcactgcttaagtctataaaggcgacttgagcaacttgcacacctttcctagttatggatagtgaagaacttgaggaaacaactaacagataaactgtatatcaatttacaattacgtctttaatacttcatcgactcttcttataaaaacgatc

SEQ ID NO: 33626 - DNA, 424 bp, Glycine max
  Clone ID: PAT_MRT3847_130369C.1
cgcacgcacgcaccgagcctggataccggacagccgccacccacaagccgacgcgagggcttttacatttgcagacccggaaatacacgacccaaacctagtggggcaccagtttaccctagagcgagtctataaagagcccggcggtctcatcgccggaactggctcccgaacgaaataagagggaaaacactgttcctacagaatacgaaacggtagcagacagggccaagtctggagcgtgtatagagggaaatagctccgttcatagcgctgagctcactggccgctttccagaatggaaaatgggacgcgcggtggaaaagagaataagccccccacttgagagaggtgcccccagtctagcgcgctaaggtggcaaccctttagaccaccggataattgccgatagttgcttgccttt

SEQ ID NO: 33627 - DNA, 338 bp, Glycine max
  Clone ID: PAT_MRT3847_13036C.1
gtggtcttgttttttgaggtggcctgtttctaatactgaagcgtgtgggtttgcttaggaaacaaaaacttaataaaccgcctcttgttttttgatgatgccccgaaaaaagctgggggggaataaaccttggcccccctgggtcaatttcctgcccccggggttccccccccgaagggaatacaccccccgtaaaaaatttttcaaaaaagtctttgggggaattttgggaatcaatggtgacataggcggaacccttcttttggcggacttggaaaataaccccccgtgggaaaggcccccattttccccaaaaaaaatggtgtgggtttcccccc

SEQ ID NO: 33628 - DNA, 191 bp, Glycine max
  unsure (1)..(191): unsure at all n locations
  Clone ID: PAT_MRT3847_130370C.1
tttnnctntacttttcaagtttagttccaccacatctatngcancangatgggngtatgagtatattttgggaggcattanagcnctagcttggtngcttgnntntgtnatatatggnnctgtatcaaagaggaaggccannagtccagtacatgcagaaantaatggtggtagtattataaggacatcac

SEQ ID NO: 33629 - DNA, 245 bp, Glycine max
  Clone ID: PAT_MRT3847_130371C.1
ggaaagatttgatcagctggaaagcaaaagagaaaacagaaaaaaaaaaaaaaaaaaaaaaaaaaaaaaaaaagaagaacaaaaaagataaaaacaaaaaaacgaaaaaaaaaaaaaaacaaaacacaacaaaagcggccgcccaaaaggatccaaccttacgtccccttacaagcaacgtcaaagcccttcaaaaggggcaccaaaattcaatccacgggccgccgattaacaactccccaacg

SEQ ID NO: 33630 - DNA, 229 bp, Glycine max
  unsure (1)..(229): unsure at all n locations
  Clone ID: PAT_MRT3847_130372C.1
ctgatatgaaaattgtcccgggaaaagcaagttgtttagataggtttgtatgactcttctaganattctaagtatctagaaaatgttcaacaatttgttggtagtgatcaggctaagcctagagtgaggagttcacagttatcgcttaaaggcactatggtggactcagcagattacgatgaacttttctattttcatgaaacaccaggacaggaatttggtatggatt

SEQ ID NO: 33631 - DNA, 305 bp, Glycine max
  Clone ID: PAT_MRT3847_130373C.1
cggctcgagaattctttggaatcagactcggcaaccacgggctttgaatcaaaagcctgagaaccggccacggtcatttcagaaaccgcatactcagtgacatacattggttgaattcaacagcatcaagagatcgtgatactggaaccaacatgtccaatacatggaaagggaaaggtggtcagatgaataatggcaactagggtgctggcggtaagaagcaccgttcaccgcatccttgtgaataacgtgttttgcgaatatcgacgagtccgttataatatgtatgacccttgggttagctt

SEQ ID NO: 33632 - DNA, 254 bp, Glycine max
  Clone ID: PAT_MRT3847_130374C.1
gcacgaggctcgtgttcaatcattttaggaagacacttaaaattggagtcggatggaaacatttatgcgagaccttgtcattgaccgttgacatgggaatagtttttgaattcattgatcccaatgttaatcgtgtgctctattgggcgtatttatgaataatttaggattttgaacatttaattactttgaacattttaattattatgaacattttaattatatattagttgttttataataaaaaaaaaaaa

SEQ ID NO: 33633 - DNA, 507 bp, Glycine max
  unsure (1)..(507): unsure at all n locations
  Clone ID: PAT_MRT3847_130375C.1
gggacgcgtgggctctctgtgtatttccctacctgtcccttcaagacgcatagcttctctatgaccctcaccggctagaccatgccccttgagggggaaagctctgacaccatctacaacgggaaggcctaaagccaagacaaggcaggaatgcctccggaccaagcacatgtcattgtcgacggagagtcacaccgtttgggcagtggtngagcnggggcncccccggatacctggtgctcaacattacagggagactttcactggtctggtgtcggggggtgctatttcgtagaactcaccgcaagacctacctgaggggcagctcgcgcatctattcgtgagggcgtagcagacaggagggttgccccggaccaggaacgtctatattgccggaggcagatggaggacggccgcaccctcagcgactacgacatgcacaaggagtgaacccttcacctcgtcctccgtctacagggtggcatgcatatgttccataagaccctc

SEQ ID NO: 33634 - DNA, 565 bp, Glycine max
  Clone ID: PAT_MRT3847_130376C.1
ttttcaaattttgataaagctaccctaggacctaggtttacactttctcttttcttttctgtgagagtccagcgtcttttcttcttttcaaaattcattcccttgccttgcatgcgttttcactttttcagcgctacacctttctatccgcaatctaagagctggggaggaagtcgattacgttttgatgattattgctatgcttaattcttgtttggaggtttaactatgaaataaacgcttttctgaaaaatattatgttgagtggtttttttgtgccgtgccaaaaaatatctgtcatagggagagaggaagagaccgggggagtgtgtttaggagtaaggagggtagtttatgtggaagagggagtgagtaagtaaaaggggacgtgtaaatagcaaatgccaaatgttctgtgggtatggagccccaagattttgatggtagagatttgggaaaatgcccctgaaagaaattattgttttcaagaaccctatttcatccaattttcatctttcttgtggatcctgaattgcaatttcagtgtacatttgctctaattttt

SEQ ID NO: 33635 - DNA, 241 bp, Glycine max
  Clone ID: PAT_MRT3847_130377C.1
tttacgcgttttgacacccacccctagaaacggggggccgtaccttagcaaatagttagctcacatagaagccgtggggggttctacataagcccacgtccctagactctacacatgcgggctccaatgtggggaatgtgagtacggggaaatggttccccctaattcgctactagatcaacaactgcgaatggttgatctgatagcgctacaaggacggttgtcaggacaaaactcatca

SEQ ID NO: 33636 - DNA, 412 bp, Glycine max
  Clone ID: PAT_MRT3847_130378C.1
ccgtgttggttttaccatttactatttttaagaagagatggtaacatgaccgaaacaatttttcaccttttataagggaaagccgcttaaaagtgtggaatgaagccaatcggacttggcgcgcgccttgccttattccaaaaaacaattgaggtgcatggcctacctactcgcaatgccaaacttagagtctttcttaaatacccaattactgttttcggggttttcgctaaacccctatactgccaactagttgttgtacctttcacaccaccatagctcaggaagtctgcggcgctaacaacgtcatacttctcggcaaggtcgagcgcttctatgataccctaaccgcttctggctggttggaggcaactctcacctgtatttgtaggaaaccccaaaaccttcgcac

SEQ ID NO: 33637 - DNA, 484 bp, Glycine max
  unsure (1)..(484): unsure at all n locations
  Clone ID: PAT_MRT3847_130379C.1
ctgcgagaagacgacagaaggggtctgtgtgataggaaagaacacttggtgagaaatcatttgttaggatccctgaaactggttctgacttttgagggataaagataagaaaaacaaagaaaggaatggaaaaagaatgtttcggcagcatttgtaaaattatagataaataacgtaaggagaagattctccttccaaaggtttccccatgccatcctaggaaacacgcagagtgaaaaccggtagcagaaaactggtttgaacaatttgtagccatgattgaattttgtaaccataattgacaaccttgaatgtttttcctatacaagtttttgaaatagttaaagggaaaaggttgcagtacttattagcatttttataacaataattcctcaatattggacatccatatgctgaattcatatttcatatggcaaaattgacatcnaaaagaagaaaataagaacttgtaacttcatttttg

SEQ ID NO: 33638 - DNA, 1228 bp, Glycine max
  Clone ID: PAT_MRT3847_13037C.1
aattcgccacgcgtcccatcggttttaaaaagtactttggcgtgtggttggaaacaaataatagagaaaataaaaaaatgaatgttaaggtgcatagctctgatgataccaagaaggatgaagaggttgtgcttcctggctttagattccaccccacggatgaagagcttgttgggttttatctgcagagaaaggtggacaaaaagcctctaaaaattgaactcatcaaacaggttgatatctacaaatatgatccatgggatcttccaaaggtgaattcttttggggacaaagagtggtattttttctgcataagagggaggaagtacagaaacagcgtgaggccaaacagggtaactaggtcagggttctggaaggccacagggattgacaagtccatatattgcgtgaaagaaccccatgaatgcattggcctgaagaagtcattggtctattaccgtggaagtgctggcaaaggcaccaaaactgattggatgatgcatgagtttcgccttccacccaatgcaaaatccagccccaatgatgttcaagaagcagaggtgtggacactctgcaggatattcaaacgcatcccatctttcaagaagtacgctccaaacttgaaagactcaacaccagccaccaaaccaaaccctgtgaattccaacgcatccaccttagattctgacaattgctgcaagccatatttgatttgcagagaccctatgatgatgcaacaaatagaaagaaaaccagttattggacaagttgatgaaaagaaacacttgtttttgggccaatttggcccactatcccatcttcaggccccatcaaccaccccttacccaaatttttggaaccagaataatgttgaggaccacgcatttgccaatgagaattgggatgacctaagatctgtggttcagtttgcaatcgatccatccacggtgtttgattgtaccgaaacatatattccaccctacttttcttagggttggagtgagtaactttggtagatatgttatatatgatgtatgaacatatatagaggttataattgtcattattcttacagttttttaatttcttgtatgagaacacgtatatgttgaaatttgctggttttactagttttgttgtaaaacctaatattgacttgtatcttgtcatttttatcccttttccattgattgagtcaataaatacgtttataccttgatttatcaaa

SEQ ID NO: 33639 - DNA, 277 bp, Glycine max
  Clone ID: PAT_MRT3847_130380C.1
ggctcgaggtgagactttgacctctttattttgacgtcaggaccacgaatcactgcgaggacatttatgttatcaccgaacctgctaccctctactttggcaccgacagaacctaccacagggaaggattatcaggaccgaccaatcgctggagtgactgggaatggtagctgactgcaacagaccaaactccgcgaatcaatatgcgattaggtcgggtgccagataacaaaaaatcagccagggctacacggaaagggcagcctatatgcattta

SEQ ID NO: 33640 - DNA, 336 bp, Glycine max
  unsure (1)..(336): unsure at all n locations
  Clone ID: PAT_MRT3847_130381C.1
gagacattttggaactaaacttatctgagactccaaagagaagagttntttccatatgtactgatattggcacatttgttttagaatggtactaattcctagattgaggcaaaaatgttgggaattttgaaggagatagttggttaaagcacccaaagagctgaacaggccagtttcgttgaattgatgcactaagcattaagctaaggtatgaaattcttcagggattcatgttctgcaatttctacaatgatttattaatgtgctttgcgaaagaaactttgctagcctatttccctttaaacaagcacttcattcataaacagttgttagagg

SEQ ID NO: 33641 - DNA, 341 bp, Glycine max
  Clone ID: PAT_MRT3847_130382C.1
aggcgtcctttcttgcgcccacgcgtccggaactatgagaggttcattatgaagaaaagggacaagcttagttgacaagatggaatcaacccatactgcatggaagggactggcttggccaatagcgataccgagcaagggcaacgcaaatccgtgttgctgatgctgctagttttgatggtttgattaccaaccaagttatgagcaagatggcagaaatgataaacatggctctgcgccggagatgaaaaatggatgcgtgcaaggacacacctgatgttgtctcgtgaatcaaggatcgcaacctgtaagaaagatgattcacaagatgcatgtgggat

SEQ ID NO: 33642 - DNA, 1418 bp, Glycine max
  Clone ID: PAT_MRT3847_130383C.1
ggcacacagcacacaaaaaaatcggttggcgaagcagagcatgccccacattccatcacctccaaatttatcacctttttctctgtagcgggttacactgttgacccaaaatgcaaacggtttgcgtttgtggagataagttatggcgttacgacgccgtttcattcttcggctctcacgtgtcgtttacgagtacccgtgtgtcgttttgcccaccccgaagaagaagcggattagtgtccatggttgctaagcgcagccccaaagcgtctcaagtacacctaccacttctcgcttcacctaaggatgaaggtatgaggtagatttaagctacactaactccctctgatttttttcatattgatcgaaatgggaatcaattgaaacactttggttataaggtgatacttactgattctctgtttatactagttagtgacttgagatgtgaatcttaaaagccaattattcgtaggctcttatcatcttgtgccactcttttcgagcttcagagcctctaagaactgtatttccatctggtgatggtctaggcaagtacacttctggatttccacgtagtcatggtcaaggccatgcaattttactcaaacctcctaattgcaagctaagaggtacttaagaaatgcataaggtttggaagttaatctgccaagtatgcgtcaagaaaaaacgtgggtgtccgtatgcctgatgatgccatttgtcaagcaatactaaaggagatggatgcaccgttaatatgtacaagcattaagttccagaaggaagatgaatggatgattgatccagttatgatagctgatacatatggaccagagggtcttgattttgttgttgatggtggtgtaagagtggccgatccatccacggtggttgacatgacaaaattgcctcccaaagtactacggcaaggaaagggtcctattttacattggatggaattggaagatgatcagaaaactgatgttgataaggatctcatccctgctggcatttgatagtgaccgttcatttcattgaagatttagcttgctaaaaccttttcattactctttccaacttcggtccaatcctctcgatgaatcttactctttttttcttgttgtttgggggaaagggaggcgcataaaaggaaaagaggaaaatgtatacacacaagatcaaacatgaaaatgtaaagtacatatttcatgtaaacaaaaaatcattttgccagtctttatttgttttatttgaaatgaattcccttgtttagatagtgcttttactcaatgaacgatggaaaggaagaaatttctttattccgggggtacaaatttgtaataataattttgttgtaaattattaaattaagttagcaaggagccttctggcattggggtaaaaaaaaaaaaaaa

SEQ ID NO: 33643 - DNA, 767 bp, Glycine max
  Clone ID: PAT_MRT3847_130384C.1
ctgaaactgtcaacccacacagcccacaaaaaaatcggttggcgaagcagagcatgccccacattccatcacctccaaatttatcacctttttctctgtagcgggttacactgttgacccaaaatgcaaacggtttgcgtttgtggagataagttatggcgttacgacgccgtttcattcttcggctctcacgtgtcgtttacgagtacccgtgtgtcgttttgcccaccccgaagaagaagcggattagtgtccatggttgctaagcgcagccccaagcgtctcaagtacacctccgcttctcgcttcaccaaggaggatggtttggtgtacattgaagcagacccatctgcctctgattcttggaaattggaaccaattgcgaatcttttgaaacaaggtgctgttggagtcattcctactgatactatgtatgcaatagtatgtgaccttagaagccagtcagccattgaacgtcttcgtagaatcaagaatatagaagcttcaaagcctcttagcatcttgtgccactcatttcgggacatagacaagtacacagctggatttccacgtggtgatggtcaaggccatgcaaatttattcaaagctgttaagcattacttacctggtccttacacattcatcctaattgcaagcaaagaattacctaagcaatgcataaggtttggaacttcatctgccaagtatgcgtcaagaaaaaaacgtggtgtccgtatgcctgatgatgccatttgtcaagcaatact

SEQ ID NO: 33644 - DNA, 359 bp, Glycine max
  Clone ID: PAT_MRT3847_130385C.1
ggagagaactagtctccccatttaaacccatcattcttagtcaaatcagtcagagggcgaggagctaatttcccatagtccttgatgaatttgcggtagtagccggtcagtcgtaagaagctgcacaccctctttacattttttggaaccggccactcaatcacacttttaactttattggaatccatggccacacaatctttggaaatgacatgacccaagtattctatggttgtttgactgaagtaacacttcttccggtttgccaccagccgttctttcttcaaaacatccaaaacagcagttaagtgcataatgtgggacttccaatccgggctatatatcaatatgttgtaaaa

SEQ ID NO: 33645 - DNA, 368 bp, Glycine max
  unsure (1)..(368): unsure at all n locations
  Clone ID: PAT_MRT3847_130386C.1
acctantggttgcttatanaccattgctacatnnnctgatggagtatttggagatcaggccgtacacnntananatagagcccgggactaccatgagcttctgggtcccttcggagaccataacaaagcctaagaaaaatgacgagaagcccagaatcagggcgaagcccagcaagcccgcggtgattctggtgcacggcttctcggccgaggggatcgtgacgtggcagttccaagtaggcgcacttacaaaaaagtacgctgtttatgttcctgatcttctgttctttggagggtcgacgaccgataaggccgagcggtcgccgaagctccaagcggagtgtttggtggcggcattgaggaagctc

SEQ ID NO: 33646 - DNA, 1179 bp, Glycine max
  Clone ID: PAT_MRT3847_130387C.1
aatcacatattgcttcagctaattcagaaagtgaaaaaggttttcagtggggaaagcaaggtagagactcgtttaagaaaaatcgatttgaaggttcgcaaggccggggttcaaatgctggtgactggaaaaataggaatcgcccacctagagcccctggacagagattggacatttattcatctggtgagcaggatgttctgaaggatattgaacccatgatgcagggtcgaggacgaatcatgcaacaacaggggtacagtgatggggatccactggctgctgaagatcaactttttgtacttgagaatgtctttgagcaccacccagataaagaaaccaaaatgggtgctggaattgattatgtcatggttaacaaacacagtagcttccaggaaagtagatgcttttatgtggtttgtaaagatggtcaaagcaaagacttttcctaccggaagtgtttggccaactatataagcaagaagtatcctgaccttgctgaatcattccttggcaaatattttcggaaacctcgtgctaggggggaccagactgcaacactagggggagaccagactgcaacaccagcgcaggatgaagcagccacttcgggtgagtagattagggttgtgtccataatattgtacagaaacggtgtagttgaggccactgaatagttcgtcatagctgaccaattttcctgtaggaaagtgttcctctttacggctgcgagacagttagatggtaatttttttttcacatgtgaatgatgatagcaaacacccttgtgcagatgttaatattgttctgatgattacagcacttatgatgtgcctagcaaactttgctcatcattttgtttaatccatcaatggcacctgggtttcagaccttgattggaccactgatgcaaaaatggcatccttgtgattagagtttcatgaatcagattgtggcttatattctgtttaataggttactaagcatttccgagttatatttaaaaaaaaaaaaaaaaaaaaaaaaaaaaaaaaaaaaaaaaaaaaaaaaaaaaaaaaaaaaaaaaaaaaaaaaaattttaaaaaaaaaaaaaaaaaaaaaaaaaaaagggggccgttttaggggtccaaattttccttccccgtgcttgcaaggtaatagtttttttttggggccccc

SEQ ID NO: 33647 - DNA, 254 bp, Glycine max
  unsure (1)..(254): unsure at all n locations
  Clone ID: PAT_MRT3847_130388C.1
gtaggcaataagtatggattaacctttcagtcctcagaattcaaaagtgtgtccatcagtgaaatttgtaccaactatacaccatttgagactacttgacagacagtttggtnaaaccaaacctaaatnaactaaaaaaatacccccctcagcgggctcaaagagggcaattaactcccccacaaatgaactatttacacttaccacactttggggattaaccaaataaccccccttaaacaggtccttctcct

SEQ ID NO: 33648 - DNA, 490 bp, Glycine max
  Clone ID: PAT_MRT3847_130389C.1
aattcggctcgagacggctgcgagaagacgacagaaggggaagtagacatatagcgaaaggttttcccatatttatttatctagaataaccggctaatctactctttaaaaaaaatcacttgaaaatatggtataatcatttaatattacaagtgtaaaatattttaacttttttattattttttatatttttaatacatgtttaatttctaaaaattaaatgagtattaatttagtctttgagaaaagtattgatcacctaaattggttgttgaaaatatgaattgaaatgataaggaattaaaaaaagtatcaacttaattgggtcaagtaattgtattctacttttatacaaattaagagaagtttgtgttggggtgaaaaaaagtatcaattaaaaatttgttaaacctttagggtgtgaatgtaatttgaccattatttgtttatgctgaaattggtactttattgtacggggggtcattattat

SEQ ID NO: 33649 - DNA, 472 bp, Glycine max
  Clone ID: PAT_MRT3847_13038C.1
aaaatatcacacagtttacacattattccgactatcaaaagaggtgaggcaatttccaaatggactgtgcgttcttgacatgatggtcatgtgtaaaatcctttattgaagtaatcaggcgaacgccactacagataacacaaattccagatcagtgctaggattgcctagttccagaagatctgtcaataacctgaggaacagatctagctggcataagagtattaccagcaatgtcaaaatcttgagaacttcccaagagattatccaaaactgttgactgtgagggattgtcaatgaggaagctcagagtgccatgaacattgatttgcccacgtggaactccacattacaaaaccatgatgaggaccacatacgtatattgggaagatcaattgcgatgaatgaggattcgagcttgtgcagttacatgagtctgaatgctctgtacatgtgctgtgtgtaaaaacac

SEQ ID NO: 33650 - DNA, 282 bp, Glycine max
  Clone ID: PAT_MRT3847_130390C.1
ggttttattcttgaacagatgtttatttaattttaggggacatagggtactactctgtccttactcttatgagtctttgtaaagggatgattcttatttttggacccatgatcctgatagggacctaattaagcggggcccctactatttttggggcctgagttctgcctttctaatccttctacttaccccgcattctatccctaaaattctggcccctttctccaaaaaactctggtgccctttcacctacccatcaattaccccttaattctcaggtgc

SEQ ID NO: 33651 - DNA, 1052 bp, Glycine max
  Clone ID: PAT_MRT3847_130391C.1
gttccgggcagaagaatggatcaggaggttgttttcttagtggaaggaaattgagggtgaaaaaggagagagcagcaattggaggacgatcgatgcgcacactgtagtgcccatcgatcgtcctccaattgctgagcctgacagacctctatggttcccaggcagcacccctcctccatggcttgatggcactctacctggagacttcggctttgaccctcttggtcttggatctgacccggagagtctgagatggaatgttcaggcagagctagtgcactgcagatgggcaatgttgggtgctgctggcattttcattccagaattcctaacaaagattggtgtcttgaacactccttcatggtactcagctggagagctggaatacttcacggacactactaccctcttcatagttgagctctttttcattggctgggccgagggtagaagatgggctgacataatcaagccaggctgtgtcaacactgaccccatctttcccaacaacaagctcaccggaaccgatgtgggttaccctggtggcctttggtttgacccccttggttggggaaccggttctcctcagaagatcaaggacttgagaactaaggagatcaagaatggcagactggccatgcttgctgtcatgggtgcatggttccagcacatctacactgccaccggtcctattgacaacctctttgcccaccttgcagatcctggccatgctaccatttttgctgctttcacccctaagtgaaaaggctaagatcaacaatcagattaccagctgtttgggatgagaggagtgtttatatatgtctgtagaaattaagcttgtaatatggctacttctatgtcatatatgcacataatatcataatccaacgtgccgacacctatttaagttttagatgccatgaatgtaagttcaggtaataatcccatttgtgcataagatcataacccaccttgagtatattaatttcatcattcacggcaaaattaatctgagaaaaaaaaaaagaaggacattttctttattattt

SEQ ID NO: 33652 - DNA, 973 bp, Glycine max
  Clone ID: PAT_MRT3847_130392C.1
gggcacgaggtcattgcatatacatacacgcgtcatcaatgcccatgctttagattaccttgtccaaaaccaaaactttttgtcaattcatttcttgttgttagactctgcttctttctccaacttcacacacaaaaaaacatggcaaaggatagaacaattggtgtggctctagatttctccaaaagcagcaagaatgctctgaaatgggcatttgagaacttagccgataaaggtgacaccatttatgtcattcacatcaacccaaactctctagacgagtcccgcaacaagctatgggcaaaatctggttctcctcttattcctttggtagagttcagagagcctgagattatgaaaaagtatgatgttgaaattgatattgaggttcttgatatgcttgacactgcttcaagacaaaaagagatccacattgttacaaaaatatattggggggatgcaagagagaagcttttggatgctattgaagatctgaagctggattcactggttatgggaagcaggggcctcagcacaatccaaaggatcatattgggaagtgtaagcaactttgtgatgacaaatgctccttgccctgtgactatcgtcaaggaaccacctagcagcagcaagtaaagatgatcactttgggagagaacatttaaatttcatatgatatttttcttggattgtacctgaactagttgggtcaattcccttacagttcgctcctttcctaagtattagtttggtgtctaagacgagaatttgaattatatataagatttactgtactttataactttcactgcttgactttattgatggaataatttaatttgagtgccatataaggtcatcagtcctccaaaattttcttgtaataattgaatttctgtgatttatattaattaatcttgtggacaaaaaaaaaaaaaaagggcggcggctcgcgatctagaacctcgagcga

SEQ ID NO: 33653 - DNA, 617 bp, Glycine max
  Clone ID: PAT_MRT3847_130393C.1
ctcttctgtctgcttcccagattctctatttttgcgcgtaatcggtatcatcttcttttcctaatccaatttgatttctgcttattcttattttcccgcgttaatcaaatgcttagtttggattaggtttttctttacaaataattttggattacaatttgctattgcttttcggttaattgactgattagaaattcactcgtttttagttactatttggatttgatgttgtctttggtgcgtgttttggtttgttttaagaagcaattttttcattttggatgctatgaaatgaggtgaactttgatatgaactatgcaaaagaaaaaaatatcgcatctgtgatttttttgttcctcaaaattctgccgtgtgaatcgtctcctgatcttgattaaggtgatatggtcatatgaagaaagaaagacataatttttagcataaaagaatcaaaattattggttattagattcactttttgtatcatgaaagaaattgtgcgtgtatctggttgctaattcgagtgctattagtctgtggtttggttggtttgtaaccccgctacttgggttatgtttgattgtatattatcctagagaaataaaaatttaaattat

SEQ ID NO: 33654 - DNA, 2180 bp, Glycine max
  Clone ID: PAT_MRT3847_130394C.1
cattactttgtccaaaaccacaacctttgtcaatttctttcttgttcgactctgcttctttctccaacttcacacacacacacaaaaaaaacatggcaaaggatagaacaattggtgtggctctggatttctccaaaagcagcaagaatgctctgaaatgggcacttgagaacttagccgataaaggtgacaccatttatgtcattcacattaactccaactctctagacgagtcccgcaacaagctatgggcagaatctggttctcctcttattcctttggtagagttcagagagcctgagattatgaaaaagtatgatgttcaaattgatattgaggttcttgatttgcttgacactgcttcaagacaaaaagagatccacattgttacaaaaatatactggggggatgcaagagagaaacttttggatgctattgaagatttgaagctggattcgctggttatgggaagcaggggcctcagcacaatccaaaggtgcctactttttttgtcccttaatttcttgattttactgttatattcaacatctctcatcaataatttcatgagaattattcgcatagatattattagagttgatatttgtggaatttttttttgaagatgatatttggggaattagacaatataacacctatcttttttctttattttattttctaaggtgagtaggaccttgttgtaatttgttttcgctgtcacatttattgtttttcattttcttttgttacgagtgtggctatttgttccaatcatggggatttttgcttataacaattccatgtgatttacagtattatttctttgttgtgattatctgcatttattgaaaatggctctcattgatatgtctgttcttttattaaaaaaaaacaggattatattaggaagtgtaagcaactttgtgatgacccatgcctcttgccctgtgactatcgtcaaggaaactagcaaggaaactagcagcagcaagtaaagatgatcaatatgtgaaatttaaatgttctctccctccgggcagaagaatggatcaggaggttgttttcttagtggaaggaaattgagggtgaaaaaggagagagcagcaattggaggacgatcgatgggcactacagtgtgcgcagttgctgagcctgacagacctctatggttcccaggcagcacccctcctccatggcttgatggcactctacctggagacttcggctttgaccctcttggtcttggatctgacccggagagtctgagatggaatgttcaggcagagctagtgcactgcagatgggcaatgttgggtgctgctggcattttcattccagaattcctaacaaagattggtgtcttgaacactccttcatggtactcagctggagagctggaatacttcacggacactactaccctcttcatagttgagctctttttcattggctgggccgagggtagaagatgggctgacataatcaagccaggctgtgtcaacactgaccccatctttcccaacaacaagctcaccgggaaccgatgtgggttaccctggtggcctttggtttgacccccttggttggggaaccggttctcctcagaagatcaaggacttgagaactaaggagatcaagaatggcagactggccatgcttgctgtcatgggtgcatggttccagcacatctacactgccaccggtcctattgacaacctctttgcccaccttgcagatcctggccatgctaccatttttgctgtaagtttattcatcactacaacatcctatactaaccattctgcgtttttattttcttactcactttttctttattacaggctttcacccctaagtgaaaaggctaagatcaacaatcagattaccagctgtttgggatgagaggagtgtttatatatgtctgtagaaattaagcttgtaatatggctacttctatgtcatatatgcacataatatcataatccaacgtgccgacacctatttaagttttagatgccatgaatgtaagttcaggtaataatcccatttgtgcataagagtcataacccaccttgagtagtattaatttcatcattcacggcaaaattatctgagccaaaaaaaaaaaaggggcggccgctttagaaggcaatccaaggcttacggtagcgcggtgg

SEQ ID NO: 33655 - DNA, 172 bp, Glycine max
  Clone ID: PAT_MRT3847_130395C.1
aaaatctggtcgcaaatgttaataatattgaaatttttgttttgggcggggcaacaaacccaaaagagggcccagatatttttcagtcccaaaagtacaagaaaccacattgtaacaaaagatggtcccaaactttggtgacaagaagagagttcttatttgtggaggggga

SEQ ID NO: 33656 - DNA, 322 bp, Glycine max
  unsure (1)..(322): unsure at all n locations
  Clone ID: PAT_MRT3847_130396C.1
ggacccccaagatcactatatactaattccaaacgaaaggaattaacagaatttgaggggaaagagggaagtctattaaattttccagcagcacaagctgaacaaaattcaagcaaatttttatttatggtgggaatattacaatgtttgagaacaggttgtaaaacatggctatttggatgaccaagtctgtcatgccaaatactattggacctattacatgaattacatgatcatctgcaggaaaaaatatcttcattagtaatcttagactataatngcatgtgtgtgcacagacgttctgtgctttgtgttctgtaca

SEQ ID NO: 33657 - DNA, 439 bp, Glycine max
  Clone ID: PAT_MRT3847_130397C.1
gtgtcaatgacagtaacaacagataatgagaagaagcatgaagaaaaagaggaaccaaaacaagtggcgaacccatgggaagtttccgccaaaggcaaagtggattacgacaaactcattgaccgggttggatgaagctttaatttggtgtgtatagtgcatcacctcttacactccccacgtctttctacgatgcggtatttttttagcccaccggtacctccatgcattttctccattcactctttgcgttatttacttaaacgaaaatttgatgatgttgtttctctgtgtcacaacaatttcatggagattctggacgcatatgagaggggagataggttctacttttacaccggacacggaccatgctctgaggtcttgcatttgggacacttgattcccttcatgtttactaatcacttgattatggagcgag

SEQ ID NO: 33658 - DNA, 426 bp, Glycine max
  Clone ID: PAT_MRT3847_130398C.1
gatgtgtctttttattttttttttttgcctttttttagtgtgtagaattttcttataatctgctccacaattaggcctcggaccgaccggcctgtgtcagggcacaagcccatggcataagctaagatgaagtacagagaaaggcagggcttgccatatacatggggcggggacaagatatggaccggacgggggactatcacgtggaggaccgcgctatggaacagagagtttatggagcccactgcgctttattgaaagcacaagaggacgtaatcggacgcctcacctgacgtcatgcaaggtgaaacgccaagaatgccacaatgtgggccttagagctcctgagggaaaacatggcggcttgtctgtaaggccttgaaaaaacaacaggaagactgggggtggaggacccaaaaccccttg

SEQ ID NO: 33659 - DNA, 224 bp, Glycine max
  Clone ID: PAT_MRT3847_130399C.1
agtttcaaattctcgccccccgaaaacagtctttttttagcctaagcagcaggaatgttttccatagcttatataaactgttgttcaatatcaagaaagatcactgtttccattactggtttgaccccctttaaccatattgttgtatatacaaccacttgcttaaggacctgcagaatgttcactacttagacccaccctttgataacattttttttctgtaa

SEQ ID NO: 33660 - DNA, 168 bp, Glycine max
  Clone ID: PAT_MRT3847_13039C.1
caacccaacaagcatgctggtaccgtcatcaaactgcacaccgtctagaataataaaccaccctgactttgtagcagtagcagtggccgatatacatattgtgcagactacccagtggatactgtcggatgaaacatggtggagcatggatcttatatgataacattt

SEQ ID NO: 33661 - DNA, 293 bp, Glycine max
  unsure (1)..(293): unsure at all n locations
  Clone ID: PAT_MRT3847_1303C.1
cncgtcntcnctcntnnnntcctccccncnctccnncnctcccttntccgtctcctctntntcngncntcttncgnntttctntccncctcnccnncnnnnnnctcccnccntncttncnccttccccnngntnngnctccntnnccgncgccttnccncnnncggntccccgccncnccncnccccccgcntnctncngcncgtncncccccctcncntnnntctncntctcnnctcngngcnncnccntctgcccntcngncncggtnnccnccnctgctttcnncctcnc

SEQ ID NO: 33662 - DNA, 370 bp, Glycine max
  Clone ID: PAT_MRT3847_130400C.1
attccaaaatattttcgaattattgaagaaaaagggaaccttcaaagcccagatttttgggaaagttattttatctattccccaatttaccatgggttgtggccaattcaaacttattttacttttatttgaagggccaattttttgaaatattttggctacctggtggtttctttaataaaaattttttgaaagaatcaagaatggacccggccaaaattttaacccaaggatggttaatttggggccaaagaatgggaaccaaaagggttaaaaaccacttggttcacacaagaaaaaactctttttaggccttgctttttttttgccaccccccagaaattcagatatattaaggatggggggaaag

SEQ ID NO: 33663 - DNA, 357 bp, Glycine max
  Clone ID: PAT_MRT3847_130401C.1
atatcatacacacatctttttctttataacaacaatctctattttatacataaattattatttatattataatttctttatttttggaaataccaaaacttctttaagatcctttttactttaaaacaccctataccattcaacacataatttattcttcatttttaatcccaaaacccaaatattaccttattatttctatacccacaataatttttcaatccacacaatccaattattaacactttaaataacccatttttttttttcccttatttaaaaataattccaacaaaattcccaaatttattattatacccatctagaaacccataaacccaaatctttatcaaacac

SEQ ID NO: 33664 - DNA, 389 bp, Glycine max
  unsure (1)..(389): unsure at all n locations
  Clone ID: PAT_MRT3847_130402C.1
ttttattttttttttttttttnanaananaaaaaaaaaaaatattttcggccccaattaaatttaaaaaaaacctcgcttattttttttacaacatgtttttagaaaaaaaccaaaagttaaaaacgcatccatttttttaaaagttcacctgactccacactgccgcaatgtgcatattaaaccccaaactcaaatggtataggccttaatgagggacttaatggtaaaaatacgccccaacccagcctgggtttttatagacctgaacgtttcataacgcaaaaagaggtccaccagaaacaacctgcacagtagccccaccagatttttcccgggacattggttatttatctccgaaggtttctccggctccctcccattcgacca

SEQ ID NO: 33665 - DNA, 342 bp, Glycine max
  Clone ID: PAT_MRT3847_130403C.1
attcttaaagtagggcagcatgacaagaccatgggtgcaacaggtgacactaacgtcttagctcagatgatcgatgaagcggaaggcctggaaaagatcgagaacctacagagccacgataacaatgaaatctatgaaaaggctgtgaagcttcttgagacatactggatggaggaggaagatgacgcaatggctactgccggggaagctgctcctgctgtttttgactttaaccaaggtggcaaccctcctggtgctggtggtctgaacttcaactgatacagtctttgatcagaatggtgttaattccttcagtgatgggcttggcattggcttgtcgtg

SEQ ID NO: 33666 - DNA, 253 bp, Glycine max
  unsure (1)..(253): unsure at all n locations
  Clone ID: PAT_MRT3847_130404C.1
aaagggtgnangtgtgattgttgtttgttttgagatnantggagtnanattnngtggaanaagtgananttannttgatagtnttgtgggnaaagnattgtttggagatggagntgntgntgtnattgttggttttgannnaatttnaaaagttgagaagtttttgtttgagnttgtttggaatggaanaaaaattggttnaaaaattgaaggtgttattgatggaaaanttanagaggttgganttaaattt

SEQ ID NO: 33667 - DNA, 423 bp, Glycine max
  Clone ID: PAT_MRT3847_130405C.1
atgccacacgaaacccaacatttattcttttgttatgacgttattgaaaaggagtaagtatttatggctttgcccccaaatcaatccaacaacaaagcccaacatgaagcaagaccaagttttaggatcaacaagtcacatttctttactccctcatgaacaacaccatttttttttaccgggaaaaacactcctaacaacttctaaacaacaaaaaaaattcaaaacttaccccctcattattcatttttttttaaaatgccaacttttttacacaaaccctcccccttcatatctatttaaccactatttttttatgggccacctccgcgtttgtcgggtccacatcaaaatcacaacaactttatgaacttccgaattttttttgcgaaccagccttttcttgtggccgtggtggtggtg

SEQ ID NO: 33668 - DNA, 366 bp, Glycine max
  Clone ID: PAT_MRT3847_130406C.1
ctattttcttatctccttgctccaaaaccccttattcaggggcaccgctgatagggttaggggtagggttagggtttttccacacattatttctctagcaatatgcttctaccactgtcccctcattttctctgtcactgtcttcaaatgtaactcatatgccctatggcttcctctactttttcttgtcctctaaggtcgtacctttctccctatcctccatctatggatatcctcaagaggggaagacccgaaccctgctttagtttacatggtggagtaacgaaaaccaaccaagaaacggagtccttatatactggtgtttgaagcagatcccagccattgtcccaagtttttaccacctgc

SEQ ID NO: 33669 - DNA, 234 bp, Glycine max
  Clone ID: PAT_MRT3847_130407C.1
ggaagcaggggcgagcaagaggatattaatgattttaacaccctttttttcaatcatgaaggaatgccaagaaagacattttaatacgatattgatacctatctttagctcatttacatggataagaaaactcatgacaaataaataaggctaacacagttcatcaaagtttatcctacacttattaacctgagtcataaggaaatacagatttcacatcatattcttaccaat

SEQ ID NO: 33670 - DNA, 161 bp, Glycine max
  Clone ID: PAT_MRT3847_130408C.1
tcataatgttggaagcattatcttccagtgatggtatcgggagtgctatcgtatcaaaagtccacagtaggaccaatcccaatattatttcctttttttttatttatcctacagtttgagagtgtttaatattggttttaggcatttactttctccagatt

SEQ ID NO: 33671 - DNA, 273 bp, Glycine max
  Clone ID: PAT_MRT3847_130409C.1
gggtcccaggtcccaaaggcaggggttaattaaaatcggggtggaggggcccttaaaccaaaaaagggggggggcccttaaaaaaccaaaagtgtttattttaacaaaaaaaactcaacctgaaactttttcaaacccatggccaaaattaacaccccttcggccttaaataaatccaaattttaacccttaaaaaacagggttgtttttaaaaaataataaacccagtttttccccattccccccagccttttgttgaccaaatttttttag

SEQ ID NO: 33672 - DNA, 259 bp, Glycine max
  Clone ID: PAT_MRT3847_13040C.1
gagcgagttcttgtatgagcaggtaaaacttggctaaatgttgtccagttgaattcatagtatggatggatttcattaagatataagacaccttgacaaatgcatataatacaatactatatactatataccacttttttaaatcttttttgtgtgcatgcgtcttaaaaatatatttaaagttaaagaggacaagttcttgttcacaaatcacagacctattacctaattttaatatggatcataaatttattttttc

SEQ ID NO: 33673 - DNA, 208 bp, Glycine max
  Clone ID: PAT_MRT3847_130410C.1
gaattccacggtcgacccacgcgtccggtatttagatattcagaaccaagagaaattcaggcggtttgcacagttactggcgccgggttagggaacacatggagcctaaacttcgtacataattaagtgcgtttctgttctaagaagaggcaagcattctagttcttaagataggtattttatgtgtgtcgaattaacaggtttattt

SEQ ID NO: 33674 - DNA, 848 bp, Glycine max
  Clone ID: PAT_MRT3847_130411C.1
ttggtcgcgtgggattggttttgcatttgtcttctttaacttgtcactccctctctctctctaatggcttcattttctatcacctcctcgcctcccacccttcacaaagccactatcaccgacccttcttcttcttcttcccacgccttccctcaccgttctcccttcgttttacgcatgccccacggctcgcgtcgccctcaaactcctcttgttttgcccaagattcaatctttgcgcaacgaaactagagctattccagttaccaaagacctgtgggataattcaattctgaaaagtgaaatcccagtccttgttatattctatgcaaattggtgcggcccgtgcaggatggttcaccggataatagatgagatcgcaacagagtatgctgggaaactcaaatgttttatagtcaacacagacactgacatgcaaattgctgaggactatgaaattaaggctgtaccagtggttttgatgtttaaaaatggcaagaaatgtgattctgtaattggtaccatgccaaaggagttttatgtggctgctatagagggggtgctcaagccctagtcatggatcagtgcaggcattgatgagttcttgtacatattttgtttccttttttcccataataggcatggtcaagtgagactgcttctttcgtaatgaatgttcccctttcaatagctatatttcctagggaaaatcttcttcagctatagagaatatcatagttgaaatttaagtgttcctttggtacttgattcgaacagttgttattcggaagctaagatttgtttttaaaaaaaaaaaaaaaaaaaaaaaaaaaaaaaaaaaaaaagggg

SEQ ID NO: 33675 - DNA, 228 bp, Glycine max
  unsure (1)..(228): unsure at all n locations
  Clone ID: PAT_MRT3847_130412C.1
ggagaagagaggancgagagaggggcacaagcgggcaaggcggagagagcaaagaggaagacgagaaggngcaccgagaccangaacacaccggacggcgggagcaccaaagcncaggccacggccaaggaagangaagggccccgcggaacaaaggggcgagacgncaagcagcngaaacgagaaanncagcacaagacagacgaaaacggcaaaagaaagccgaaa

SEQ ID NO: 33676 - DNA, 519 bp, Glycine max
  Clone ID: PAT_MRT3847_130413C.1
ggccccaccaaaacaaaggaccttttaaggggggccaaaaaagggtgggcacaaaaaggggcaaacactttttttccccatttatccttgcaatcaagcaagttacatttgcatgaaccccaagcttaggctaccaaaaaggccgagtccttttttaagggtccaaacataaaaataaacctaggggggaaacataaggaaaaccccctccaacattcaagggcccgcaaccaagggaacagggaattcaaaagggaaaccccttccatccaaagggggaaccctggggggcaaaaaatttcaaaaaaaaccgggactggggccccgacaatttggtttccaaaattgaagcaatggcagaactaagttcctgggttaccctggggttaaaaccaccaagggacaccaattccccataagcggggggggtggcattcccaccaaaaggtatggggacggatcctttaagtacaatcatcacaaaggccgggggtttgccgatgatggtggcaacggagg

SEQ ID NO: 33677 - DNA, 497 bp, Glycine max
  Clone ID: PAT_MRT3847_130414C.1
ggtttttttttttttttttttatttatcacaattggatctaagactcactattaaatttaatcgatgattaattattgttagtagtaaggtcaacggaattgagattctatctaaaagacaaaattatattcatgtatttataaaataaatagtaataattaaagtaatttgacattggtgtgtatgatagagactgaagcccggttacaaaattgtaaaatcatgcaatactgtgcagaaaatcgcaatcttaataaccctggtcagcagggatctcgttgagactttgctcgctaggaaaaagtgtttcttattttaactagcctgtccctgttgcctgaacaagaaagtgatagtggagtgctcttcaatgtgttacactgcattaaagctgttgctgatgatggaaaattatcattattcattagatgcttgctcttgttttctataattgttagtttctatttgtgaagggcttgaaaggatctggtgatga

SEQ ID NO: 33678 - DNA, 794 bp, Glycine max
  Clone ID: PAT_MRT3847_130415C.1
tgaaggagaaaaacagggcatttgccaccgtattcagcgcaggaccagaactcaagcaataaagcaaaaggaagattgggatgacagcacagtaagtagctatgtttcaaaaatgaggatgcagaatagaatggaggcttcaaccaggagggaaagagcactggcttatgctttctcacaacagctaagaatctgttcaaagagaagatctccaaaatttaatagaatggagtcaaatatgagttggagctggcttgaacgatggatggcaacacgccttcctgagacctcatcagttgaaagccatgccatgaagcagtatgacccttctaatggtagtcacaaattcacaatcatgacaagatttttggatgctgctggggaagaaaaggagagctgcgggtcaaatgaagtgccccttcattttgataactattccatcaattcacgagaagaaaaatttagcttcaaaccacatacaccaaagaccaacttcaaagctaggagaactgtttcaaggaggaaaacagtgccaagttatcaattccatgaagagcagccaaaggtaagcaagagagatggttcaggcaatgctagcaaggaaattaagcaaaaacaaaagcaagtgggaaacagggatgaaattacattaagcacctcgaaagcttctaatgtgtaacttgtaaccaaataaagtcaaattatgtgtctagtattgagatgtaatggttggattgtctagtagattgttgattccataaatcatatgtgtacattgtacataatatcgagtg

SEQ ID NO: 33679 - DNA, 271 bp, Glycine max
  Clone ID: PAT_MRT3847_130416C.1
ccggctcgatgccagcggaaccgaacggcagctagacccccggcggctagcgactgcacggctgcgccggctgaggaggtgaagcaggagcggcacctggtgctggcccacaagctctcccttctatcccactcctccgttgatgacctctccaaggtcgccctccgcgccgcagtcctcgacaccgtgaaatccgatgatatggcgacgctgtttgagtcgctgttcgccgggggtgtgctggatggggacgccgcctgctggccgacat

SEQ ID NO: 33680 - DNA, 1613 bp, Glycine max
  Clone ID: PAT_MRT3847_130417C.1
tcgggccttcagatttggactattctattgaagagtagggataatagaatccgtatcgtagcaaaacgcacgagttaggggcggcgatgggaggttcatcggaggatttctcggtggtggtgctggcgtcggacctcggcgtcgatgcgcgacctttcctcgaacacgatcaacagcaagaagaagagaattggcacgactgttcccagtacctctcccccgacgaggacttctccgatctcgatcagttgcaattcctccgcctccaaggctccgacaagaactccaatcgcattctccgcatcgtcggcaagtactttcccgcaactgttgtgagtgcggagcggctcaagcggtatgtgttcaacaaaatcattcgttgcagaaacagaatgatcacgaacacgagtctcagtgaaaagcgacacgacacaacacaacacaagctttattcttttttcttcgcttcttctgtacagcacccaagattgaagatgatagaccttgcgcgcgtgcagaaggagctcgtggaatgcagcaaggacgcggagggatcgggcatcaaagtctgccccaaaagcgacaaccttgttctcttgatcggcaccattcctggccctgtcggaactccttatgaagggggcattttccagattgatatcacattgccagatgggtacccgtttgaaccccccaagatgaagtttaaaaccaaagtttggcatcctaatatcagcagccaaagtggagctatttgcctggatatcttgaaggaccagtggagcccagcactcactctgaagactgcacttctttctgtgcaagcacttctctctgctccacagcctgatgatcctcaagtgtccgtggtggcacagcagttatctgaaagactatcagacatttgtttaacactgctcgctactggacagaaagttttgccaaggcttcgtctcgtgagtattgaagataaggtagagaaactcgttgcgatgggatttccagacgctctagtaagtagcatactagaagctgttagtggtcatgaaaagcttcactccaaaaagttgctgtagatcatcgtctagcttaggatgacgtgactctataatatgatggtgcccatatagacaatatgtttcaaattgaatacagtcatataaatctacttggtatagcgtataggactcttagtctcgttttctcctccctggataatactttgctcgactatttcccagtgattatagatatcagatatagaagaatgttagcacccaacaagcataatttgtactgactcaaaccatcactttagggtgtgccatcttcatctttcatcttcccttcaataatagagtgagtgcgtttgctttggtcactactcaccactctctgccagcttatgaaataacaaacatgcagcttgtttttactggaaaaaaaaaaaaaaaaaaaaaaaactcgagactagttctctccttgcagtgagttgccggaggggccattctgtattgggtacatgcacagcaccgttcagaaagaggacaattcccctggcatcaccatcttgagctggatctatgaagaactttctgctgatttcaaggaca

SEQ ID NO: 33681 - DNA, 403 bp, Glycine max
  Clone ID: PAT_MRT3847_130418C.1
gattcatctataaacttcattttcttcttattcatgggacaaaaatgcaattttgaggttccgcgatgatacattctgcaactgtttagtatttccagatgcttgctatacctgtctattttcactcacgcagcttttgcattatctcggggatcgcctttgacagacttactacaggcacctgatcggcttcctgccatttaggcgcttcattgtccttgatcacagtaacactgaccgttgaatcacattattcatttaattgctgtgtcattcctggttcccgtaagactcttttaccgtgtattgtgcacggcctctcactgtggacgctactagattacttgaacttccttatgcctgtaacataatgtctctacttggaaatattcaaatgtttatt

SEQ ID NO: 33682 - DNA, 381 bp, Glycine max
  Clone ID: PAT_MRT3847_130419C.1
cccactcgttcggcacgtggcttctgcagactttcctgatcattttgctaccaactgggagggcgctttcttcattggagtaatttgctcaccaatttgctatctttgcttccatactttcttgttcattttagtgtcctcttcactttcagttttttgttgagttttagggcgagtgataaagctgatgatggctctcatctttactatattgtttacgattttggtttggatcttttattcttcctaatatcttatcaactaatctatcaccgctgttctgcgtactgggggcagtgtgacgttaattggtacatatgtctttacaagtgtccatccgagaaccatctggaaaatttgctgctttagcttcaaaattca

SEQ ID NO: 33683 - DNA, 153 bp, Glycine max
  Clone ID: PAT_MRT3847_13041C.1
tctggggtgttttttttctttttgtttttaaaacacaaacgttcaaaacacgtttaaatagatgaaacaaccttcggcggtacctcaacatcatcgcgggcttggttttgttaaaatgatcagatacacgcacaattcaccaagactgttttt

SEQ ID NO: 33684 - DNA, 352 bp, Glycine max
  unsure (1)..(352): unsure at all n locations
  Clone ID: PAT_MRT3847_130420C.1
attgtttccatggaagttttgaaataagaataatgactgataactttgatatgatattatgataatttcagaaaatttagtttattctttctttctatttttattgcagtggtaactgcttantatnntactacttaccttgtttccatgaaaattttcaaataaatacgatttatgattgacataaaatcaggatagtttcntgaacttctaactatttctattattgttgccgtggtaactctgcttactacataactaccatgtgtgccntgcatatccacttaagccattatttccttttaagctttctggaatcttttaattttttttttatgcttatatgcttgta

SEQ ID NO: 33685 - DNA, 2038 bp, Glycine max
  Clone ID: PAT_MRT3847_130421C.1
cccacgcgtaaaaagagaatcccacaggatgcatatcgtctcattccgtgacagattctgtgtacgatactgtcatagagctaaaaagcaaaatatatgaattttttttttctccttttctggagaatatatataggagcacaatacaatctgagtcagaatgagataagtgttggtttgtttttttgttgagaagagagaatggctgtggcgtcgtcatcatcccttatcacgttgaaggtgaaaccttgcattttcgggtctcctcggagatccgcggtggttcggaattgtgcgaagtcaacggcggggacaatatcgacgagttggagcctggacagctggagggcgaagaaggcgcttcagcttccggagtacccagatgcgaatgaattggacctagtcctccaaaccctctcttcttttcccccaatcgtcttcgccggcgaggcgaggaatctggaggagaagctcgctcaggctgccatggggaacgcttttctccttcagggcggtgattgcgccgagagcttcaaggaattcactgccaacaacatccgtgacaccttccgtgtcatccttcaaatgggtgtggtcctcatgttcggtggccaaatgcccgttatcaaggtggggagaatggcaggtcaatttgcaaagccgagatccgattcatttgaggagaagaatggagtgacgctcccgagttacaggggtgataatgtgaatggcgatgcatttgacgcggcatctagaatccccgatccacagaggatgataagagcctactgccaatctgtgtctactctgaaccttttgcgggcatttgccacgggaggttatgctgccatgcaaagggttaatcaatggaatcttgatttcatggagcatagtgaacagggagacaggtaccgtgaattagcccatagagtggatgaggctcttggcttcatgaatgttgctgggctcacagccgaccatcccatcatgagtacaacagacttttggacctcccatgagtgtttgcttctcccttatgagcaagcacttactagggaggattctactactgggcttcattatgattgctcagctcacatgctatgggttggggaacgtacccgccaacttgatggtgctcatgttgaattcttgagaggagttgctaatccacttggcatcaaggtgagtgataagatggttcccgatgaacttgttaagctgatagatattctgaaccctaaaaacaagcctggaagaattacagtcattgttagaatgggagctgagaatatgcgagtgaagcttccacatcttatcagggcagttcgcagagcaggtcaaattgtcacttgggttagtgaccccatgcatgggaacaccattaaagctccatctggacttaaaacccgctcttttgatgcaataagggctgagctgagggcattctttgatgtgcatgatcaagaaggaagctacccaggaggggttcatttagagatgacagggcagaacgtgacagaatgtgttggaggctcaaggactattacttatgatgacttgagctcacgctaccacacacattgtgatccaaggcttaatgcttctcaatctctcgagcttgcatttaatattgcggacaggttgcgcaagagaaggctcaattcaactcgatcacttggaatttagacaagagggggtctgtcttcctttgtacctggatcacaatactggtcaaacatgtgttgagttttcttgagcacagtgaacaaatactctactgggagccactctaccgagtttcataagaacttaaaatagtcggcacaattaatagttgtgctgtatgagtgttacaagacagttcaaaacactgcaggtgtatgtacttgcaagtttgcacttttaagtttggagatagtacgtgtgtagtatttatgctcgactcgagtaaatgagtaataaataaagtttcaaggtacaacttacatcataatgcaaacaaatgaaatttattatatacgagatggttttacgt

SEQ ID NO: 33686 - DNA, 261 bp, Glycine max
  Clone ID: PAT_MRT3847_130422C.1
gcaagtcgttttggcttttcgtcaattcctgggctgaaatttcacgtggttccctcaaaatatccaaattcccttctctaaaacgttgctttttggatggcgttgaccgccccataaggtttctgttcacaaaggaattagaaaaagaaccgtccaaaaaccttcaaccacaaactcgacctgtgagggtcttccacttcacgaaggaaaaaatcgcggatctgaaatcaaaagctaacgcagaggccaacacggacaaaa

SEQ ID NO: 33687 - DNA, 393 bp, Glycine max
  Clone ID: PAT_MRT3847_130423C.1
cggctcgagctcgagccgtatcggctggaggcaacacagaccccacgaagaggaagaagaagatgaggatgagaagccacagtgcaagggtaaagacagacactgtccacgctcccgaggaagccaaagcataagcagaagaaactggcttgacgagaccatatgcaccatgagactttgacacaacatatggcagactttatcacctgacttctaccaccctcaagccggttgcgtcacaaccggcaccagtcttgactttccagccctgtcgcggctcagactcagtgctgagttaggatgtctacgcatgaatgcaatgttcgtgtcacactacaacctgagcgcgaacagcataatatacgcattgaatggacagtcatggatacaagt

SEQ ID NO: 33688 - DNA, 301 bp, Glycine max
  Clone ID: PAT_MRT3847_130424C.1
agaggtggctttgactgaggtgaaggaagacaggacatacaaggcgctgctgatcccttagccccatagacaaaagagaatgttttttttttcaagaacaggactcctctttacaactgtttctggttatgatgctgaaggaggggtggttaaagtgggaaaggaagagaagaaaattaaggtaggggatgaaagaaatggggataacaaagggaaagctttggaataaccaaaggagattggttcattgggtgagtacactgctgcagaaaagaggctatggggtaaaaaagtaaagaaa

SEQ ID NO: 33689 - DNA, 190 bp, Glycine max
  Clone ID: PAT_MRT3847_130425C.1
cagccgcggtaagggtatatcctcttctgctttgccctacaaaaggacaccccctagctggctcaagatctcttcgcaagattgtggaagataatatctggaatttttggaaggatgtgactccgtctgagattggtgtcattcttcgacgatctcacggtacagaacttttccaagcgtcactggcagc

SEQ ID NO: 33690 - DNA, 259 bp, Glycine max
  Clone ID: PAT_MRT3847_130426C.1
gtaagaattattatttcggttacattacaacatagggtgggtttttgggtttcgtaggcagctaaacacgctctctgttgacgcatcggttgagactgacatcaaccctcatttggaatcgtcctaacgcaagggtaggcatgactgaagaactctatctctcctgatcttatccatcgaatagaaaagcaactccattaccaccctcagatatatacccgttactatataaatatgcctgtttgtaacaacatgttca

SEQ ID NO: 33691 - DNA, 185 bp, Glycine max
  unsure (1)..(185): unsure at all n locations
  Clone ID: PAT_MRT3847_130427C.1
ctggctgtgtcntgctattgcagctcccttgcgcttgggctttgcgttcgcgtgcccttccgcttaactgggtggctgttgctctttggcctcactgcgtcttcctcggtctccccctctttgttgtttctgctttggggctcatggtctttttgggggtggggttggctctccgtccttctgtc

SEQ ID NO: 33692 - DNA, 702 bp, Glycine max
  Clone ID: PAT_MRT3847_130428C.1
ggtaccggctacgaattcccggctcgacccacgcgtcagagaagacgacagaaggggacttcatattataaaaataaatgtagacagattctgcctggctgtgatgcacttaacactaagaaaaagatggcactcagaagggcaacccctaacaccgttcatatgtataggaatttttcttaccaccacctaaagtagtagaagcctttgaaaatttgacacagtgcaacaaaatcccttcaccttatctctttttcttcatgcacagtcatcacctttgtcttttccatggctaaaatctggattgaggtgtgcttgatatctgctcgtggtgtgaggggttctccctcactttggaagcgtcaatggtatgctgtagggtgggttgatcctaagagcaagtactgcaccaaagttgacgcttctgggaacgccaaccctgtctggaggaccaagtttgcccttcaggttgataactctgagccagatcttgcactccacgtggaggtttacagcagagatcctgtgttcttaactgagaagcttcatggctcagctaccgttgttctcagagaggttctgactaacgaggtccacaacaactctgaggaagtggggagctaccaggtgagaaagagcaggtctaataaaccaagtggcttcgttgatgtttcaatccgtgtttctgaggacaaggaggag

SEQ ID NO: 33693 - DNA, 948 bp, Glycine max
  unsure (1)..(948): unsure at all n locations
  Clone ID: PAT_MRT3847_130429C.1
cgcgcncgtgagctcggaattcggctcgagcaactggggtggttttctgacatgaacaagtacaaccttattggtgatcttcctaagaagtcttggcccaagaaactgaaacagatgaagcagttctggcttggtcagagactcaaggcctcaagggcttacctgaaaactttattcaacaaatctggttgctcagacaagttctgcgccagtgctgcagcaagcaacaacattggagcggagaagaagtcatcaaggtgcaaagagtgtcagaacaagtacatgaaggttgcaaggagaaacccttttgagagtttctatgatggcaagcaccaggtaacttgttctatcatgaagagcatcaaaagagagatgcttgaagttgaagatgatttctgtgaccacaggaggtctttctctggggttggtcagcgacattgttccacaaaggcttcatctttgtccacatcttcatccgggtcctcttcttcgtcttcatctttttctttcagctcagctgggtactatgatttgcaacttttcaagaggagcatcagcgcgaattatgagttggaaagttcaattgagggagccattgctcattgcaaacagtctctgcagcagtgtggttcaaagaatggttcggatgatagcaggatttgttcttaatttgctaccaaaatgcaattggtgggaattagtgaatggccacactagccaacaccatagtgtgtgtgggtgtgtaaaggggtgatagtgttgactgttgaaaaaaccttgtaagagaagaaagaggcatttttagttgaaatgctgtagcattttgatggagtttactgtttaaattaatagcttgggttttccagcattaatttgttaaaaaaataagataagattcttctgctctaaaaaaaaaaaaaaaaaaaaaaaaaaaaaaaaacaaactga

SEQ ID NO: 33694 - DNA, 486 bp, Glycine max
  Clone ID: PAT_MRT3847_13042C.1
ggctcgagtggtcgattgatcaaagtaagagatggtggaactgattggggctggggtgttgctgtcaatgttgttaagaaaccttctggaggcggttatatagttgatactttacttcattgctcacctgtttcaaatgagaacagttttcggtctaaaccatgcccgccttgacctgtagagaaaggtgaaatgcatgtggcttctgttcaattaccattgatctctgccctcggtcaactgagggtatccataccttccgatcttcgacccttggaagcaaggcaaagtatattgcttgctgacaggagctgggcaaccgtttttcccagggtcttccaaagcttaaccctgtaaaggacatggacgtacgggactcagaaatagctgaactagtgaatcaagttgatgaacttgagataaaattgaccactcgtcctatgcataagcatcaagatatggatcaaattagatgctttgagagga

SEQ ID NO: 33695 - DNA, 714 bp, Glycine max
  Clone ID: PAT_MRT3847_130430C.1
cccactcactcaaaaacctctccttttttctttcatcattgtaacaacaaacaaaccctcttctatggactctcgccggaatttcaaattccggccactctccggctaaatgctcccttcctcggagcccgacgacgacgacgatgacgtgaaatcgtgatcgtgaatcgtgatcgccccttttttattacactctcatttgttcactgtcactcgcaatggcggcgacgaacgccggcttggcggcggcggactcggcctccgccgacgaggcggcggcgaagacggcgcagaagcgctacgaggggcttctgatggttcgaaacaaagcgataaagggaaaaggcgcatggtactggacacacttagaacccttgctggttcacaacaccgaaacggggctccccaaagcggtgaaactccgttgcaccctctgcgacgccgttttctccgcctccaacccttcccgcaccgcctccgagcacctcaagcgcggcacgtgccccaatttcaactccgccgccaaacccatttcttctgtttcccctgttctccttccttcttccacttctcctcctccttcagcttctcccttcaaccaccgcaagagaaccaccacttccccttcagcttcgggttcaggctcgggttctctctaccacgcaccctctcggttcgggtcaagtttgattcctcagcagcagcatttgatgc

SEQ ID NO: 33696 - DNA, 240 bp, Glycine max
  Clone ID: PAT_MRT3847_130431C.1
tttccttgacaaatcatttttcatacatttattgtggtgggtagccaatgatcaaaacgagggagagaaggatcttcctttattacatgccattaatagaaattatttccatgttatcatggacccaacgacctagcttcatataaataattaataacctataaacaaactttctggtcaataaaacctataaatgacccactatagtgatgttcttccagtgtaataaatagttccacc

SEQ ID NO: 33697 - DNA, 180 bp, Glycine max
  Clone ID: PAT_MRT3847_130432C.1
ggtcacattctacaagaacgaagtactactacaagggaagaaaaacttagctactacggacggatcagagagagtggctcaagcaatggcatcgaattctggcttgcgtggttcctctcaggatgtgttggaaggtagccctcatgtgagtggctccacacgcctgaatgtggggagtgg

SEQ ID NO: 33698 - DNA, 232 bp, Glycine max
  Clone ID: PAT_MRT3847_130433C.1
ggttagattgagcaggttcgggaggccgcaaataggatcagtggaaaggagaagattaggtgattttgtgttttatgaattctgtccactgttgagtggaatggtttgggatagaatggaataacaaatgtcattgttggactgattggaataggatgtataatgtgatgaaaatgaaatatatttcagtttgatgcttttaaaaagaaaaaaggtgtcaaaggaaagacaa

SEQ ID NO: 33699 - DNA, 641 bp, Glycine max
  Clone ID: PAT_MRT3847_130434C.1
cacgcgtccgctccatatttagcccaggtcttgaacttttccgtaaaggtacttctctatatatcaatttgaatttcttttcttatttattttggtattttgttagatgttcattggtatatgtatctgaaaggatttagtaatagggaggatattgtacatgatagctaaggtatatttataatatcccttgtgttttaaataatataaattcttgtcaatataaatatccacttcccatttatttttagtcatattattattgaatatagaatgatcaaatagaaatagcattttaggttcctgatatgactgcctgatgaacatgtaaaccttgtacctacaatttcatgaaattttatttaatccttcttcctgtttgcttgaacaacatggaatccttgtttgcagggaggcaacaaactggaacaaaactagctgagttctgtgcccatgctctgttaaccttggaagtgcttatacatcctagggcacttccaatggtagattatgcctatgcaaataacagttcttttggtgaagctcacagtaatctccaacatgaatattttggctggagcaacagtacgccatatggtttaccacaagatcctcctgactatgatgatgatctgtgtgct

SEQ ID NO: 33700 - DNA, 590 bp, Glycine max
  Clone ID: PAT_MRT3847_130435C.1
ctgcgagaagacgacagaaggggaaggaagagaatggataacatcacagcaagtgaagtagctggtttcggagtgggtgctgtgctcctctgtgccactgttgctgccaccaaagtcgatgctttcttctcttcttctcagcgcagctcattagggatgtgcaagcgatgtggcaatcttaggcgattggcttgctcgacatgcaaaggaactgggtctatcagagaagggggaatacttggtattaaactcgtagaagatttgtttgaaacaattggtaatagtgaaccaaaggtgaagcagatagcatgtgtaaaatgtcaagccaaaggttacttttcatgtcctaattgttctgaactataatcactgtggttttatgttctatacctacaaggatttttgcccaaaacattcaatttcaacatgtaacattgtgaattgttattatagatggtggcatgcagcatgcagtttatcttctgctcctcttgtaaatttgcttcatgccttgttacttcaataaacataaattgaatacttcttctttgcctcaaaaaaaaaatactattacacataactattgctta

SEQ ID NO: 33701 - DNA, 520 bp, Glycine max
  Clone ID: PAT_MRT3847_130436C.1
aacaaaaaaaaaaaccttttttttggtcccaaaggttaccccccttcctaaagggttgggttcccaaaaaaaagctttcccgaacccccaaattaattttacgggacccgccccaaaatttcccccaaaacccccgattataaactttttggatctgggtaaaaaaggaaaaaaaaaaaaaccggccccaaaccaaaaaaggggacaaaggcccagggtttttttggaaagggctttgggccaaaaaaaaaaacttttggtacccccacctttcagttttggccggccgaaataatgaggctgggcgtggcaataaaaacccgggtccttaatagtaaaaaaaaggcttatttaaaggttaccttgggaggggaaaaccccgttttaacggcccttaaacggaaaagaaaaaaaaatcgttaccaacatagcatttaaccaccccggcaacaaaaagggacctaccgaattttgggggattaaaaccatttttaaaaagctggaacccaaaacttaaaaa

SEQ ID NO: 33702 - DNA, 103 bp, Glycine max
  Clone ID: PAT_MRT3847_130437C.1
ttgaactatggagacgggcggagaatattggactaagaatagctgacagctggttgatggagactgagaactggcgtctgagaaacttgagtggagagctgag

SEQ ID NO: 33703 - DNA, 449 bp, Glycine max
  Clone ID: PAT_MRT3847_130438C.1
acgagtttttttttgcgtattgatcaagtctgaattgataagtcttaaaagtgtttgaatttacagggacgggtatctttggttctatatctaggaacaccagaagtatacaacatttattttaggtgacaacaatggtagttagttcacattcaacgaactcataaacacgcaccctatctcaccagcaacccaacttctgaaaactacctattacaagacaaattattttccatgttcatgcatataccgccgaatcttcagcaaaacacacacgaccaacgcctgaattccatgtaaatagaaaacattgacatttcctaacattcaaccatctttagcatttaagtttttttaagacacgattggaaagccaaaaacaactcattagtgagaatttgaccagcactcctctccatggaatggaaatttgtttctacaataacatc

SEQ ID NO: 33704 - DNA, 469 bp, Glycine max
  unsure (1)..(469): unsure at all n locations
  Clone ID: PAT_MRT3847_130439C.1
ccacgcatgcgtctaagtcttagggaatagtgctgcataggcttcaagtcaggaggaggggaccctcttagggagctaccttgaagcccattgtgagtgcaagggtcatatgcgccctcaagctagaaaggagaacaactcgctgctctgnnagaagattananngaggaacaagagggaacgggtgataaaanccaacccaggccacaagaaggggccagcgcgcattcacactgagaagcccctagcagagtctcttgtgattgttgaatacattgatgagacttggaagaacaaccccatcgagccttcagatccttaccaaagagccttggcccggttctggtccaaattcattgatgataaggttcttggagctgcataggaaatccgtttgcacagctgatgagaaagagcgtgagaagaatgttgaggaagcaattgaagcttcgcaggttcttgagaatga

SEQ ID NO: 33705 - DNA, 1519 bp, Glycine max
  Clone ID: PAT_MRT3847_13043C.1
aactccttccagagcgtcgattcccctaaacatgttcgacatttaatcacagtctctaagcacacattaataccatcggagaaggaccttccatctaccaacaacacgtagtattatttcattgatttctccctcttcgctctctctcagtgaccagagacagatgatgatggagatggcgaagcgaaacgctgtcgttgcggcactcgcggcgttggtgctactcgcggcgagtgtggcggtggatgctcaggagaactcggacgtgaagacgctggtgaagtacaagcacgggaagaagtactgcgacaaaggatgggaatgtaagggctggtcaatttactgttgtaacctcaccattaccgattatttccagacctaccagttcgagaatctgttctccaagcggaactcgccggtggcgcacgcggtcggattttgggactaccactccttcatcgccgccgccgcgctttttgagccggaagggttcggcaccaccgggaacaagacgatgcagatgatggagatcgccgccttcttcggacacgtcggcagcaagacctcttgtggttatggagtggccactggaggacctttggcctggggtctttgttacaatcatgaaatgagtcctatgcagtcatactgtgatgactacttcaaactcacatacccctgtactcctggtgctgactactatggacgtggagccattcccattttttggaactacaactatggtgctgtcggagaagctttgaagattgacctactaagccatccagaatacatagagcagaatgccacccttgctttccaggctgcaatttggagatggatgacaccaatgaaaaagtcacagccctctgctcatgatgcttttgtcggcagctggaagcctaccaagaatgacactatggagaatcgggttcctggatttggcactacaatgaacattctctatggggatggtgtttgtggacaaggtgatgtggactcaatgaacaatattgtttcccattacctgtattatcttgaccttcttggtgttggtcgagaacaggctgggccccatgacatccttacatgcgctgagcaggttcctttcaacccatcttccaaacctgcttcatcatcttaagattattatatttattagcatataatattgttgtgccaatccctttgaaagtgtaagttaataagggttcttgaaattattggtatgcaataactttgaactgtgtggcagtgtgggaattcattatagcattttgttcgttcttgtgtagaagtttaagtcatttgcaatatcatacgtcttgaaaaatttgtatctggtgtatatgtacgttatgggcgattttgttatttttattatatatacattccttggttgcaatgtaaatttgaatatggtcatgtcaaacaaatccactccgagtcatctaggtcttcatttgtgactaacaatataaattatttatgccacgtatttaaaattacaattaaaaaa

SEQ ID NO: 33706 - DNA, 761 bp, Glycine max
  Clone ID: PAT_MRT3847_130440C.1
agaaaagatcatatctgcttatatcttccattgtttcaattgtataatttcatctaaacaatattcagaaaaaatgaaagaaaatatcctcataaatcatgtttgctatctcccctactaaataattagactccatctatacctcaaaccccacgtaggatttatgtacaaacagacgaaagagggggcaaaaaataagtgaaatttaaagaggaccttggacaactttcaataaccaagtttagtcccactctgcctatctacccatgcatcgttaagctaagctatgtactcattcaccttttggctttactttgtattgtttggacctgaggtgacgattgtgatccaccactgagtgcagcagcagcagattcaacatgtgtaagaagatattcatatatcttcttcctcaaccggtcaattgtctctgctgatatctcgcatgattctccctcatccttgctcgatcctatctcatctaaccaatcattaacactctttagttgagtgagcattcctgctatttggtcattatctctcacaatagtgttcccatcactgctcaccaacctctcaacaaatcccaaaaaccagtctcgtgactgtaactgtaacatttcagccaaattaactacctcattcaggccatttcctctaacccattctgggggaggttgcactagctgcttctgcccatttaataacgcatcacctggtttgcgaagagttcctagggaggcatgcttggaataagctgc

SEQ ID NO: 33707 - DNA, 329 bp, Glycine max
  Clone ID: PAT_MRT3847_130441C.1
cttcccgtgttattcaagccgtaacgatatattcaaagagcaattcttctctcatgtgaaacttaatttatacatcctaataaaatttcaacaatcaactatgttaataacttataatcacatcatctaaatatcattaaatttgcccctcataattaaacttccatttctcatgtaagctcatcattaaaacaaatatttcccatcatactaattccaatacttctaaaatattttgcaaacatcctaacaatcaactttatatctttacccctaaacctttttttcatctattgaaattccaaagttaaatttataaaaacaaaatt

SEQ ID NO: 33708 - DNA, 273 bp, Glycine max
  unsure (1)..(273): unsure at all n locations
  Clone ID: PAT_MRT3847_130442C.1
cnantntancncangccctatacnaccaanccctancacananccatttnattcagtttccatcggctannctacanggttgcatttttggctgcagtgctacancatggttgtggtgagnncacccatggcacatnctagcntatacacgtgcgggcaggtgacgaatacnctgatgcaattgcntcggttacctccagtancggatgancgccgccgtcgggatgctgnaacggtgngaagtagcctcaatgccgccgacaagaccaccga

SEQ ID NO: 33709 - DNA, 521 bp, Glycine max
  Clone ID: PAT_MRT3847_130443C.1
caagggaaaaaaaaaacccctggtaaaatttttaagcaggggaattaccccaaacccttttaaaaaaaaaaaccccccaaaccaagaatcaaccccgaaaaccaaaacccttaaacccccaaaaaaaacccccccccaccccccaatttttaacccggggccttttcggggggaaattcccccctttagggtttttaaaaaacccttgggggtttttaaagggccttaaggggggtttttttcgggggttaagggggaacctttttgggggggccctaaggggcttggccctgggcctgggggccccaattttggccctggggttggcaacccccctttttttaagggccaaaactttgggcctggaaaggggcctgggggggggcctaacccgaagtttggggggccttttgggaaccaaaaggggtttaaaagggaccaaactaagcgggggcaagctaaaaaaagttttgaccctaaaggagttggccaaaaaaaaaaaatttttggaaagaaacaaa

SEQ ID NO: 33710 - DNA, 518 bp, Glycine max
  Clone ID: PAT_MRT3847_130444C.1
gctttgttttcctttagtttgtaattgagattgagtctagatttgcatttaccaaaagcactttgtgtgaatgtaggaatgtatttggcttctcttagattttttatttgttattttggcaaatgttagttattagtttggttatatttgtttgctactgataaaggatgacatcaagtgaatggcgtgttgaaagaaggcaaagctcaactaatgaatcccctctatcgagggatctagaacatgcaactgaaactgggtcactctccattgttgtgcttggtgcttctggtgaccttgctaagaagaagacatttccagcacttttcaacctataccgtcagggattcctactaccagatgaggtttgtatttttggctatgctacggtcgcgctaactggtgacgagttgagatacttgttgcatggctactctcgaggaagcaaagatggttacagtgggcactgggtggacggatcacacttgtggcgtctgatctcatatgtatgcggatcc

SEQ ID NO: 33711 - DNA, 606 bp, Glycine max
  unsure (1)..(606): unsure at all n locations
  Clone ID: PAT_MRT3847_130445C.1
cttcaaccatcacaaacccaccaccgccccaaagttgaatcctttctgtccccacaacatcaagtgcagcttcttcggatgccccgaattctgttccgttatggatgtgcgaggagatgggattttcccggatgaggtggttattcagattctagcaaggttgcctgtgaagtcccttttcagagtcaaggttcgagcatcttgtaatggcttgctgtgctgctctagtattcctgataagggtgtcttctatgtctgcaatccggttactcgcgagtacaggttgcttcccaagagtagggaaaggcatgtgactcgattttacccggatggcgaggctaccttggttggtttggcctgtgattcagcatatcggaagttcaatgttgttctagcgggataccatcgcatgtttggtcataggccagatggaagtttcatatgtttggtgtttgattcggagttgaacaagtggaggaagttcgtttcgttccaagatgaccattttactcacatgaataaaaaccaggttggttttgtcaataatgctctgcactggttgactgctanctctacttatatacttgtgcttgatttaagttgtga

SEQ ID NO: 33712 - DNA, 1877 bp, Glycine max
  Clone ID: PAT_MRT3847_130446C.1
gcaacgcgtccgtatcatatgctccgcagtttactcatttctgtctacttctcatccatcatatgacatatgttccttcgatccccttctctattttcctttatcccattgtccgaattcacgttctttttcgtcccaatccttaagctttaagctctaaactggatccaccccacccacatacccagtcttcccttttttgaggtaaacgctatgctatattactcaatataaaatattcattcattcttgcgtgtgcgtgtgtgttgcgataatgacgactcaaattcgataattcccaattgttttttatttcaaatgtaaacgcaaaatgaatacccattttccccttttccattcttcaaccatcacaaacccaccaccgccccaaagttgaatcctttctgtccccacaacatcaagtgcagcttcttcggatgccccgaattctgttccgttatggatgtgcgaggagatgggattttcccggatgaggtggttattcagattcttgcaaggttgcctgtgaagtcccttttcaggttcaaaaccgtgtgcaaactgtggtataggttgtctttggataagtattttattcaactctacaggtgtctaggaagaaccccatgattctggtggagatttcggattcgtccgagtccaaaactagcttaatctgtgttgataatttgaggggggtatctgaattttcactgaatttcttgaatgatagagtcaaggttcgagcatcttgtaatggcttgctgtgttgctctagtattcctgataagggtgtcttctatgtctgcaatccggtcactcgcgagtacaggttgcttccaaagagtagggaaaggcatgtgactcgattttacccggatggtgaggctaccttggttggcttggcctgtgattcagcgcatcgaaggttcaatgttggtctagcagggtaccatcgcatgtttggtcataggcccgatggaagtttcaaatttttggtgtttgattcggagttgaacaagtggaggaagttcgtttcgttccaagatgaccattttactcacatgaataagaaccaggttgtttttgtcaataatgctctgcactggttgactgctagctctacttatatacttgtgcttgatttaagttgtgaggtttggaggaagatgcaattaccgtatgacttgatttgtggaacgggaaataggatttatctcttggacttcgatggctgcttgtctgttattaaaatttcagaagcatggatgaatatatgggtgctaaaagattactggaaagatgaatggtgtatggtggataaggtgagtctgaggtgtatcagaggaatggtgccaggcatttttccaatcagtcagacaggtgaatgtgtttttttggcaactcataagcagattttggtgtatcatcgcaagactcaaatttggaaagaaatgtactctgtgaagtataggtcaacactcccattatggttttctgctcatgcatatcgcagcacaatgttctcatgtaactgagtcatggtgactgcatcaaatgacttatgtgcatatatttctagttgcaagtgttttatatttagttaagccattgttatttgctcaagatatcatttgtttctgatagtcatgttaaaactgtgatattggctttgccattatattgcttcaccattgtctcttgtaactggggtgtggcttcaataaatggcctttgtacatacatttctagttgcaacttgcaagtgtttaatactcatttgctcattgttatttgctgaagatattgcatttttctgatacagtatctttattgtaaaactatttcattgactttgccatgtaggggcctatctc

SEQ ID NO: 33713 - DNA, 760 bp, Glycine max
  Clone ID: PAT_MRT3847_130447C.1
ggaaggctgaaatccttgctgggggcctctcagaccccaaaaccctgaaaagaaaaaccccttcttatttattaccgttgccccttccttctctctagtgtaggagaaacgatgagcagttggagaagccttcttctgcgaattggggacaagagccccgaatatggaccctcctccgattacaaagatcacattgatacgtgctttggcgcccttcgccgcgagctcgaccactcccaatccgagattctcgagttccttctcatgtgtgctgagcaattgcctcacaagattcctctgtatggtaccctgattggcttaattaacttggaaaatgaagactttgtgaaacaactagtggagaaaactcaaagtaaatttcaggatgccttagattctggaaactgcaacggggttcgtattctaatgcggcttttgactgttatgatgagcagtaaggttcttcaaccaagctctttggtggctgtgttcgaaacatttttatcatcagctgccacaacagtagatgatgagaaagggaatcccttatggcagccatgtgctgacttttacataacttgcattttatcatgcctcccatggggtggagcagaacttactgagcaagttcctgaagatatcgagagagtgatggttggtgtaaaagcttacttgagcatcagaaagcatacatcagatactggcttatccttttttgagaatgatgatgaaaatgggggaaggtcttactgacaaggac

SEQ ID NO: 33714 - DNA, 857 bp, Glycine max
  Clone ID: PAT_MRT3847_130448C.1
ccacgcgtccgccggagtttactcatttctgtctacttctcattcatcgtatatgttcatgttccttcgattcccttctctattttcctttgttccattgtccgaattcacgttccttttcgtccgaatccttaagctctaaactggatccacctcacccacatacctagtcttcccttttttgtggcaaacgctatgctatattacttcaatataaaatatattcattcttgcgtgtgcgtgtgtgtggcaataatgatgactcaaattcgataattcccccccaaaaaaaaaattcaaatgtgaacggaaaatgaaaacccattttccccgtttccattcttcaaccatcacaaacccaccatcgccccaaagttgaatcctttctgtccccacaacatcaagtgcagcttcttcggatgccccgaattctgttccggtaagcaaagatcgaatctttgccttgttttttggttgcccaggtttttttattttcttttaaattctgctattcatgatcggattgcgtatttgaggttttggttttcagttatggatgtgcgaggagatgggattttcccggatgaggtggttattcagattctagcaaggttgcctgtgaagtcccttttcaggttcaaaaccgtgtgcaaattgtggtataggttgtctttggataagtatttcattcaactctacaatgaggtgtctaggaagaaccccatgattctggtggagatttcagattcgtccgagtccaaaactagcttaatctgtgttgataaattgaggggtgtgtctgaattttcactgaatttcttgaatgatagagtcaaggttcgagcatcttgtaatgg

SEQ ID NO: 33715 - DNA, 399 bp, Glycine max
  Clone ID: PAT_MRT3847_130449C.1
ctcgagccgctccacccaagacttctgttactgtcaccttgagcacttcttgttgtttgttctcgacaggtgcaccattagatacttcctccccttcaacatagttctcccaaattctcagcttttgcttcttggcagattgttcagcaacagctttcttttttgaaccttcaagaagctcctctgcttggagctttcaatcctaagaagggtgacacagtcctttgtctttttggtgctgataaatcttggtaccgggcaatggtagtcaatggacctcgaggacctgttgaatctccaaacgacatgtttgaagtattctatattgattatggaaatcaagaagaagtaccttactctcagctacggcctatcgatccatctgtatctgctgctcct

SEQ ID NO: 33716 - DNA, 1880 bp, Glycine max
  Clone ID: PAT_MRT3847_13044C.1
aaatggcggccggaccggggaacacttcgtgtcccacctagaccttacccaccgtcgattcccctaaacgtgttcgacatttaatcacacacactaagcacacataacaccatcggagaaggaccttccatcaacccataactagtcgtagtattatttcatcgattctctcccttctctttctctctgcgacaccagatgatggagacgacggcgaagcgaaacgctgtcgttgcgccaatcgcggcgttgttgttggtggtgctactcgcggcgagtgtggtggtggaggctcaggagaactcggacgtgaagacgctggtgaagcacatgcacgggaagaagtactgcgacaaaggatgggaatgtaagggctggtcaatttactgttgtaacctcactattactgattatttccagacctaccagttcgagaatctcttctccaagcggaactcgccggtggcgcacgccgtcggattttgggactaccactcgttcatcgccgctgccgcgcttttcgagccgcaagggttcggcaccaccgggaacaagacgatgcagatgatggagattgcggcgttcctcggacacgtcggcagcaagacctcttgtggttatggagtggctaccggaggacctttggcctggggtctttgttacaaccatgaaatgagtcctatgcagtcatactgtgatgactacttcaaactcacatacccctgtacacctggtgctgagtactatggtcgtggagctattcccattttctggaactacaactatggtgctgttggagaagctttgaagatcgacctactcagccatccagaatacatagagcagaatgccacccttgctttccaggctgctatttggagatggatgacaccaatgaaaaagtcacagccctctgcgcatgatgcctttgtcggcaactggaagcctagcaagaatgatactatggagaatcgtcttcctggatttggcactacaatgaacattctctatggggatggtgtttgtggacaaggtgatgtggactcgatgaacaatatcgtttcccattaccagtattatcttgaccttctaggtgttggtcgagaacaggctgggccccatgaaatccttacatgcgctgagcaggttcctttcaacccatcttccaaacctgcttcttcatcttaagattatatttattagcatatgatattgttgtaccaatccctttgaaagtgaaagttaataagggttcttgaaattattggtatgcaataattttgaactgcgtggtagtgtgggaattcattatatagcttttgttcgttgttatctagaagttttagtcatttgtaatatcatatgtcgtgaaaaatttgtatctggtatatatgtacgttatgggcgattttgttatttttatatatacattccttggttgcaatgtaaaaaaaaaaaaaaaaaaaaaaaaaaaaaaaaaaaaaaaaaaaaaaaaaaaaaaaaaaaaaaaaaaaaaaaaaaaaaacccccccccggcccgggccccaggggtaaaaaaatcccctttccctttcccccccccccagttcccaaaaactttaactttgggaaaagttttccccacccgggggcgttatttcccaaaaggcctttaaaaagggaaaaaaaaacttcaaaggtttcttccttgaaaaaaaaggccccccctaaaggcccctttgggcgggcccctcttttggaatttacaacgggacttcaaaaaccgggggccccttcggaaccaaaagaccccctccaaattcttcccgggggttacaaacgggtttaaaatccctgataggtttttgggcccccccaaagggggttttctttttttgagc

SEQ ID NO: 33717 - DNA, 324 bp, Glycine max
  Clone ID: PAT_MRT3847_130450C.1
cggaaaacgaggctatagctttttaattacaccaagcacctaactctcactccttcttctgcgcttccttcacactcccaatttgctcaccatgagctcgaattctcttgcctcggaaccagatcatccaaaatgatgaatccccgatcccgaccagcaacaggattagagggtccacgcctgccaggataacgagataatggacccgcctgatcctacaccacgacgacgacaggtccttcgttcaccatgaccaccgcactacctcggcggaaagccctaattccccctcgcaactggttccttgaccctccctcttacgcc

SEQ ID NO: 33718 - DNA, 401 bp, Glycine max
  Clone ID: PAT_MRT3847_130451C.1
ttcgttggttgaccacggatggcgcggcacgggccaaatccatggttcagtgagtcacagggatgcaccacagctggcgtgaccagtggtggtataacaaccgtgggaaacacaggtcctaagtgctggggccgtggtttgtatgcttaagtgccgaacgatatactgattggcgggcctgactccctgaaggtacttcagggcctggaggccaaccatgcacggacgatggatgagccggttgttgacagaaccgaaatcttggccgcgcccgacgagcctgggacatagcttgctactatctatgctgttatatcgactcctcaaggaagattcctgtacgacctcattttatataagccgcccacgagcgacatcaagcctgatgacaccggaactgg

SEQ ID NO: 33719 - DNA, 391 bp, Glycine max
  Clone ID: PAT_MRT3847_130452C.1
aaaaaaaaaaaaaaaaaccccccctatagacggggtgattttggtgacaaccatggggtgggaacccccgaataggggatgaaaaaataaatgtttgaacaaacaatccccttttaaaatcataaaccctcccttttaaggaaaaaaccgcttaatacttggtacaaacccctacaaaggtttggttatatatgggggggggaactacccccccccccttgggtaaaaaagtaaaaaaaaaggggttcctaaagtttaacacaaattaatgggcccaagggggggttttttgataacattaaacccccgcattaaaaaaccccagggggttattgggagaaaattatttggtggggaggtgcaacattttggaaccccccaaaatatattg

SEQ ID NO: 33720 - DNA, 960 bp, Glycine max
  Clone ID: PAT_MRT3847_130453C.1
ctcgagtttttttttttttttttatataattttcttaactggaatttaggttagcacattaaagaaacaacgggtagcaagttacactgcatggcaactgacactttcctgtttagcctccgacatgagaaaaatgtatcacatttactttcttccttctaaaaaaaatataaaattaataaacaataaggccatatatattaaacagtagtgtcaaaagcaagaataattccgtactaggaaatttaaccgagtattcagttcatgtcattgaaggcttcactgtgcatccatgatcagttataactctgtctctctggtaattcacacgatgtcgtatcacaattcacaaatccgtttcatggtatactcattggggtttcgtgtgcccgtgttcaaaatttgcactatttccctgaacgctgtaaaataaatagaaattggatatatatatatatatatatatatatatggatagagatatatattggtgcattgttaccgaattatgtatagtaccatcacactagctcttcatcatgaatatactaatcatatccattttatacgaagatgcacagaaatgccatgcttccgtgtctccctgatcaatctgattttttgtggtcctaccttctctgcacaacttgtggcattcccttaagctaaaacgttccaagtgtatgaaaacatgtgctttatatttggtaaaggttctccgttttatcttatacaatagaaatgccatgattaatcccccgttattccctctctctactgatctaggccaacaattacaaagctagattctgccatacccagatgcttatttcgggtgtgaaaattcaattgattttcagattggtatgctaaattgggtctatttagctctttttacaacaatgcagtctgcaacatagacacagtgatctagacaaagttcgtgaccatgtgagcggt

SEQ ID NO: 33721 - DNA, 173 bp, Glycine max
  Clone ID: PAT_MRT3847_130454C.1
gaccattcgccattccaatgtcaccttctttttgcacatccctcttcctcttcacactctcggttcgggtcttcccattcatctcactctccgtcggggtccacaccggccaccatgaccacggtgaccccgactcctacaccaccctccaccctccgtgctcgggtcttgac

SEQ ID NO: 33722 - DNA, 668 bp, Glycine max
  Clone ID: PAT_MRT3847_130455C.1
ccaagcgttctgcaaaaaccaaacctcgtcaaaggttttagtttgagtttgtttcatcgtaagtatctaagcatgactctctcccaatcttgccggaaaacaagccttcgaaaactgctagcttattgggttgcaaagcagcagaagacgcgcttctacatcttcggacgctgcatagccatgctcctctgctggcacgaccacactgtttccgattagatccttcactcgcgtttcagctatgaaaacattgaaatttcgatttttctccatatgggtacccaccctcggcgtcacgttattgcttttgccacacccgacaacaaagagggatgtaggaaagtggacgattgcaatacattgaagatcaatcactgcaaatgcaagattggattgtcttgtgtcttgaaactggtggcttataaggtctgttgaccagggaaaagataaggtctgtctttgaatcgggtccgtttgagttgagtacccaaaagttgagtacttgattcttgaaattaattggacccgtttgagttgagtacccaaaagtttggttcttgattggcttcgctgccgtgtaattactattgtaattatctgaccttgttttggacaacagttttattgagctgaaacaagtgttctccaaaagtgctgctaaaaaaaaa

SEQ ID NO: 33723 - DNA, 1377 bp, Glycine max
  unsure (1)..(1377): unsure at all n locations
  Clone ID: PAT_MRT3847_130456C.1
ggtaacagtgggaaagttttcaaggatgtggtgtcggattcgcctatgcttgagagcaattcgtctttcggttctggttcctctgtgccgccgaatttgccgccgataaaggttcacgtggagattgaggaacagtttgctcagttgggggtgggacagaagcaacaagaagatgaaggttttgttgcgccggtgccggtgatggaattttccacgaaccgccttgtctccgatgacgagagatccgatcatggggtccctcttgggcatagaaaatcgccaaccccgccgctacagcctcagcctcaccaatttcaacagaaatcacctcatggtgttgttgatttgccttcccctgattcactttcaagtgatagtagtctttcaaatgcaatgttgcgcccgaaaccagccatttatcaagaccaagttcaaattcaatatggaagttctcaggttcctagcaatgcctcggttgatccaaagctttgtgtgactgatcaacaaggttggattcagatgcagcagcatgtgcaggaagctggatatgttttgcagccacaatttgatcaactgccactgccgcagcagcatcagactcagccgccttttgcagcagcatcaaccacagcagtatatccacaacacacatttaattcaccataccctttcagggtctgtgccaatccccgccgcacccgatcctgtatgtcagcaacaactccatacccaacatctccatcaccttgatcaacaatacccggtttactatgtgcaggcaagacaggcccaaccatacaacttgtcagtgcagctggctaatgcagctgaatctgccacaactatgccttctagccagtcccaaaatcaaccaagttctgctgcttacaactcaacaagaaatcctaattttgaaatggcagcaggtgcatgtagaaccgcacctgccacccctcaattggttcaagtttcttctagtaagcatcaacagcaatatgttgctcactctcaaatttatcatcgccatcctcaatcaatgcctcctaagtctgcagtacctgcaaattatgcttacaactatgcagatcctgcacttgctcaagtgttttatagtcaacctttggcacccttcatgccttcacactaccagaccatgacagctgcttctgtaatgcggacggaagtttctgctaagcttccctccgacagcatgaagaagccgcagcaggtgacaacctcgcagccattgtgaaaaaagaaaaggaaaaagatacaattttgaagaaatgtgcttggtttttcctataatttttctatcgtagctcctatcttcttggtggtacnngtaccagtttgtgccgtgtatttctgacagat

SEQ ID NO: 33724 - DNA, 470 bp, Glycine max
  Clone ID: PAT_MRT3847_130457C.1
ccgctcattgattggcttaaacaaactgagtgggccgccctgacttgatgttgtcgcttttggcatctttaccattctgacccttttgtggactcgtaccattctgacccttttttccacttgtaccaacccttcggacgcctcggcggacgcccgggtaatcccggaaatttccctccgggccttccaggtttacctattttgagtataatgagagctattagaactcatggtaataatggtcatcggtgtgaaatgggtaaaagtgcaatacgctacacattatacacaccgtacgcgtcgggtgcataacctgtggagcctaaggagcctaatgactgacattaattacattaatttcactgccctcactgcacgctttaaacctgggaaaccagctgcgttaattaatttaacaaatcgcccaacgagccgggataggcattttgcgcattggtcgctattgtttt

SEQ ID NO: 33725 - DNA, 298 bp, Glycine max
  Clone ID: PAT_MRT3847_130458C.1
atcacacatcaacatcaacaaacaaccacctttagtttatttttctacctttattacttggccaacaagcgctggcctacaattcattaaacaccatcttttccccatatgttcacttttccatataaattaaaaaaatttctcttctccatttccttaactcaaaacctttctcaacattttcctcaataataaactatttacttcaaccatttcattaatatactatcctttcccccctcatcttccaaacttacaaatttaaattaagtcctaatctctcttactatcactatta

SEQ ID NO: 33726 - DNA, 349 bp, Glycine max
  unsure (1)..(349): unsure at all n locations
  Clone ID: PAT_MRT3847_130459C.1
agaaaaaaanaagagcnaannaaagagagggagaaaagncaggaagaaagaaaaagnggggacaataggcagagacagaaggnggnagaggggggggagcaccctangttgaaagagagcnagaagaggcngnccnagcaggagggggggggcgggangcaccccccccccannagcggaaagnncaagaaaggaaggaggaaagaaagacncnagacaaagaaaagaaacgngccaaggnaacagcaaacagaggagcngcgggggnggcaaangaagggaaagaagcgaanganaaagngaagccggacaaacagnggcgngaagaacgaagagncnggcagggaga

SEQ ID NO: 33727 - DNA, 1030 bp, Glycine max
  Clone ID: PAT_MRT3847_13045C.1
aagcattagggtttctaccacttaccagttagttgctttgtttcactcacactgtgtttggagcagaatcagatcgtgtgttccgtacgttcgttcgttcatttccagtgtcaaacatggcgtctcagatgagcaagaagagaaagtttgttgcggacggagtgttcttcgccgaactgaacgaggttctgacacgtgaattggcggaggacggttactccggcgtggaagttagggttacgccgatgcgcaccgagatcatcatcagagccaccagaacccaggctgttctaggtgagaagggaaggagaattagggaacttacctcagtggtgcagaagaggttcaaattccccgaaaacagtgtcgagctttatgctgagaaggtcaacaacagagggcttgtgtgccattgctcaggccgagtcgcttcgctacaagctcctcggcgggcctcgctgttcgcagggcttgctatggtgttttaagatttgtgatggaaagcggtgccaaaggatgcgaggtcattgttagtggaaaactgagagctcagagagccaagtccatgaaattcaaggatggatatatgatttcttctggacaaccagtcaaggattacattgactctgcagtgagacatgtgctactaagacagggtgttcttggtatcaaggttaagatcatgcttgattgggatcctaaagggaaacagggtcctaaaactccccttcctgatcttgtcacgatccacacccccaaggaagaggaagaatatgcccggcctgctgctgttttggcaactgatattgaggtccctgttgcttgaaaatgttttatttgttcttgagtagaaattcatagcacctgagtacctagtatgcagtgttcatttgcttagacctggtcagatttttgtagtgtcttatctttgttgggaaagactagttaaatttttttgtagtttcttaacagtttatgaaattgctacaaagtgccaagtattttaagcatcaattgattattattattt

SEQ ID NO: 33728 - DNA, 311 bp, Glycine max
  Clone ID: PAT_MRT3847_130460C.1
tcgagccaaagaacggttggaattaatagcaaaactattcctatgtcacctaaacccaatcatcttccattcttctttgtccatcaactctaggcatgtctctttggaatcaccaactgatattcgtgactagtgatgaatgggccatctggtgctcctcacgtttcaaccatacatgtggactaatatgtcaacctcaagaacaatatgtggacaaagacgtgttttgttctcgtgccttgcaaaatacacttaactagtagtttgtgggtccaaccgtactaaacaaaagaaaatgtcacgaaaaccac

SEQ ID NO: 33729 - DNA, 265 bp, Glycine max
  Clone ID: PAT_MRT3847_130461C.1
cttccaaaaacacaattttttttttattaatttattggttaaaggcccttaacccatttatttcccgggaaccaccaggtttccgggtcattttaacccttggggggcttattctgttttgaccaccccgaacattttaaaaggggggtaaacccttaccgtgttaatttaccccccaaccgtggggggccctttgtgggggaaataaaaaatttaagtttaattgttccccccaaccttgggtttttacccctgttttccaaat

SEQ ID NO: 33730 - DNA, 315 bp, Glycine max
  Clone ID: PAT_MRT3847_130462C.1
cttgtgcaatcaatggcttttatggatcctaatgaatctcggtgaggggaagtagttggggagacgaccttaaacatatgctatacggctatatagagccctgagtggcataactgtgcctggttgcgaccccaaaaatgcccaacggagtcaccctaacggaggatcttgttcaacactacggtggatggagacaggtgcatgcatgaaaacaggttgaccgcatgtcgcaggacttgcgacctaacttgctgagagtcggtgactgaaggatgagtggccgtcttattatgagggtagatttgtgggataaat

SEQ ID NO: 33731 - DNA, 855 bp, Glycine max
  unsure (1)..(855): unsure at all n locations
  Clone ID: PAT_MRT3847_130463C.1
tttgtcatcagttagagtaatttgtttatacatgaaaaacaggcatgttgcattgcacaaacttgccaccttgtcatgaaatgacaccgctaccggctttcctatccctactaaaatcataaaagaaagatatgagatataaaatgaaaaaaaaaaatacatatcagaaactgtacgtagcttatattcttcgcgtatgtttcagagaaatggggtataaggcttctatgagcatctgatatctagcaattggtagtgtagtgtattgtaaaccatgtcccatcaatctcagtgctattggctggggagtgtatttgggcagggttgctatccaaatgttaaaaccaatcgacatgttggcttgaagatttgggttgcttctttggtttttgatatcggttattctcaaacttagctttagttataagtgaatacagcaagtctgcctcagctgatgtatcatagggtgcttccagtgtactgtcaagtagctcctccaagagaattctttgtgacggggttacgtagtgaatgcaacttctagggcattgtccaacagcacattgaacttggtagtcgtccccatgaccttgagaagatgcacgtgctgttccagttgaagaggcatatgtgaaagcatgaggggctctttccacacaggaatttgaacacgctttcaattaattctgatggagtgcagttggatagtatccggtatgcttgaattacgcggcgaatcatagcatcagaaaatgttcttgcattagcatctctgttgaggtctggatggaactgcttcacctttgccaattgggaggaagagacagcaacggacgnntgggtcgnnnnnggaat

SEQ ID NO: 33732 - DNA, 172 bp, Glycine max
  Clone ID: PAT_MRT3847_130464C.1
cagtagtgtcagatgtgaactcgccaagccagggatctggaaaagtcatcccgttaaagatgagtacgcgtcagagtgatgctcgcgaagaggctatctcaggtatcgtgacatcgtgcgcggacaagacgatggaatttgtggagaccattgtactctccattaggcggat

SEQ ID NO: 33733 - DNA, 484 bp, Glycine max
  unsure (1)..(484): unsure at all n locations
  Clone ID: PAT_MRT3847_130465C.1
ccaatatatttttggcattttgacacagtctcaaggcaaccccagtgtccatttctttggtgtctatgatgggcatggcgaatatggtggccagtgtatatattttgttaaggataggttggtggaaaatttggcacgtgacattgcattgctggaggactctgtctatgcctacactcttgcattcctgaccacatatgatgacttgtctaacaacgagatggatgattcttcgatcggtaccactgctctttctgcgctggttattgggatcaccctttatgttgctaatgttggtgattctagagccgcgctggctgttatggatggaaaccgtgttgctgctgaagactagtcctctgatcagacactctgtangagagatgagtatgagatagtgtagctctgtgcggcgagggtgttaattgttgatctcgtgcgacggcaccgagattcacactattactcatggcgtgatgatgag

SEQ ID NO: 33734 - DNA, 309 bp, Glycine max
  Clone ID: PAT_MRT3847_130466C.1
gaaaaaaaaatcaaggggacccctccctttttttttttttgaaatttcccaccaaataaaacgtaaaaattttcaataaatttttttaaatccttcctaacaaaacattcggagaataactggaaaggcctattgccaattgcaaaatcccattgaatttgatttataaatattttctcttccaatataaattagaacccttaactaaaattaagaggcggtttttcctcaggggggaagtacaatttaaggggcctaatttttgcttggcaatgtcttttggaaactgactataattctgctactttt

SEQ ID NO: 33735 - DNA, 483 bp, Glycine max
  Clone ID: PAT_MRT3847_130467C.1
atgggctcagaaatctactctgaggttcatgagaatcctagggccttctttagcagctctagcccaatcctctggatacttctatccaatacccttggggggctattccatttagagtgtatcataccaaatctaggagtgctttcgttaaaggatttagatattgaagacctatcttctgactctaaagaagttaactcaaactccaagagttctgatgatgaaactaacagtcatacttctgaaggccaaactcctccaaagccattccattttccaccaccaaaactgcttcgaaagaaaaacctacccaaagttaaagagactgaagattctttcgacgaagccatgaagcttccaggagaaaaaaaattaaagacaaagagcaagtggttgactaacctattgccccagacgaagagactattatcaaacaacctgaaactatgcaagttgatcctcttcatcttgatgttaacgtga

SEQ ID NO: 33736 - DNA, 493 bp, Glycine max
  Clone ID: PAT_MRT3847_130468C.1
ctccagcatggcctggtctcctctcctcctcactctcctcgctcactgcacagggtcctgggcccagtctgtgctgccgcagccgccctcagtgtctggcgccccagggcaaagggtcaccatcgcctgcagtggcagcaattccaacatcggagcaggtcatgatgtatattggtatcagcagctccaggaacagccccgcaaactcgtcatctctgctaagaacaatcggccctcaggggtccctgaccgattctctgcctccaagtctggcacctcagcctccctggccatcactgggctccaggctgaggatgaggctgattatcactgccagccttatgacaggatcctggatggtgcgatcttcggaggagggaccaagctgaccgtgctaggacagtccaaagctgacccctcgggcactctgttcccgccctcctctgacgagcttcaagccaactaggcctcactggtgtgtctcataagtgac

SEQ ID NO: 33737 - DNA, 177 bp, Glycine max
  Clone ID: PAT_MRT3847_130469C.1
attcacaggaccactctacatgaatatgaggttctgataaagggtattatctcctatgccactcttatccctcatctcatactttatcaaaaactcataaagatggatcacatcatattgtgatgttcacatccgcaaagctatgttaaactaaattataattactcgaacacaatc

SEQ ID NO: 33738 - DNA, 176 bp, Glycine max
  Clone ID: PAT_MRT3847_13046C.1
gatcggcatggccaaagaagaggaacagaacggggggcactataaaagcaacgacggctggtacccaaccactccctcaaagagaggcacaccaacacaaactgcggtgaaaccaggggcaatccaaaacagcaccaccgcccgaaagagaaacccaggaacacccgcaaaacacc

SEQ ID NO: 33739 - DNA, 2130 bp, Glycine max
  Clone ID: PAT_MRT3847_130470C.1
attcagatccccttgaattatattttcacactctcaaaaggaaagatatttattaatactttaatgtgttatgaaaaagacgtgcggctctctgaaaaaaagaagtcccttgccgttaacaaagctcaaaacgttacatagcaatacgacgtcgtcacgaacctgccatcgcatttcaaaagttaaaaccccacaccaaccaccgaccaccgctttcagatacgacgctacccaatagctttttgcaatctgggtcgtccccacctcgtctcgtgcccgccggcgcctttcggtggtgaagcccccacgccatccaccgcctaccggtttccgatacgacggtgaatctctctctctctctctctctccaacattttttgtgcaaatcccttttcaccaatccctgcatttgcgataccatgttccccttgaatcgcatagaccgacccaccaaacctaactccaaaaaggcctaatttttgcactcgttacagctacccaatagctttttgcaatctgggtcgaacccatttcgatttgtgctcgctggaatcttatggtggagaagcatggaggaaattgaaggggtgaattgttgcagtgaaagtgaaagtaggagctccagtgagactcgacctcccaatcccaacccaccttcatatcgccaatgcaaacttgttcgccacgcatccctccagatgaacacgaagttgtctgatgtatctgctgagccggagcatgtaactgaagattgtcagtctgatttctttccaatgcttcgttctggagcttgtactgatattggattccggtcaaatatggaagatgcatatgtttgtgttgacaattttatggaggattatggactcaagaaccatatagacggacccagtgctttctatggggtatttgatggacatgggggaaagcatgctgctgactttgcttgtcttcatctgccaaagttcattgttgatgacaaagatttccctagagatattgaaaggatagttgcttcagcatttctgcaagcagacaatgcctttgcagaagcttgctctctggatgccgcacttgcatctgggaccactgcattagctactcttgttataggaagtttctgattgcaggttgctggtggtggcaaatgcaggagattgtcgagctgtgctgtgccgtcgtggaaaagcaattgaaatgtcaagagatcataaaccaggttgcaacaaagaaaagaagcgtatcgaggcatctggggggtatgtctacgatggatatctcaatggacaacttaatgttgctcgtgcacttggtgactggcacatggaaggaatgaagagcaaagacggtggaccactgactgcagaaccagaacttatgactacaaaactgactgccgaggacgaatttctcatcattggttgtgatgggatttgggatgtatttcggagccaaaatgcagtggattttgctcggcgcaggcttcaggagcataacgatccagccatgtgtagtaaggatctggttgacgaggctttaaagagaaaaagtggagacaatttggctgcagtcgtggtttgcttccagcagcaacctcctcctaacttggtggcaccacgctctagagtacaacggagcttctctgctgaaggtttgaaggagttgcaaagcttcctggacagcttgggtaactgagttggtacaactccttctgctttaattttctttttgaggtgagaattaagattcatttgtaattgtacgtgcaggctgagaggaaactttgactgtaacatatgcggcatctagtcgacatttaatttagtcattggatatttagaattactgtcattgctttattcttactacattttttgcatggtaaaaaccaatcaatacatagcttcagggcttgtgtggttctcacttctgactatgagccatgaggggcacttcctttgcggtttcgtgtgattaatgatgattgctcttttctttacttggttaattgaagattttatcatttgagggtctcagatactgctgccaataatgtgatgcatttgaaaatttatgcctttgccctttgcccaatatgtgatgtattggaacaattttattgttaaagag

SEQ ID NO: 33740 - DNA, 370 bp, Glycine max
  Clone ID: PAT_MRT3847_130471C.1
gagctggcgagatctctgagagcgtcgtcgagggcgaaacggcaacgacggatcctcacatgcaccggtccctcaagggccgacagatttccatgatcgctatcgcaggtaccatcggtaccggtctcttccttggctccggacgtgctctcgccaacggtggtcccgtcggcgccctcatcggttacaccgtcgttggtatcctcgtcggatgcatgatgtactcgctcggagagatgatggtctacgatcccagcgccggcggcttcatcgagttctctgcacgttacgtcgaccctgccgttggattcgcagtcggatggcagttctggttccagactgccatcaccgccccggtcgaagttgtcgc

SEQ ID NO: 33741 - DNA, 869 bp, Glycine max
  Clone ID: PAT_MRT3847_130472C.1
gagcgttcggcaagaaccccgtggtcttcgagaggcacaaactccggcaggttctccagcgtggtttcgagattgttcagcctcgcagcaaccaaattggtgccatcaaggtaggactcgtcggagtcaatttcctccgatgatccccccacgctcgtattcgagccatacttgctacgatcaccgcccccgcattcctccgttacggtcaccttaaaagtctcctcaccaatggcgacatcgatggtatgttgtatttgcggcatccacgaagtcttaataagcacccgggctcgatctagtcgccgtctatcctccgcctcgtcgtccatgtcgacgaactcccccacggccgccgtgatcttccgcaagtgtttcgaactccacgcttgaagaggaactccccaaacgtaaacccaggttagtctatctcccactcgcactctcgggttccatttttccagtgaatgaaagagaggtgagccttcttctgaaactgccttcgtcacttgttcaatggagtttagttttaaattttagaaaaaaaacatgttgggaaatccctgttaagtagaccattgccttcctatttgatggttctaaccaacctttatagttggtttctaattctttacttggtgccctaggtgattgtagttagaacctggatttttatctgtttgtttgcctttttaacctattggttttggtaactcatattctataatgaataaaagatgaaaaatattaaacggaaagttaagcatttaatatattaggaacttgttaacacaaatttatttgtgacaaatgtatgtgttttgctcagattttataataagctgcctatgcccttcctagcaccccag

SEQ ID NO: 33742 - DNA, 507 bp, Glycine max
  unsure (1)..(507): unsure at all n locations
  Clone ID: PAT_MRT3847_130473C.1
cctaaccgataatgttgcattaaccattcgtgtgcaatcccaccctccaatcccacatacatagcagaaagtgacattccaatatctaactgacactgttcactgtccacctagcataggtataacatacacatcattaatgacccaacaacagcattcacatatctatacacaagatcaagagagagagatagaagcaaagcaaacaccanccttacttggaattgacctataacctataagagttgtctatccgaccagaccttttttgaggatggaatattcaaaggaaattcatagcaatgacaatgcaaatggatcattgaatcatagcaggggatgcgcggacccacttaactagggcatggctgcggaagctttgacaggtactcaccttgatgaggtgaagcgaatgatgtacgactaccgtaaccccgtgttgaacttgtgtggcaagagccacaccgtgtataaggtggcgtgggttgccacccggcaccacagcgg

SEQ ID NO: 33743 - DNA, 543 bp, Glycine max
  Clone ID: PAT_MRT3847_130474C.1
ggggctcgcaaaataagcagtatagtagtctaaaaaaaaacatcccacacactatcattcaccctagccaaaaccctagaaatgaggatcatgcaagaatctcaatctttcattattcccaccacaattctactactagcactatgctacaccacttcaggccaactctcaccaattcaaccccccacaacatcaccatcactcccatcaccaccactatcccaaccctccccgccgtctccggcactccactccccgccggcaaccgcgccggcgccggggttcaacactgtccctcttgtcccagtaaccccaagtggggcccccacacccaccaccatcatccctaagggccccaccattgacatagtccaaatcctaagaaaagccaaaaggttctcagtcctcactcgccttctcaaaaccacacaactcataaaccaactcactcacagctcgtaacttcaagctcaggagggtaaccctattgcacccgaaacagtgctttctcaaactaaagcagggttcctcacctcctactga

SEQ ID NO: 33744 - DNA, 1783 bp, Glycine max
  Clone ID: PAT_MRT3847_130475C.1
tcggcaagaaggaggcaatggctcgcctaagctccgatcaggtcttgaaggacaacaatgccgccgacccaacttccgttaccactcttcacctcactcacaaagctctttccgacataacgtgtttggccaatttcgtaaacttggaaaagcttgacctcaagctcaacaatctcacttctcttgagggattgagatcatgtgttaatttaaagtggctatccgttgtagaaaacaaattagaaagcttggaaggaattcaaggacttacgaagctcactgtgctaaatgcaggtaaaaataagcttaaatctattgatcaggtcatgtcagttgttagtctccgagcactgattttgaatgaaaatgagatttcctctatttgcaaacttgatcagctgaaagacttgaacactcttgttctatccaaaaatcctatacgtaaaattggtgaggctctgatgaaggtgaaatctatcacaaagctttcgctctcatattgtgagcttcagggtattggcacttcactcaagtcttgtgtcgaattgagtgagctccgccttgctcacaatgagattaagtctctcccagcggaattaaagcttaattcaaagctccggagtttagatttggggaacaatgtgatcacgaggtggtcagaactaaaggtcctcgaattgctcacgaatcttagaaatcttaatctacaaggaaatcctgctgccacagtcaataaagttatgagaaagattaagaaagcactgtcaaaattacagatattcaatgctagacctgttgataaagataccgagaataagaaaggtagcatagttgatggaactcgtgatttttcagtagatcaaaatgagaatgatcatattgaagctgctgatgatcttgactcggggagaaaatcaagtaagaaaaggaagagaactgttgatgcatccaagaaggaagacagggttgttgatgaggaaaataaaggtcataaaaaggataaggcagatagaaaaaaagagagtcttataactaatgtcgatcctggcatggagaataaatcaactaagaaaaaggcaaaaaaggatgacaagcccttggacaagggatttgctcttgaggagaatgtttccaaggttgagaagaaactaaagaagcaacataagaatgacgaacaaagtgagcttgatgttattgatgatgcagaagcttcatttgcggagctttttaaaatcaatgatgcagaaaatctgaatcttgctgatgaaatgaaagcacaggacaaagcgccgaaggatgtgatgaaattggcaggtgacccggtgacctcatttgccaaacataagaatgctaaaatacagaatatggaatctctatcagctccagtagcagaaattggaatgggaggaccatcaacatggggtgatgagttatgatgatatcttgacatatgctgatgcatcaaaccttgtgtgcaaaggagttgaggatcaattttgagtctgattctgctgtcagatttcgcattgcatttgtcggatggttgagacaagctcctcggctattttctacttctgaattccagggtatttttgctatgctatataagctggtggttatgttgttaatttgtgaattgcatgtcagatttaggaacttccactcaaactttctttttacccgtttttagtgagtttattgcaatcagttctaataaaaaaaaaaaacagtgccattaccaaatagtgagcacgtagacccgggaattaaaacaaaaccggta

SEQ ID NO: 33745 - DNA, 712 bp, Glycine max
  unsure (1)..(712): unsure at all n locations
  Clone ID: PAT_MRT3847_130476C.1
tcaagatttagaacccattgggatcaggccagtctgggacataaatcagtggaaagggtaaaagcatgtggatttaaacgggcaaaaattattaaacttataacccaacaaaaattttcaatgaccncaaatggnaaaaaataaaagaaatgcttgatatatcaagcagcagttcaaaggaaaaccatatgttgaaccatttcaaataactgcaatcagacaaaaaaaagtgttcaacatgcaccttgtggtttagagatgaagtactaaagtgaaaacaaaaaaaactgagtntaacaggaaatcatgtcaatttttacgtaattacataaattggatccgagtatgggagtgtttggaagaacttatatggagtttatttgggcttataaaagtaggctatgaccatataaaatctttttttagntcatgtcagtaagcttcacggttaaactatgatataagttntcgtgtaatatgcttattgaaaaagtaccaagttgtatacctaaatgcaccctttgtcttattaacttcttgaaacatttgacaggaaagcaggagtatgagtagtacagtgaaaccaataaacttaatccatatccaaaatgctgcacaaaatcagatgcataaactactaaancaatgccctgttcagcattttattcacatgtgaacatcataattagtaaacaaattcattttatgcgag

SEQ ID NO: 33746 - DNA, 755 bp, Glycine max
  Clone ID: PAT_MRT3847_130477C.1
caacagtcatagaccgtgtgctgaaagaactgtttattgagggcatacaattctcagattttgccaacagtggacataagatttctcgagctataaaaggcgcacctcttggatctctctttgcacaattttgtttacattctctttggtttggcaactgcaatatacgtggtatttaccaaaagtaattatggtttgtttattgttttttcatagcctaaagtaagagagtaggaacaaattgttcacctatgaggagttgaatttctgagatatctcatttgtactgtataattttcatttttattactcaattttggtctctttcagctattgctgtgctatggatagagtttgttcgcgaggttaggtggtgttgggaagagtcacaactattgcccaggatgccagctaatggatcaattgacctatccacttgtttgattaaccagaaacttcagatgcttgccatatgcattgagagaaagtgtcagctgagtgaagactatcaagattgtattggaagcttggatcaaatagattccatgagtgaggaagaaagtgtagttggggatgactctttcagtctacagacacccagtgaggaattttctgggaaagttgacaggtgaacttagcaaatggcagcctgctcggttgttatcattcatatctaaaaaatttctgcttatataacaactcactctcttatggaaatttcttccatttttatgtccccacttatggtcttggtt

SEQ ID NO: 33747 - DNA, 831 bp, Glycine max
  unsure (1)..(831): unsure at all n locations
  Clone ID: PAT_MRT3847_130478C.1
ggcccgctcgaggcncggccgggggccggggaaatacaaaaaaaaaaaaaaaaaaaagacgtaattcggagaagattgagaaaggtaaaggtccttgttgttccggtgtgctgctagagaatctggtgaaggatgtcaattgttccaatcaaccaaggtcactcccaggactcttgggatcaattcatcgattttcctctccctccttccatctccagcttcttccccggcttcgaattcggattcggctcatcggtggttaacacacgtgtggactggagggagactcccagagcccacgtgtggaaggtcgtgcttcctggcttcacaaacgaggacgtgctggttgagctacaagaccagagggtgctccaggtcagcgtggagagtggtaacttcctgacgaggtttaagatccccgacaacggtaacctcgaacaactcaaaaccaacatgcgtcacgggattctccttgtcactgttcccaagtttcatcaacccacttctaataggaatgtcagggtcgttgagattgaaggcaccgactgaacccagttagcaaactctgtctcttccaagttgttcactctaaacaaaacaaaagacgctgtcgtgtctatgtatgtgtccgatggaactgtgttctagtattatattatgttatgtgtgcgatggaactgtgttctagtattatatatgtatctgtatgttttagagtggatgaattactcttgctaaatgtgtagacttgtacatactactacttaacattgcaaagcttattaaattaacgtagccgggtagatttacgattgtnaaaaaaaagggcgg

SEQ ID NO: 33748 - DNA, 274 bp, Glycine max
  Clone ID: PAT_MRT3847_130479C.1
tattctcctcttacttgcaccttttacgctcatatttctattttttattatatattttttcgcaaagtgacatctatcctttaactccatttactgtctgggccatgttcttagaatatttaaatacatgcaccagcacatccagcattattgtactgaaatacctctaattattcactctgcttgttgtagagatacaaactaaactaaggaattgtcttatcgtaaatattttacataacttttgctaattcacgaaattcttttttttcgg

SEQ ID NO: 33749 - DNA, 1177 bp, Glycine max
  Clone ID: PAT_MRT3847_13047C.1
gattcctcaagaactagggtttgcagtcactgctctgtttcaccgagtttgggcgtttagatcagaaccaaatcgtgttctcttccattggcaaacatggcaactcaaatgagcaagaagagaaagtttgttgcggacggagtgttctttgccgaactgaacgaggttctgacacgtgaattggcggaggacggttactccggcgtcgaagttagggttacgccgatgcgcaccgagatcatcatcagagccaccagaacccaagccgttctaggtgagaagggaaggagaattagggaacttacctcagtggtgcagaagaggttcaaattccccgaaaacagcgtcgagctttatgctgagaaggtcaacaacagaggcctgtgtgccattgctcaggccgagtcgcttcgctacaagcttctcggtggcctcgccgttcgcagggcttgctatggtgttttaagatttgtgatggaaagtggtgccaagggttgtgaggtgattgttagtggaaagttgagggctcagagagccaaatccatgaaattcaaggatgggtacatgatctcttctggacaaccagtcaaggattacattgactctgcagtgagacatgtcctcctaagacagggtgttcttggtatcaaggttaagatcatgcttgattgggatcctaaagggaaacagggtcctaaaactccccttcctgatcttgtcacaatccacactcctaaggaagaggaagaatatgcccgtcctgctgctgttttggcaaccaatattgaggtccctgttgcttcttaagtagaaatcatagcacctgagtacctagtatgcagtgttcattggcttagacgtggtcagatttttgtagtgtcttatcttttcaagaatttttatactccagtacaaggatccaagcataaattatgttatatttcctccctcattctgtagtttgaaattgtgtttgtggttcatggcattggtttggatgtgttattttcctttagtaccatgttaaacattttttcgaaaagcagaatttaagaaagtgcagacaaacattagatatagaactttaaaagaattttttattgtacttaaaaaaaaaaaaaaaaaaaaaaaaaaaaaaaaaaaaaaaaaaaaaaaaaaaaaaaaaaaaaaaaaggaa

SEQ ID NO: 33750 - DNA, 293 bp, Glycine max
  Clone ID: PAT_MRT3847_130480C.1
ttgtgtggctgctatcaaaactactcaagctggagttctgagacccagaactctgctgatcgagaaatcaagccctataacgggagattcctgggtgctggagtccctgatgacgacggacttctaggcctgccatcatgggctgaaacgctgttatcacagagagctggtttggttagtgctagcttcaggctgattcctctagagccagtgcacatgtattgcatagattgtatgagcagcgcctcctggcttctctggctggcttaccacaaagatatccgcgctattca

SEQ ID NO: 33751 - DNA, 1933 bp, Glycine max
  Clone ID: PAT_MRT3847_130481C.1
ggccagcccccctaagctcggatactgcctcggctcctggtatccgttcgcggcgtgcagtggggttgtctgtttcctgtatgcgggaccgagagggccaggaaggtggcgtattttcgctgaggtctgctcgtcggcttcctcagttcctgaggctgcggggtctgggccaagccagcttggaaactatacggaatctgatgttgatactcgtcatctttatccggatgtccattccgttgcgagttggagaggtcatgaaaggttgatctttgaccctgcaattaatagttcaatttttctagtcagagatcgcaacgtggcacttatagtagctagcgcgatctaaaagcgatgttcagagttgtgctcatcaagagatggctactgctgaagctgagatagcagacatgcgacagaaattagaagattctaaaaggcaaatgtgtgatctgtctgatgtcttgaaatctaagaataaacaaaatgagaactacatgtctgaaatagagagtattggacaggcatatgacgacatgcaaactcaaaatcaacatctgttgcagcagattactgaaagagatgattacaatattaagcttgttttggagggtgtacgggcgagacagaagcaggactcattgctcatggagaagcgggtcattgaacatgagattcagcaagcaaacatatcattgaatgtatatgatgtgaaagctacaagaattgaagaccagttgaagttttgtttggatcagcttcaaaaacttgcagaggataagcttcaaagttctgtcactttggaaaatacacaaagaaggctgtccaatgttagaagacaatctcagcaggttacggatatggtggtggaaatgcaatctaaaattggcagtaatcgagtgacgcgcatggagttacaagtagaacttgagaaagaaaggtttgccaagaaaagagtggaagagaatctggaggttgctaggagaaagtttacatgccttaaagaacagaatgagggctttttagtaactgaaaagcttcaacaggaacttgaagagtacagggaaattatcaagtgcagtatctgccaagacagggcaaaagaggtggtaattacaaaatgctaccacttgttctgctactcatgtatccagaaagttgctgggagtaggcatcgcaagtgtccacaatgtggtacaagctttggggctaacgatgttaagtctgtttatttgtaactagaaacttggttctctcccggatgtcgagaagaggctggtgttcttttgaaaaagatctggtgtatggatacctacataggaggttcaattgtatgcttagtgccaactgtcgagataaggaacattggcagcgatcaatgagttgcttgtctacatttggaccaaaaatgattattttttgctgatttatcataatgcatcttccaatgcgatttggagaggggtcatgaaggttggtctttgaccctgcaattaataattcaaattcgaaagcctgaattggccatcatggcaaattttcttggaagttgactccaaaggtggcaaccacgatgcctcacatctgtatttctgtttctcctgctgaaatgacacaagtacaaattttggtttcaggggatttgtatatatgctagagtttataaggggtcgttcaattttgtttataacagcctgtaatttgtgtaatcgtagatgatatgactagatatcattgtaattgatgttgtgaaaagttaagaaagctcaagtttatcatttttttctattttcaatgttgcctgaaaaaaaaaaaaaaaaaaaaaaaaaaaaaaaaaaaaaaaaaaaaaaaaaaaaaaaaaaaaaaaaaaaaaaaaaaaaaaaaaaaaaaaaaaaaaaaggggggggccttttaaaagaacccaattttactc

SEQ ID NO: 33752 - DNA, 367 bp, Glycine max
  Clone ID: PAT_MRT3847_130482C.1
ggggaaaaaaaaacgataaaatgggggccctttgaaaagatttttgggggaaaataaatttgaaaggggaccttgggctttgacaaatccccctggtcatggggcactggttcaaaaaaaaaaatttggcccaaaatcatatgctaaaccccgggggggataaaaaaccagctacaaaaccctttagcctttttgcaagtttttcaaaacgggggcctccttcccggggccgttttaaaaaatttcacaaaatttaccaggttctttgggttaccctatgaaaggagaggggttaacccaaccccccatgggctttggaaaccatggaaaatgatttggggggaaaaggtgaagtccccaaataaaa

SEQ ID NO: 33753 - DNA, 1325 bp, Glycine max
  Clone ID: PAT_MRT3847_130483C.1
agacagctcagtttgtacatgagagccagtttcagatttgggatacagctaagttctttttttttttttttttgaagtatcgaggagttgcaggatcctacggtgggtatcaccgcatgctaacaattctccaacggaacatgtctcatcggcatcaccgatccctgcagaatattgtgtaatcagactagtcactaatctctttggttgacaataatagtcaaaataccagtgattgttgcacagaaaatttgcccatgtatttatacctcagcacaccatgaaattagaaggaaataaagtgacttttcggcattcaaatattggtcttgagcctgaatctcaagcgtttgtgttcattgatgatgatcaagtttccgatggatacaaattacaaaaccagaaagtgaaggaatatgagaatgtagttcctgcctttttagagaacaatgaacaaggtttagattcatcacaatacaacatggagtcagctgattgtatgaaaaatgaatatgaagcaaaggtaaaggacatagttgagcctgtatctcattctaccaaggatatggagtcatttatgaagtttccaaatgatatagaatcagttaaaaggtcccttacttcaccaatctctaatcctgcagagggaagagacttgcctaggaattctgtggatggttacatggacaaaactgtcacagaatgtgaaccacacctagaagtgtgttacaaagagagtaattatcatgttgtcaaggacatctgcgttgatgaaggggtccttaacaaggataaggtcatgtttgtgaatactgttgatgaaaaggctcacaatttcttccattcagagagttacgaaaataaagaaaagcagaaagacaacaccagtatcaaggcactaagcctaacaccaacagaggaaaaggctcacaatttcttcctttctgagagttacgaaaataaagaaaagcagaaagacaacatcagtatcaatgtactaagcctaacaccaacagaggaaaaggctcacaatttcttcccttctgaaagtaaagaaaagcagaaagacaacaccagtatcaatgttctaagcctaactccaacagaggagtctgacgaggttcatgctaatcatgaccaacccaagggtttgatgcacaaggatggggacgcaactgaaaaaatttctggtaatgtcaacaaagagatgaagcctttaccagaagacaaagttttgttgcaagatttactcactgaggattctgtatcttctgatgacaagggtgaacagatctccaatgagcctgaattgcactcccaatcag

SEQ ID NO: 33754 - DNA, 368 bp, Glycine max
  Clone ID: PAT_MRT3847_130484C.1
ccccccccccccccccgaccccctgacgaagtacaaaaatcaagagccctagcaacatataccccgaagcacaaattaagatactttctcgcaaccacccaaaaatattgaaaagaaacttccagtaaactactacgaccaggaccctaatttacggaaattctaacccggcagcataattaaatttgaggagaatataaaagtgtatcaatagaacactactgaccattataattataaataccagggaaaatgattcatatatcttatgacagtaacgtaaaataaaacttaaataaaatgaatcatagctcagaacattaaatcaattatcacttgactcttctattaaggcatatgcaaagaac

SEQ ID NO: 33755 - DNA, 339 bp, Glycine max
  Clone ID: PAT_MRT3847_130485C.1
cgggggaaaaaaaccccggggcgttgaaaacaatgaaagccccactcacttttttggggtttttggggccgccagaaaaaaaaagggggggtaccccctctggggcttggaaaaccctcccccgaaagggggggattaaaaacgggggggggaaaggggggcgaaaagggaaaaaaaaaaaaggatggggattacaaaggaaaaccccccagggggagctcttcctcttgggatggttgaaaaaggcctggaaaccatcaggcgggccgttttcggggggggcccccctttcctaatcttgaaaggggaggggggcccttataactgtaggtagggggc

SEQ ID NO: 33756 - DNA, 211 bp, Glycine max
  unsure (1)..(211): unsure at all n locations
  Clone ID: PAT_MRT3847_130486C.1
aattacactttcnatctcaganccaancacantnncatngnagntcaaacactcncntggcagcngacangaagattgggatcggcntcaacggatttggaaggattggccgattggnggccagggttgcncttcagaggaatgacgttgaacttgttgcngtcaacgancctttcatcaccactgatnacangacanaggtacgacaccg

SEQ ID NO: 33757 - DNA, 245 bp, Glycine max
  Clone ID: PAT_MRT3847_130487C.1
gcgctcacgcgtccgaaagtttgctctacaaaagcacagtttgttagtggaaaaaccttcaaatatgaactaatgggtgctggtacacattctttataagattttactgactaggatgacctagaccctctcacaacgatcgttgctatattgatacagcgaatatagcctaattataacgaggtccaggctcagatggaatcaagttagcttaaattgtctgtagacgatgttgaaacttctaa

SEQ ID NO: 33758 - DNA, 1395 bp, Glycine max
  Clone ID: PAT_MRT3847_130488C.1
accagtctaaacctcataaagcataacacgcacaaatgggttctcatctccaattatctttccttgtgcttgttatggtcactttggcaacatttatgatccctacctttgctcagctcactcctaattattatgacaaagtttgccctaaggcgttgccaatcataaagtcaattgttaagcaggcaattattcgtgaaaaacgcattggagcatccttgctgcgtttgcattttcatgactgctttgttaatggctgtgatggatcagtgctgctagatgacacaccttccttcttgggggagaagactgcacttccaaatcttaattcaattagaggatttgaggtggttgatgaaatcaaagtagcagttgacaaagcttgcaatcgtcctgtagtatcatgtgcagatatcttagctgttgcagctcgtgactctgtagctatattggggggtgcacaatattggtaccaagtgttactaggcagaagagatgcaatatatgcaagcaaggatgcggcaaatgccaatctccctcccccattcttcaacttcccacagcttcttgctagtttccaatctcatggccttgacctcaaggatctagtggtcctctctggtggccacacaattggactagcaaagtgcattaccttcagggacaggatcttcaatgaaacccacatagaccccaacttcgcagccactttgcgcgattcatgccctcgaagaagcggtgatggagacactaacctaacaccattggatgcctcctctccttcacaatttgacaacacatactacaaggctttgttgcacaaaaagggtctcctccattctgatcaagagctattcaagggtggtgatgatggtggtgaaagtgatagattggtgcagctatacagctatgacccttatgcttttgctagagattttggtgtctccatgattaagatgggtaacttgaagcctcttactgggtatgagggagagatcaggtacaattgcagaaaagtcaactactagcactgcatatcataaggattatgattgaacaactgtttaatatatataaagtcatgtgtcaatttggcaatttttataatctctatacattatcttaaaatactttttattgattgtggcaataacactctctggttcaaccctactcaaacaggattgtctccgatgaataataatgtggtctaaataaaaacaaaataatgaaccgtggagtgtaagaagtctgtaaacgcgagatgcgttgctattactattattattttcatttgtttcgttgtgagaccaattggctcttgccttggaagtctttatatcaaaatgtatatgtaattcggttgtaatcacaatcaaaaagtgttattggttt

SEQ ID NO: 33759 - DNA, 385 bp, Glycine max
  Clone ID: PAT_MRT3847_130489C.1
acccgaagcatatcttattgccacctgatacacaaaaagggaaataaaatctactacggaatagtgttatgttgggtcacatgcaaagctggactgtagacgattgatggatccgattactggatataagtggagtgtaagtaatggatctaagaaaatgaggttgaagcatatagagatatgagcagtgactgatgcctcatctaaggaagaataagagattgacacggaaactggtggtccagtatgtcttgggatgtaccaaatactggatgccaaccaagtaagagatgatttactgcttgcaaaggaatgttacaattatcaagaaagtcttgaaatatttccattgagctcattcttaatgcgtcattcaacaccaaca

SEQ ID NO: 33760 - DNA, 1006 bp, Glycine max
  Clone ID: PAT_MRT3847_13048C.1
acgggttgcagtcactgctttgtttagatcagaaccagatcgtgttctcttcttccattggcaaacatggcaactcaaatgagcaagaagagaaagtttgtggcggatggagtgttcttcgccgaactgaacgaggttctgacacgtgagttggcggaggacggttactccggcgtggaggttagggttacgccgatgcgcaccgagattatcatcagagccaccagaacccaagccgttctcggtgagaagggaaggagaattagggaacttacctcagtggtgcagaagaggttcaaatttcccgagaacagtgtcgagctttatgctgagaaggtcaacaacagaggcctctgtgccattgctcaggccgagtcgcttcgctacaagcttctcggtggcctcgctgttcgcagggcttgctatggtgttttaagatttgtgatggaaagtggggccaaaggatgcgaggtcattgttagtggaaaactgagagctcagagagccaagtccatgaaattcaaggatggatacatgatttcttctggacaacctgtcaaggattacattgactcagcagtgagacatgtgctactaagacagggtgttcttggtatcaaggttaagatcatgcttgattgggatcctaaagggaaacagggtcctaaaactccccttcctgatcttgtcacgatccacactccaaaggaggaagaagaatacaaccggcctcctgctgtgttggcaaatgatattgaggtggttcccgttgcttgaaatgtttttgattgcttggaatagtaacgggtagtatttgagttcctagtatgcaatccttgttgggaaagactagttcaaagttttggtagtttcttgacagtttatgaaattgctactaagtacaaagtatttaagcatcaattgattttttttattattatttaactctacatgtgctgagcagttcaaattgtgttagtggtttataatgtcattggtttgggta

SEQ ID NO: 33761 - DNA, 508 bp, Glycine max
  Clone ID: PAT_MRT3847_130490C.1
aattcccgggtcgaccgcacgcgtccgcccacgcgtccgcactcactaacgataagcagcttttattctacgactgtataactatcttcgacttggcggatactttaaacccttccagagtccttccaatatgacaatcttctatccaccaccaaccgcatttccccagcggcacgtgtctttcaaaccttactcgcgttcataccgcgcgttaaccgaggaatccactcttccatgataccgagagagggccagccacaccagcaacaacaacaagcgtcgtctctcgaagacgctctcgtcaacagatcattccgaatcgacttcttcgaggccatcgtaagaaccgcatcgctctacaactgcctctccgaaacgaaccttcacgccaccgttccatgcctctagttcaacactcgtggcaaaattcgagatatatactacactgatgattacctcgtttttatgaccactgatctgcataatacgattgatcagaattcttgct

SEQ ID NO: 33762 - DNA, 289 bp, Glycine max
  Clone ID: PAT_MRT3847_130491C.1
gcttatgaaccaagggagcatagttcatttggggcgggattgcataaaaatcaccttattttatcccacttaaattggagactctcaaaactcccaacacctagtgtgcgcagcgaacatatatggtcgccggttctctccttgcattcgatgaggacctagccttaacatcgactgctcccagtacaactgaatggcgagaaccggtttgtttaagatcaaatgtcctgctttaaaatttttcgccctcgaggggatctggcattatgtcctcaaggattccaagact

SEQ ID NO: 33763 - DNA, 159 bp, Glycine max
  unsure (1)..(159): unsure at all n locations
  Clone ID: PAT_MRT3847_130492C.1
tgatacaatgtacntaaaaatngaagactgatgcagattganggagctgaggaaggaagagaagtntcnncacataatgatcctaagttagtgcagntggnnaagtccacatcatccagccatgataaaacagatgcaaacatcggggaattaaatgnn

SEQ ID NO: 33764 - DNA, 340 bp, Glycine max
  Clone ID: PAT_MRT3847_130493C.1
aatcatgtgagcaatcctccatgttatatctgcaacaacttctcatcatcatgagcggcagcaccaccaaaacttaccttatagtaataattctcttcctgtggtgcgtcctgatgctagtgctttccagaggtatagacaagacttaggctccaacatggcctcaaatttcagaaggcaaagcctcatgaagaggtctcttgtgttctttagaaacatgaactttatgagaatgagagaacgcgttcaagcaacgtctcgtcccaccaatactcagcttcatcatatgatatcagagaggagaaggcgtgagaagctaaacgagaattttcaagcactt

SEQ ID NO: 33765 - DNA, 217 bp, Glycine max
  Clone ID: PAT_MRT3847_130494C.1
gatccattcgttctatacagtgacaatattggctggagtcataagtggtgctgtgcaaattattatttcaagcagtgccttatcttaggctacaacaaatgtagataatagaacacctcgcaccaagctactccacacactgctggacacggactctttacctgggaccctgaactacaacagatcatacttcgagtcagaatgtgaagatgccatc

SEQ ID NO: 33766 - DNA, 459 bp, Glycine max
  Clone ID: PAT_MRT3847_130495C.1
ggtttttttattacaataatagtgttgtaagtatgttcattcgtactcattagcagatatcaattaaactcccataatgctctgatgtaaatctcttcaaaatataaataatatagttttcatttctaatgcatggcatccccaaaacattaataattttctcctctcctttagatccaccactgcctgctttactagtcaaaaggcatatctagataaaccctggaaaaaaaacccacgatatgattaattaaaaggttttctcgtatcctatgcttttaaacaaaaaaggtacccaaggtaagaattttatgtctccatggtatttggatttcagatcattagggtggctaggatatgcagaagatgccaataccataaccatatccaagacaacagacccctctgctaaattgtaacatactgggatgagaagtgttaactgaagcattcttgaaa

SEQ ID NO: 33767 - DNA, 259 bp, Glycine max
  Clone ID: PAT_MRT3847_130496C.1
cactctctctgatgaacttcacattcacgcgccctcctcatgctgcacccttccctaacactcctcctcctcctcctcctctttcaccccaacgccggggaccctaacgacgccaaaatcctccggcaactccgcaacgggctggacaacccagaacaactgccatggccggacgagggcgacgacccatgtggttggaaatacattttctgcgacacaacaaacgcgtgaaccagattcaacccaagggcttaaacct

SEQ ID NO: 33768 - DNA, 489 bp, Glycine max
  Clone ID: PAT_MRT3847_130497C.1
aaaagaatgtgtcgattaagcatcaagggaaaaaagggggaaaatctctgaggggttcctaatttttgtattttgtttcgagttttgcaaaaaataagttgccaatggcatacatggaggagatatattcattttgaaccaaaaccaagccaccttgtcaagaaaaacttgtttttcccacgagggacctccttttctgcatgttgtggtgctggtgctggagaaggagatagcaaaggtggcgtaacaagtttgactggatttggcgaaaccttgctagctttaaaactttttgtgtcgaaggaatttgtctttgaatttgatatgatgggttcacggtcagatttagagcttgactttctctcacaaactttatgcttcgtatttccttcactgttttgttcactttcaaccggaggcctcccgtagttatggttcaaagcttcgacaaaagaagcggttttttggtcttgcatcaattgatcaaat

SEQ ID NO: 33769 - DNA, 356 bp, Glycine max
  Clone ID: PAT_MRT3847_130498C.1
ggctcgaggaaggaaaggacaagaacagtttactatgaggaatgaacttttagagaatgagctcgttagtaatttatctgacgatggttctacagagaaagggaaattcaatagtactacttttgtgctaaacaagaaaacacatgaacattcaacaagtcttgtgattgatgataaaacagtggacgtgacaaatgtcaagtctacttcacaatctgctgagaactatgggatgttcagtagcaatcagacccatattcaggcagaggaacattataccacacatgatggttatggtggtactttattgccatgaagatgtaaatgcgaatggaagctttattaaccatgaaact

SEQ ID NO: 33770 - DNA, 537 bp, Glycine max
  Clone ID: PAT_MRT3847_130499C.1
cgtcggctgctaatactgctcgtggtggccagcagggtcatcatgttttttttcttgctgtgtttaggccattggagcgagagaatggaagcttcactgtctggcaaacacgcgtgctgcacaacccgctcctaaggcatctatatgtatacgtaactacatataccaaagaactgattcgcgggcgaaatggctctcgctcattaatatacacttggtcacaagctagggacaacatggcagaagaggacgatgaaggtcaatatcccagatcacacatagctctattgattcactcgtatgcaacctgtaaacccgcacttatttctctggggatacacattgaaccactcataataccgaatgggcacacttgatctgtatcacaggccgagccataacccacttattaggaccatcggcaggtgcaacatcccatagatgcctggcttccaatcacgtggttaagaaatggaaacgcctattatgcagccgttctattcttaattcccacatttgagtgcaggctttcatgct

SEQ ID NO: 33771 - DNA, 153 bp, Glycine max
  Clone ID: PAT_MRT3847_13049C.1
cccacgcgtccgtgaagatctcgattagcctaaaattgcaagaacggcttcaggctctggcgatcaacaaacgcatcgcatagatctaagatttgaggctaagagaatggcaacttctgaacttatgtatgaagataaaggacaatgtactgt

SEQ ID NO: 33772 - DNA, 394 bp, Glycine max
  Clone ID: PAT_MRT3847_1304C.1
ctctctctttctttcaaatctcaaacttgtccactacatgaaaattcctccactgttcatgtacagctctcatctaatatgaactctactttcttatatactcaacctttcattatcttaatttatattctatatcattaactacatctgcatcgatcataaattacaccattacactccttttacataccctaattacatacttacattttatgcatcatttatatttcctctcattttaccaaataatctatttttacctcatattcctttacattaaccttttatttttattccttatttaaacatttcttccacttcctattttattttttatcaaaatcttcccttataataaatttataccacttatcaacataccatttataaccta

SEQ ID NO: 33773 - DNA, 673 bp, Glycine max
  Clone ID: PAT_MRT3847_130500C.1
ccacgcgtccggcagaagatatcagtacttgactcttctaatgaaagtcaagattatattgattctttattcaagaggtgtttgctggctagtgataaaactacaaataaagattggaaagaaatggaacttaggagggaggaaatgtcttgtaaatcaggaaatgtatattggtgggtaggtaggaatattactaaggcgctaaattgtcaagtggatgttgcccaacctgagatcccggaatctaatgctccagttgctgggggtaacatttcagtagatacaagcacccctgcattggctaatgagagtgacgtgtctagtcctaattcaatcacacatgaaactcaatcattatataatgctgcaactctgaacacaagaatagttagccctctttgttcagactattttcttcaagctgtgcctgatacttgtcagatcctttcttctagtatctgtgcggactatcatattaactctctagcttcatataatagtgcttctaatcagtgccaacatgagattgatgataacaaatctctggaaatccaaagaaggcatttcttggatatagctgatgatgaacctaaggttcagacctctgcaacccatctaaagccttgtaattaccaagccaagcaagaaacatgtttttctggggcgttagctg

SEQ ID NO: 33774 - DNA, 428 bp, Glycine max
  Clone ID: PAT_MRT3847_130501C.1
tttgttttcgacgtttgaggtcaaggcttcagatattagaaagattttaatactatggcagaagctgggggagtaggaaagaatctcactaaggaattggctgtcgatgttgatgatggaaccctggaaatccacttatactgggcaggaaaaggaactactgccattcctgatagaggcgtatatggacctcttatatctgctattgagatgataccaaactttgagaatccttcaaaagggatgtctactggattcattgctggaattgttgctgcatcttgcgggcttgtcatattgacactgattctcctctggaagatgggttccattcgtaagaaagatccgacagattaagcacttctagaattgaaaacgggggattccaactcaagacagaccaaagcagctactaataactttgaccc

SEQ ID NO: 33775 - DNA, 151 bp, Glycine max
  Clone ID: PAT_MRT3847_130502C.1
tcggcagtattataatagaaagaggactcacagtttaagagatagggagctatagccatgatgaggaaaactttcaaagaggtgaaagcaaaagaattcttcttttccttttttatatatacttgggtgctaaactgtgtgagttcattga

SEQ ID NO: 33776 - DNA, 208 bp, Glycine max
  Clone ID: PAT_MRT3847_130503C.1
tgggaacatcgttttctcgtttgtgttttttccgttaaaatcataaatttctcacggaacaccagatccacgctcccgcttacaggccttccaccatctacagatccatgcttgacgagttcaccgacgacgtcatgttcctcgacaacgaccgcgatcactgtattgataccaccgaagctggcattgaaaccccgtcaatagggca

SEQ ID NO: 33777 - DNA, 469 bp, Glycine max
  unsure (1)..(469): unsure at all n locations
  Clone ID: PAT_MRT3847_130504C.1
tatttattttataaaatcagttaaaaaatttatctggcacatgtaagtaagaagcattacattaaaagaaaaatagtgacaatatattcaaatactgctgactgcgtctgtcatcgatcggtgcaacttctatcactttttcccgaagattttaacaaatgatcaccaaaatccggcatcaaaatcctcaaactatgtacacaagttgaaacctttcttcgaagtccagaaatgaaagcagttaccacgaggcagttgacttgagcaacatctcaactacaaagctgtctcccatacatatatgatgcttggtaagattctaaacaacacaaccaacaaaaatataatagttaatttcacacaaggaacatgaactgggttggaagaccttggaaataaaaatctttgtcctttgatatattccgnggcagtctgttgaaacactctcatctactatcctataataggt

SEQ ID NO: 33778 - DNA, 1543 bp, Glycine max
  unsure (1)..(1543): unsure at all n locations
  Clone ID: PAT_MRT3847_130505C.1
ctcgagccgattcggctcgagcaagccctaaccctaattcccaatcccactcattcctctgatacgatcgtttcgaagatgggcgatttcaacctcgccctggtgatcgtggcggtggtggtgtgcgtgatcgtgctcctggtgatcttggatctgtgcttttcgctatatttggtggtgttggtattgcctgtctaccattaggacttatattttcatttattcggcgtccaaaggctgttatcactcgctcacagtatatcaaggaagccactgaactgggtaaaaaagctagagaactaaagaaagcagctgaggcactccatcaggaagatagatgngtttcaaagggtagaaagtttcgtaaaaatgtgaaggaagttgagaaggagttgtttcaattagaagaagatgtaaagcttcttgaagaggtgtatccacaaggggaaaaggctgagacaacatgggcactaacagttcttggttacctggcaaaatttgttttgggaattttagggttgattgtttcagtggcatgggtcgctcatattattatctacctattaattgatcctccactttctcctttcttgaatgaagttttcatcaagctagatgatgactggggacttcttggcactgctgcatttgcatttttctgcttctaccttctccttgctgtgattgctggggccatgatgcttggactgagactagttttcattactatacatgccatgaagtgggggagcaactctcatgaactcttttctgtttaatgtgggccttattcttctttgtcccattagtgtgatccagttctgctccacagcatttgcctactatgctcaagcaactgcagcccaggaaatatttggtcacactttggagtctcttcgaggaattaaatatttgtacaagtacaatgtattccaaattgcatttgttgttttggctggattgacctttgtgtattacgccgcctttggatggagaagaaaaaagcctagtggcaggttccaattgtctacatgaggtatggcttgcctggaaaagcactttctgaagtgagccatcgggattccttgcatcattttagagtgttttttatatttggatgtgttttggcctagagttgttttatgttgaaagctatagagcaagctgatcatcctctgagtagaataatctgatgcggtcgaatcattagttgggtgctagtgctgcaactttggcctttgctgcttctgttgccgttgtatgtatcattcctttgtttgattgtgttgcatcccacttgttatgtaattaaactgttattatgtgtatgcaaagagtactggattccggcaacactgaggtaacacaacccttaccaaatagaaaattgtacgagcagggtgttttttttttaatgatcatacttgtttttgtacttcattctttgtataataggtttcttagtagggctttcagattgtgtattaccgttttgaagttcttttgcatttgattttcgctgaagtagctatatactttccct

SEQ ID NO: 33779 - DNA, 2686 bp, Glycine max
  Clone ID: PAT_MRT3847_130506C.1
ggattaccgaactccacctcagcatcaccaattcccctacctttatgatttggagtacagcctggtttgaatttggcttgcaagttgcaacagccggccacccatttataattacacccataccccaaacagttccctcctcacccctctcccctcgccaacggtcacaaggacgcaacggtaaattccccctcacaccgaattcaagaccagcatagcctcctctaaccgtagcaagagcaaaactccccattcccaccaccggagataaccaaccaaatcccctctctccctccctcctcattttctctctctaaaccagatccgaacaagccctaaccctaattcccaatcccactcattcctctgatacgatcgtttcgaagatgggcgatttcaacctcgccctggtgatcgtggcggtggtggtgtgcgtgatcgtgttcctggtgaacgtgtacctcctcgtgaactaccagcaccccgatgacgccaaccaggcctacttccccaaattcgtcgtcgttttgggcctctccgtcgccgccatctccatcctcatgctccccgcggacgtcgcgaatcgccaggcctgccgccacgcgatctacaacggcgcatgcagcctcacgctccccatgaaggacctctggctcgccgtctacatcctcgacgctgtcctcgtctttttcgttatccccttcgccatgttcttctacgagggcgaccaggacaagagtgtggggaagaggattaagagtgcgttgatgtggatggtcaccacggctatagtgtgcgccctcgttctgggaattttgtatgggctggttggtaaggtggactttactattaggcatctctcttcatccacaacttcatttcctagcacatggacattcagtagtggtcaaccttgtattggaagatgcccatcagtgttcagcattctctgctagtccttcatcagagaaaacatggaccatgcgtactacctttcctgaatatgtcgttgctcttgctactattgttggatctgtgctttttgctatatttggtggtgttggtattgcctgtcttccattgggacttatattttcattcattcggcgtccaaaggctgttatcactcgttcacagtatatcaaggaagccaccgaactgggtaaaaaagcaagagaactgaagaaagcagctgaggcacttcatcaggaagaaagaagtggttcaaagggaaggaaatttcgtaaaaatgtgaaggaagttgagaaggagttgtttcaattagaagaagatgtaaagcttcttgaagagatgtatccacaaggggaaaaggctgagacaacatgggcactaacagttcttggttatctggcaaaatttgttttgggaattttagggttgattgtttctgtggcatgggtcgctcatattattatctacctattaattgatcctccactttctcctttcttgaatgaagttttcatcaagctagatgatgtctggggtcttcttggcactgctgcatttgcatttttctgcttctaccttctccttgctgtgattgccggagccatgatgcttgggctgagactagttttcattactatacatcccatgaagtggggagcgacgctcatgaactcttttctgttcaatgtggggcttattcttctttgttccattagtgtgatccagttctgctccacagcatttgcctactatgctcaagcaactgcagcacaggaaatatttggccacaccttggaatctcttcgtggaattaaatatttgtacaagtacaacgtctttcagattgcatttgttgcattggctggattgacttttgtatattatgctgccttgggatggagaagaaagaagcctagtggtaggtttcaattgtctacatgaggttatggtttatggcatggaagagtgtcttctaaagggagccatcgggtattcttatcgcaaaatctcatttcaagtggcttttattcggatgtgcattggcctagttttgttttaatgtcgaaagctatcaagttggctgatcagcatccgaatagaatcattttcctgtggtgtcatcattaggtgggtgcttgtggtgccacttaggtctttgatgattctttcctcgcccttgtatgtattattcattcgtttgatttgtgcagcacattcttctgattatgtaattgaatatatgtgcacaagagactactgggttctactaaccctttgatgtataatgcaactcttcccaaacataattgtaccagttgtcattttaatattcacgaccgtgtgtcattcctctgttattacgtgtatgcaaagagtactggattccttcaatactgcgaggtaacacaacccttgccaaatagaagttgtacgagcagggtagttttttttttttttaatgatcatacttgtttttgtacttcattcattctttgtgtgataggtttcttagtagagctttcagattgtgtattaccgttttgaagttcttttgcatttgatgtttatgtagccacctttgtttttagctgaagtggttatatactctcccttctctatggagtagctacatactttcactacatttgatattcaatttcttcgagtatatcattgtatttttataatgaattcaacaattacatcttaccat

SEQ ID NO: 33780 - DNA, 537 bp, Glycine max
  Clone ID: PAT_MRT3847_130507C.1
gtctcttcgtggaattaaatatttgtacaagtacaacgtctttcagattgcattcgttgcattggctggattgacttttgtatattatgctgcctttggatggagaagaaagaagcctagtggcaggttccaattgtcttcataaagaaaatagcatggaagggtgtcttctaaagggagccattgagtattcttgtcagaaaatctcacttgaagtggcttttattcggatgtgcattggcctagttttgttttaatattgaaagctatagagttggctgatcagcatccgaatagaatcattttcctgcggtgtaatcattaggtgggtgcttgtggtgccacttaggtcttgattattctttcgtaacccttgtatgtattattccttcgtttgatttgtgcaacacattcttctgattatgtaattgaatatatcatatgcacaagagactactgggtttctactgacccgttgatgtataatgcaactcttcccaaacataaattgtacctgtggaccttttaatgttcaaa

SEQ ID NO: 33781 - DNA, 1135 bp, Glycine max
  Clone ID: PAT_MRT3847_130508C.1
ttactcgaagaaattgaatatcaaatgtagtgaaagtatgtagctactccatagagaagggagagtatataaccacttcagctaaaaacaaaggtggctacataaacatcaaatgcaaaagaacttcaaaacggtaatacacaatctgaaagctctactaagaaacctatcacacaaagaatgaatgaagtacaaaaacaagtatgatcattaaaaaaaaaaaaaactaccctgctcgtacaatttctatttggcaagggttgtgttacctcgcagtattgaaggaatccagtactctttgcatacacgtaataacagtttaattacataacgagtgggatgtaacacaatcaaaggaataatacatacaacggcaacagaagaggcaaaggccaaagttgcagcactagcacccaactaatgattcgaccgtatcagattattctactcagatgatgatcagcttgctctatagctttcaacataaaacaactctaggccaaaacacatccaaatattaaaaacactctaaaatgatgcaaggaatccccgatggctcactccagaaagtgcttttccaggctacgccatacctcatgtagacaattggaacctggcgattcgcgacgtcggcggggaggatgaggatggagatggcggcgacggagaggcccaaaacgacgacgaatttggggaagtaggcctggttggcgtcatcggggtgctggtagttcacgaggaggtacacgttcaccaggaacacgatcacgcacaccaccaccgccacgatcaccagggcgaggttgaaatcgcccatcttcgaaacgatcgtatcagaggaatgagtgggattgggaattagggttagggcttgctcgagccgaatcggctcgagagagaaaatgaggagagagggagaggaggtatttggttttgttccggtggtggttttttgctacagttagcggtggtggttttgaggtgtgaggtcaaatttactgttgtatcctcgtgaccgttggcgatgggagaggggtgagcaggaaactgtttggggtatgggagtaatttcgaatggggtggtttgctgttgcaagcgaaattcaaaccaggctgtactccaaatctcgagccg

SEQ ID NO: 33782 - DNA, 587 bp, Glycine max
  Clone ID: PAT_MRT3847_130509C.1
atgcaattgcctagaactaataactttagggtgaattatgctcccttttcctcccaatttagagatacttatgctgtttttgcctttttggtttactgactgtttggttcaaaggaacggaggagggccgggaaaataaaatctctccaatattaaaggggatgcataagttggagggagggattttggcctcctatgttcccctgccctacactcccatctagtctgttataatgtaattgagctttttaaggactctctgattccagggcagctagctttgaatatgtactgactttggaacttgagaggatgaaatggagaattttgagtgaaagtccaaagccagtaatagaggtgtttaaaatttcattttcatctgttaaagtcctaaaatccatagtttggatgttcaaagaaaggaaaaagctcaccacgaggtatgcttatattataatggactggagcatgatgaaattaggctagaactactttgtatttttttttccatctgtagatagatgaacttatacatagatacattttaatttatatgtggagaaaatttgagattcctctgttgaccc

SEQ ID NO: 33783 - DNA, 356 bp, Glycine max
  Clone ID: PAT_MRT3847_13050C.1
ttgtgttttctcaaaagccgaacatgatgcatttgcattccaagaggacaccaaaacggagggcaaagagcccagagggctgactaggattctatggagcgcgccgctgtcctaggcgttccaaatgaaaaattatcaacaagctactacttgaatggctgccaacactgcgactggaccaaataaaaaatgctaacggattaaaaaagcagcactatccaccagtatggaaaatggaatccgctgaacatctgcggactttaaaaccactcactcagtggccgacaaattgattcatgcttaagaagctcatcctgtgaacacccgtgcgctagccatgaatacagtatacccat

SEQ ID NO: 33784 - DNA, 105 bp, Glycine max
  Clone ID: PAT_MRT3847_130510C.1
cggctcgaggccgagcttaggagaatagaataggagcaggaggcctcacccttgccacactggttaaaggttggcaaggagaacgtgttagactctaccttaggg

SEQ ID NO: 33785 - DNA, 414 bp, Glycine max
  Clone ID: PAT_MRT3847_130511C.1
tgccaaaaaaacaacaaaagggaaaccacaaaatttatgtaactgatcaatctctttctctctctatctgtcgcttccatgcaatggcatatttgaagtcataaggttcaaaattggacaagttccgatctcacaatggggaaatcatcatcaaaatggatcatcaatgtactgtctgagataacgtcatccatatcaaatatttaaatacgcagaaagaatcatgttaatcatacaagaaagacttttaataacgtcaaaagtactataaaatggtttagccttaaaaccaaactcccatatcattgccacactttaggaagacctacagctggaaaatttagaagcagaaaaagtaatacttgagaatcaagaaatatacacaatgggatcaatttatgacaatgctgcact

SEQ ID NO: 33786 - DNA, 1951 bp, Glycine max
  Clone ID: PAT_MRT3847_130512C.1
ggacatccattcaattattatttattcgttacgagattccacctttttctggtgtgtgcgttcctaacattattgtttcctaccaagttctctgtctggggagttcttagcaccaccaccagcttctgcagtagctttaagctacgaaagattttccttgaccatggggcaaaagcatttagtgacggtgttctgtttatgggctttaacatgttcccttcttccatctttctcctttggaattctgagaattggtttgaagaagagacctctagatcttgatagtattaatgctgctagaaaggcaagagaaggtctaagatctgtaagaccaatgatgggtgcacatgatcagtttattggtaagtcaaaaggtgaagatatagtacctttgaagaattatttggacgctcaatattttggtgagattggaattggcacacccccacagcccttcactgtagtgtttgacactgggagttccaacctttgggttccatcatcaaagtgctactttactcttgcttgctatacccataattggtacacggctaagaaatcaaagacacatgtcaaaaatggaacttcatgtaaaataaactatggaactggatcaatatctggtttcttcagtcaagataatgttaaagttggcagtgctgttggcaagtatcaggatttcaataaggcatccaacgaaggaagtcttacctttctgtcagcaaagaacgatggaatactgggacttggatatcgggagatctcagttgaaattgctgtgcccattattgttcaaaatggtcgagcaaaaacttatcagtgagaaggtgttctctttttggcttaatggggatccgaatgcgaaaaaagatggtgaattagtttttggtttggtattgactgaaaacacttacaagtgaaaccacacttatgttccaattactgaaaaacgttactggctaattgaaatgggcgattttttcgttggatgtgtttcacaggtgtttgtaagggatgactgtactgctattgtggtattctggaacatctttgcttgcttgctccaatcctgttgttggctgaaatcaaccatgccattggagctgaaagagttctcagtctttgactacggaaatgtacaagttgaatatggagaatgttatgggatctcttggtatcaggggtgaaacctgatgacatatgttcacaagttggtttatgttcttccaaaaggcatcaatctaagagtgctggaattgaaatggtgactgaaaaggaacagggagagttgtcagcgaaagatactcctttgtgttcttcttgtcagatgcttgttctttggatccagaatcaactaaaacaaaaggcaacgaaggacagagtattcaactatgtgaatcaactgtgtgagagcctgccaagtccatctggagagtcagtgataagctgtaatagtctttccaagatgccaaacattacgttcacaattggaaataaaccttttgtcctcacaccagagcagtatattctaagaactggagaaggcattacagaagtctgccttagtgggtttattgcttttgatgttcctcctccaaagggtccattgtggattcttggcgatgttttcatgagggcatatcacaccgtctttgactatggaaatctccaagttggctttgccgaagcagtctaattacgctttctggaggattttctttgtaaatttgttaagcgtgttgtaaataagctgttataattgtagctctggttactttttgaaaccacgaatgtatttatccatttaagacgtagaagtatcccacttgcaagtgttgtgtgctttttatatgaaaaaaccatcctcatttcattccgtgtttgaccaaaaaaaaaaaaaaaaaaaaaaaaaaaaaaaaaaaatacttgaaataaaccatgctgatgccac

SEQ ID NO: 33787 - DNA, 1324 bp, Glycine max
  Clone ID: PAT_MRT3847_130513C.1
cgcacgagaaaaattcgcacgtgcacgatttctcacttcaactttgaacttcttttctctattattattatctttctctttttcttcatctcttatcttccttcacctttttattgaaagaaaaaaaaaatgagcaacataagcatggtagaggcaaagctgccaccaggattcaggtttcatccaagagatgaagagcttgtgtgtgattacttgatgaagaaggtgcaacacaatgattcccttctcttgatagatgttgaccttaacaagtgtgagccatgggatattcctgaaacagcatgtgttggagggaaggagtggtatttctacacacaaagagaccgtaagtatgcaacagggttacgcacaaatcgtgccactgcctcagggtattggaaggccacagggaaggacaggcctatcctccgcaagggcacccatgtagggatgaggaagactttggtgttctatcaaggaagggcacccaaagggagaaaaactgagtgggtcatgcatgagtttcgtatcgaaggacctcatggacctcctaaaatttcttcttccaaggaagattgggttttgtgtagggtgttctacaaaaacagagaagtttcagccaaacctagaatgggtagctgctatgaggacacgggatcttcaactcttcctgcgttaatggactcttacataagttttgaccaaactcaaacccatgcagatgagtttgagcaagtgccctgcttctccattttctctcagaaccaaacaagccccattttcaaccacatgaccactatggagcctaagttccctctcaaccatgcaactacaacatatggaggagcaccaaatttgggttattgcttagaccctttatcttgtgacagaaaaatgttaaaagctgttttgaatcaaatcacaaagatggaaaggaatccacttaaccaaagtctaaaagggtcaccaagcttaggagaaggaagttcagagagttatttatctgaagtggggatgccccacgtgtggaattactgatgtgagactttagtacttaaaccctctcctccacctatgccaccatgaaatttttttttttaaaaaaaaaacaagaaaaaaaaaggtataagggggaagataaaatcaatccattgttttaagtcatggtgagtacttatgttttacctgtggtgttttagctattaatgtatacccatccatgatgtgtccctatatattaggaaaatgggacttgtaatttaaacttataaatatttgtagttaattttatttagtggatgatttttttttcttctttgttaaa

SEQ ID NO: 33788 - DNA, 613 bp, Glycine max
  unsure (1)..(613): unsure at all n locations
  Clone ID: PAT_MRT3847_130514C.1
gactggagaaagcaggacaagtattggcatcagcatggcacattacaagtatcctaattttgaaagggacagaaaaggcataatattctgcccaacacggaataaaataaagagtgaagacgatggttttttcatataaaaagcacacaacacaacacttccaagttccaaggggatacttctacgtcttaaatggataaatccattcgtgattccataaagggaatcccagctacaattgttataacagcttatttacaacacgcttaacaatttttcaaagaaaatcctccaaaaagcctaattagacagcttcggcaaaaccaacttgtaaatttccgtagtcaaagacggtgtgatatgccctcatgaaaacatcgccaagaatccacaatggaccctttggaggaggaacatcaaaagcaataaacccactaaggcagacttctgtaatgccttctccagtttttagaatatactgctcgtggtgtgaggacaaaaggtttatttccaattgtgaatggtaatgttntggcatcttggaaagactattacagcttatcactgactctccagaggacttggtaggctctcacacagttgattcacatag

SEQ ID NO: 33789 - DNA, 1651 bp, Glycine max
  Clone ID: PAT_MRT3847_130515C.1
gtatttgtattttgaaaaaatttactctgttagatgaccccgtattctagattgtttaggaagctaaagattttcttgtttagtaattactgccaggaaagtgaaatatttgtgaaaagagaatatatttttctgattatatatttatctgagattggctgtgtggagaatatactacaaggacttgagtgtctcaattgtttatttccttgtttcattttatttgcgttctgtgtaaaattaggaatgtattcaggtcaacttacctttggatttccttgtaaggcagattttccttgaccatggggcaaaagcatttagtgacagtcttatgtttatgggctttaacatgttcccttcttccatctttctcctttggaattctgagaatcggtttgaagaagagacctctagatattgatagtattaatgctgctagaaaggcaagagaaggtctaagatctggaagatcaatgatgggtgcacatgatcagtatattggtaagtcaaaaggtgaagatctagtacctttgaagaattatatggacgctcaatattttggtgagattggaattggcacacccccacagcccttcactgttgtgtttgatactggtagttccaacctttgggttccatcatcaaagtgctactttactgtaagttcaacttaacctgtatttttttttttatattttcaacttaacctgtatgtcttcacaaccatgtgcatagaagcatatcatactgaccaattctctcttgcagctcgcctgctatacccataattggtacacggcaaagaaatcaaagacacatgccaaaaatggtaatgcgagcttcttattattcatgttgattatagtggtactgtcataggtgtatacaatatatatgccatgtaatgtaattttaatcatacctatcaacttgttgatcaggaacatcatgtaaaataagctatggaactggttcaatatctggtttcttcagtcaggataatgttaaagttggcagtgctgttgttaagcatcaggtgagtacttaatttatgagcttcctcttcaatatagattgtacaaatttgttgatagaaatacttacaaatgccactattgtaaactgtaggatttcattgaggctacccacgaaggaagtcttacctttctgtcagcaaagtttgatggaatactgggacttggatttcaggagatctcagttgaaaattctgtaccagtatggtgtgttccatctgctcttttgttgtttcatctgtatctgttctccatgttagagtgaagtattgtgaatcgtttttgtgcctctaattggccagttcatcataaaatcacaggtacaaaatggttgagcaaaaacttatcagtgagaaggtgttctctttttggcttaatggggatccaaatgcgaaaaaaggtggcgaattagtttttggtggtgttgacccaaagcacttcaaaggaaaccacacttatgttccaattactgaaaaaggttactggcaggttagcaaaaacacatttagtttgattaggaattccttttaaatatgtaattattcacatcagaaaatactttaacaaggaaattttctttttcagattgaaataggagattttttcattggaggtgt

SEQ ID NO: 33790 - DNA, 1209 bp, Glycine max
  Clone ID: PAT_MRT3847_130516C.1
tcaaagaaaagccacagtaatagccattcaaaatgactgggggacacactaatactgaaaagcaaattcactaccaattatgctattatctctgtagatagtttaaggccaactattttaattatttttgtgattctaagaatgttttttttgtgttttcagtatattctaagaactggagaaggcattacagaagtctgccttagtgggtttattgcttttgatgttcctcctccaaagggtccattgtggtatattaacttttcaaattatttatcaattgaaaaatcacatatgagtagaatggtacagccatgaatgaagcgaattacataaaatgttgttaagctatgttccctactctgatgcaggattcttggcgatgttttcatgagggcatatcacaccgtctttgactatggaaatctccaagttggctttgccgaagcagtctaattacgctttctggaggattttctttgaaaaattgttaagcgtgttgtaaataagctgttataattgtagctgggattactttatggaatccacgaatggatttatccatttaagacgtagaagtatccacttgcaactagtgttgtgttgtgtgctttttatatgaaaaaaccatcgtcttcactctttattttattccgtgttgggcagaatattatgccttttctgtccctttcaaaattaggatacgtgtaatgtgccatgctgatgccaatacttgtcctgctttctccagtcaatgacttgtgccaatggaaaattactaatgtcattatctgctaaggcaaaaccaattgcaaaatggtaccagaaaggttttggcttgctgttaaaaagagcaaagatagctgtaaccaccctcatttaatgtaatgcaaaggatcaacggctggaaaattactctgtatagtttttctcaactgctcctttaactccagtttttgaaataagaattttagtaccaatcatttcggatttttataaaaactagaagaaaaaagaaagttctatagtgtctccgcgggtaccaatacacgtatgcttgctggaatgaaaaaatcactttctagcagaggtgaaaccaataaattcccatgactcaaaggagaaatatatatatatatatattcactttttattataaaagtacgtcatcagaactgaaatatatataaaaaaataattcaacccaat

SEQ ID NO: 33791 - DNA, 200 bp, Glycine max
  Clone ID: PAT_MRT3847_130517C.1
tatataacccaactttctctctcaggaaccatcaattctcgatcctgccctctcgctgcaagatcctgtcggtgggtccaatcgcgcattagggtttggtctagggtcaggcaatgctggagagtatttggatgaagtaaatggccatattccagtggtgcgatcgtggtgttcctgaagcggctgcggcgttcatagtg

SEQ ID NO: 33792 - DNA, 1081 bp, Glycine max
  Clone ID: PAT_MRT3847_130518C.1
actatgtaacaagcataagcgcttatatactttgtgcaatgtcaagtatatcatatacaaattacatgagtatgattatgatagacggtatttaaatgaccagtaatacaaatcatcagtatactatataactgggtaaggtgtttatatacattagtcgtttatacaacataacggcgaagataatccaatctagctgaatgcttgagcttcataagagccttgacttcgtgctttctaaccatttccctagatatattcaagttcccagcaatttctcccaatgttctgtcacccttgccatcaagtccaaatctctgtctgatcaccaagctctccttcggcttcagggaatcaagcacatcatcaagagcaagccttagtagagcaggttgtttcctattatcaccattaacaccatcatcatcaacgatcccattaatgaactcctcttgcgtggttatatgtctcgagttcagagaaagaatggattttgatgccttcattacgtcatggtatctttcaagggatatatgaactctttctactaattcttcttccgttggtgacctctggagctcaaatgttaacttaagttttgttctttggatatctactctaaccctttcaagtccaaaaggaacacgtgtgaagcttgagagggttatggaacgaacgatagaatgtcttatccaaaataaactgtatgtagatagctgaagtcttctttttggctcaaaacgatcaattgctgtgataagtcccttaactcctgcctgacaaagatcttgaaacctcgggccacttgcaaaatcttgaaaatatttgttgatcacgaacaatacaagccggagattgtgctttatgagtttgtttctcgcagctcgaccaacctctatagctttccttacttgaataatactcatgtttgttgcatcagctagttcaccacctgtaatttctttatccacttcctttaaatcttcttttgcttgtaggagtgccttcattggctgcgtcaaagccagataccatgcccaaagtaagaaggaagaactggcggaatcttccggacgcgtgg

SEQ ID NO: 33793 - DNA, 1902 bp, Glycine max
  Clone ID: PAT_MRT3847_130519C.1
ggctcgagctcggacattgcagtttagacaaccccatcctcacctcgtgccgctcaggtccagtagattcctctctttcgattcatttgcttctcgctgatcaaagctgtttattaggtaacttggtatgggagttgtgactgtttctagctcggctgctcggactccattgggattgaatacaaagttttgcaataatcgtctgaagagacctttaattgtagcatttaagggggataagcacaatgactcagctttggttgcaacacaagagaaaattcctgtgtccggttgaaacagcgaagaaaaagcagaaaaagagggtaggaaagactaatgagctacttaagagagagagaacctctccatgcaccttggatgtggactacaatgaagctgcagccaaacttgaaaatatatataaactcagccctgtatctgatacctgtaatgtggaagatatagatagtaaaatcgagagagtcttgcggaggaggaagaaggttagtgaggaacgtgatgatggaaattgtgataatgtggttcagaaaccagaataagaaggggagacccaaacgattgagtcttgataagaggattgcattgaaaaataatgcaaaggaggaggtgattgatcaaactcagaagaaaaggaatgttaagaatagagtacaaaatattgatgtgcttatcagggattattcagcatcaactgatttagttagcatggactggaagaaaatgaagattccgccagttcttccttcttcagagcatgcatggttgttcaagttgatgcaaccaatgaaggcactcctacaagcaaaagaagatttacaggaagtggagaaagaaattacagatggtgaactagctgatgcaacaaacatgagcattattcaagtaaggaaagctatagaggttggccgagctgcgagaaacaagctcataaagcacaatctccggcttgtattgttcgtgattagcaaatattttcaagattttgcaagtggcccgaggtttcaagatctttgtcaggcaggagttaagggacttatcacagcaattgatcgttttgagccaaaaaggagacttcagctatctacatacagtttattttggataagacattctatcgttcgttccataaccctctcaagcttcacacgtgttccttttggacttgaaagggttagagtagatatccaaagaacaaaacttaagttaacatttgagctccagaggtcaccaacggaagaagagttagtagaaagaattgggatctcacttgaaagatatcatgaagtaatgaaggcatcaaaacccattttatcccttcattcaagacatataaccacgcaagaggagtatattaatgggattactgatgttgatggtgttaatggtgataataggaggcaacttgctgttctaagacttgctcttgatgatgtgcttgattccctgaagccaaaggagagcctagtgatcaggcagagatatggacttgatggcaagggtgacagaacattgggagaaattgctgggaacttgaatatttctagggaaattgtccggaagcatgaagtcaaagctctcatgaagcttaagcatccagctcggttggattatcttcgtcgttatgttgtataaattaacaaatatatatatatgcttccattggtgtcattttagtcccacgtacgctacctatagccatgcccttgataattctcataattggtcatttaaataccgtcaatcataatcatacttcatgtaatttgtatatgaaggagttattgctcataagaaataacaacccaatacatgttacatgtaatgtgttgtgttcatgaattacattccaaattatataatagttgctagagttcatgtctt

SEQ ID NO: 33794 - DNA, 266 bp, Glycine max
  Clone ID: PAT_MRT3847_13051C.1
agaatttaacaaattccattgattaacgagaaaaagaaattggtttacaaagcaaccatggctaaacgacggtaagacttcatgcaaagagagagggacgtccagactaacttgattaagcaagctgaaagccattgttcatctcttatcatttgtgtccactgtaagaaggtgtagtgttgggttaccctctttttgcatctgcattgattgtggatgtcagtgttatcatacaaagtgttgtatggtatcattttgggaaactc

SEQ ID NO: 33795 - DNA, 803 bp, Glycine max
  Clone ID: PAT_MRT3847_130520C.1
ggtctttcacccaggccaacaacatcaagaggaagaaggcaaggaggagaacatataatagcagagagaggaagcgccaagaacgaatacactgttactaattaccctatatttctctcgccagaaactgcacgtgtcgatcttccttcttctcacgctccaaattcaaaccttcagctacgctcttctctccgatctatcgtctttatttctctctttattttctcgggttttccattggaagcgagggttgaattgaggcgaagcatttgcagcatgagcatcgacagccccgagcaaggggacagctaggttttcgaggttccgactgtggagggcgagatttccatgggtgatggaggcgtcgcgtgcatgcatttgcagtatattatggagaggttgcccagttctgagaagactgtttgcggaggcaagagtgggaatggcttcaattccaagttgcgcaagtttgctggcaacgagaggaggaagatgaaaccgaggaagagcgaattggggttggacagagtgagcaagaggagcagcagcagcaacgatgttgagaatggtggcgaagtggagaagcagcagcatgagaaggtgcagaaggaggaagtggaggagggcgaattgggcactttgaagtggccaagagctgacctggagaatggggagtttgtgccggagatgccgccgccaccgaggagaggcgaggttgagaacggtgagattgtgagtgagaaatggaaaggaagggagctagagaaggcggagattggttctgggaaatggaggaaagagga

SEQ ID NO: 33796 - DNA, 190 bp, Glycine max
  Clone ID: PAT_MRT3847_130521C.1
gattttgctcaattgatggtggatttcatgttcctaatatgaaagtgcattttggaatttgtttttttcacgagcatgtttattttctatgtgagccatatgtgcaacgtgcaagtcttggctcagttagaaaatggcaaagcttgctgttgaacgattgttaattcaaaacaaaattcgtataaagtca

SEQ ID NO: 33797 - DNA, 436 bp, Glycine max
  Clone ID: PAT_MRT3847_130522C.1
cggaaaaaagcacaccaattgaaattcgttgccacgttcttaattaatccaattaatgaaaacatacggtggcaggagtcttattcacctgatgaatacacgaatagccaatactccctacataaggatgctaattctccctaaactattagcactcatcactcacactgggggtggagcactattaccctggcgggtcatccaaagcgggaagcaagctcttggttccattagcaccgggcgctttataatttggaccagcggaaaaatccacgcttaaatccccagagtagcctgggtatgcccttttgccgtaaacccatgggcaagcctaatgcggtctgagtggagaccttggctgggccctgatagaacccgttgccaatcgggttggaaacggccccgacccagaggcttgcctggttaataaccattc

SEQ ID NO: 33798 - DNA, 496 bp, Glycine max
  Clone ID: PAT_MRT3847_130523C.1
ccggccccaaaggtaaaaacattaaaaactctaaatttcaccaagcaatttaaaaaaaagggtttcaccacacttcacaaaaagctccaaaagtcccggaacaggggaggttccacggaagggccaccgatccccagggcccgggaagaaaaacaccccagaagggaccataatggggcaaacttcaaataaaaaccctctccttaataaccattttaaggggccttggaaccaacttcctaaaaatccttttccaggggagaaagatcttcacgggcctaaaaaaactcccccttttccatacccctcccaaaataccaaggaacgaacgcccttttgggatacatgagggcaaatttggggccgaggggaaagaaaaccccaccaacacggggggaatgggagataatgcacacggccctttgaaccttgggaaaatcaccacctggaacaacagccgggggcggggaatggatccccacttgaacccgggggg

SEQ ID NO: 33799 - DNA, 352 bp, Glycine max
  Clone ID: PAT_MRT3847_130524C.1
gtaaggaaagctggcacgcctgcacgcgccgcggccggaacttgccgggatccacccacgccgcccagtcatttcgatgagcgggccccataggatggcggagcttatagccgaccacaaaacctctctgaaggtgattacaagagtctgcaagatgcttgctacttatttgaggcctattccttaacggaaggaagatgactctctgtggtggccacagacggaaagaacaaacatattgttgattctcatgttgctggaagcacacgctgacaggggtttgctgacttgatgccatatgtagaccccgttgggctatctctcagtgctgtggttaacttcgacttcatgc

SEQ ID NO: 33800 - DNA, 259 bp, Glycine max
  unsure (1)..(259): unsure at all n locations
  Clone ID: PAT_MRT3847_130525C.1
gactcctccttcacctgatccggttacaccttctcctggcccccnncgtcccgacaatgacagggtcgaaactgatgctttgattggagattctgatgggctaacaaatcctgcgtttgnnngaaaaggactagcatctgattcaagtactnnttctagctccaaagcgtgtcnngagaagatgagagaggaataggctcaatgactagtttgttgaagtgttatcnatcttggagcccggaagaggctcacaaaacag

SEQ ID NO: 33801 - DNA, 363 bp, Glycine max
  Clone ID: PAT_MRT3847_130526C.1
gacttgctagcatgcatgcacgcctactctagatgatcctctcggtgaagatcaattacacattttcaagatgtaaagatgcttaaatgctgatatatgaattgggattatatgtatagttattaggcctatcctgaagcctaatgtaatgagatcggtatttctcatggaatttcaatagcacattttcaagagatactgaggcaaaaatgttcatatatgaactggaatgatgtgatgtcttattacgcctatgctgatgccaaaggaaatgagatcggaattcatcggagaatacgaattgcacatttttatgatatcaggaagctcatatgtacagatctgacttggaatgatgtgatt

SEQ ID NO: 33802 - DNA, 399 bp, Glycine max
  Clone ID: PAT_MRT3847_130527C.1
atttgacatacgttgacgcgtgcacaatgcatattcaaaattttggatatgacataacatatgtcttccccattatgctgcattccacttttgacttgaaccaaatgctaactaccttataaatacggtcgactcaaaattgtctgtcgttgtcttggacttcggcgcttatatgaaatatgctgttgatgattttgagaaagcatgacttgcattagttacgctgatttggtaattagtctaagcgtgatggcatgtataattgattgactggctttgcaaatcacatgccgtatttaaatgacattgtcgactactactctagcgattcattcctcttggattcattcccttgctatgtgaactaacttttggttgattacccctcatgtttgatga

SEQ ID NO: 33803 - DNA, 444 bp, Glycine max
  Clone ID: PAT_MRT3847_130528C.1
agacctttgagacattacacaacctggtacacaaaggggtcaaggtggtgatggacatcccctatgagctgtggaacgagacttctgcagaggtggctgacctcaagaagcagtgtgatgtgctggtggaagagtttgaggaggtgatcgaggactggtacaggaaccaccaggaggaagacctgactgaattcctctgcgccaaccacgtgctgaagggaaaagacaccagttgcctggcagagcagtggtccggcaagaagggagacacagctgccctgggagggaagaagtccaagaagaagagcagcagggccaaggcagcaggcggcaggagtagcagcagcaaaccaaggaaggagctgggtggccctgaaggagaccccaacccccaggaggatgaaggccttccaaagggattcccttttacacacaagccccctt

SEQ ID NO: 33804 - DNA, 590 bp, Glycine max
  unsure (1)..(590): unsure at all n locations
  Clone ID: PAT_MRT3847_130529C.1
ttttggctcctagtaggcaataaaacgtcttctttagggcaaaatgcaagtttatgtcttaattctcagttaatgacaatcacattcagtgctaaatactatctaggtacaaacataagtgttaattattatagttattgctgagtgactcagggactcagcacatacgattacatcatagcaatgagggagcaagagcaggagcagctaggaaatggaggtcagcaaagtccccaaatgtcaactgttagctcatttactggattgagtagtgcaagctcctttactactttacaccgaggtgcatggtgcacaccccctcgcctgttgcttcaagatcagtttgatgtggtgcccccagaaacagcatcgtgtagttcagtggggaagaagacaatgagagaagatccattaaagaaaaagaatcctgggaacagttcaaaattagtccttggacattggcacgcttaaatgcagaaggaatgtctaaagctgctgcagaagcaagaacagaatccanagttctgcagcctgtaacaagacatggtgaggctatcaggctagaacccagaagcagtnttagtacagtg

SEQ ID NO: 33805 - DNA, 470 bp, Glycine max
  Clone ID: PAT_MRT3847_13052C.1
caagggcaagcaaaatgttggacccagaggtcattgattcatgctaagtcttttaatcaaatcatacaatgggttagcctagctatttgccccttcatgaggaaatcactcatcgattccctttaggtcaatattttgactaggactggcatatcagggattcttgctaattaaagagatggaatagcttacaagtaaaaggaaaaaacatttttagaccaacgaggatagaaataatcatgaagcccacaatgctgcacttgaaatggctatgttccaaagttcgacagatatggaaggagtaggttaaattacatcaaccttttatgttaaatgaaacgaatgatgtggaggtaccaactggagtgcatcataaagatatatacgattacgtatacactttggaacaaattcagaatgaagagactaaagtgcagtaaaacacatattggggtttttcattctttttt

SEQ ID NO: 33806 - DNA, 809 bp, Glycine max
  Clone ID: PAT_MRT3847_130530C.1
gggagaagtcggcgacgagttgtcaagttgaggagttcggattcgcaagtggcggcgtctcgtctgtgtctgattgactctaacctctctctttccccttctttggtttttacttcctcgaattctccttcaaattccaaccaaatcgcaaaaccaaaaccaaaaacccaaaccgaacccttttccctctcttaaatttaagccttctccatgtctctaagactgtcgaattcgtcggagaatctgatgctcccggtgtccgatcctccctaagacccaagacgctgacaacaagctcttcaaaggttccgccatgaccaaacgcggagccttcgtcgccgtctcctacatgtcctgcgccgttctgttggtgatgttcaataaagcagcgcttttcgtcttataactttccgtccgctaatgtcatcacacttcttcagatggtatgttccatctttgcatctctatttattgagatgctggaggatgatttctttctcaacaggcgaacccttacatatatctgagaactcatccaaatttgtatcattgaagactttgaagcacactcttcagtttctgaggaatttattttacatgcttgtcaccatggagtctgtacgtggagatcaatcttctaattatctaatagtatgttcacccattgtatttgatgaattgcttgcatatctttgtaagatgtggctgttaacaagcactgtattctgatctaagagaaaatttaaatctagcagtgcatttcatgctggagcacgggatctatcttttgatggttatggctatgctgt

SEQ ID NO: 33807 - DNA, 619 bp, Glycine max
  Clone ID: PAT_MRT3847_130531C.1
atcgacaattcggctcgagtacggctgcgagaagacgacagaaggggacggacagaaatggcggcaggtagtgacggggtggacataaacgacgccgcttcgcccaaaacaaccaccagcaagagggggcgattcaccacctccaccgaatcacgccgacaaaccctaacatcatcttcttcacacactcacacccttcctatcgagctcatccaggaaatcctccagcggctccctgtgaaattccttttacaacttcgatgcgtatgtaagtcctggaaatccctaatttcacatccccaattcgctaagaaccaccttcacagctcaccaacggccacccgcctcatcgcgggattcacgaatccggcgcgcgaattcattctccgagcttaccctctctcggacgttttcaatgccgttgccgttaacgcaacagagctcaggtaccctttcaacaaccgaaagtgttatgatttcatcgttggctcctgtgacggcattctctgtttcgcggttgatcaacgccgtgctcttttatggaacccttccattgggaaattcaagaaattgccgcctctggataatgaacggcgcaacggtaggtatacgatacatg

SEQ ID NO: 33808 - DNA, 325 bp, Glycine max
  Clone ID: PAT_MRT3847_130532C.1
ggccggattccgggtcgccccgcgtccgctagataacgtttgcagggacaggcagagaatccatcctaacactccctcttcttcttttgctgactagagatcatctttaaacctatccctatgcactccagaggtgaaggttgacctctttctggacgaagagtatctcacgactggcctgatggttccacccgaagcgggcatgggtcctggcaaggctacacaccggtgtcatccatctctggcactacctgcaaggggaccctactggcccatctggactagcaccactgtcccgcccgcgtagacccctttgcacaacttc

SEQ ID NO: 33809 - DNA, 303 bp, Glycine max
  unsure (1)..(303): unsure at all n locations
  Clone ID: PAT_MRT3847_130533C.1
aggnactctctagtncatggcttcttctncttcctncttacttcaaactcttncttnacccctncggcttctgtncatctaaactncttnctcggcattgncncttaaaacttacccggaggttgcgncgtgacagggcgccaggatggaggnagaacagngcttgnaaacccttcatgtncggaggcgttggagtgggccaaccggcaatgttcggctnctaacgaacgaagacaggcgnaagaagaggatgttccagaacggttacagttcggagattcgttgttctggcggaggatgata

SEQ ID NO: 33810 - DNA, 411 bp, Glycine max
  unsure (1)..(411): unsure at all n locations
  Clone ID: PAT_MRT3847_130534C.1
tcccgggncgacccacgcgtccgatgaatcacatatctatccctcattgttagaaataaatatagaatgtgcagtcttacaagaaaataatgttaattataaaaagtaaactagtacaaaaagagaattcacataagaaaataactatgctctctaattaggatatacactgcatctcttattctagcaaataggcaggcacaaaacaactatgctctctaattaggttatcaaattgcaattcacataaatagccaaactaattgttgaatcataaatcatatctcacatccccccgcaagattcaaagaaacaacaaaaaaagcttgaaatatatcatataactgatatataattctcaatgtaatatttttaaactaagaattgacagaacaacttaagcataaagtc

SEQ ID NO: 33811 - DNA, 134 bp, Glycine max
  Clone ID: PAT_MRT3847_130535C.1
cggtccgggaccggagtttcgagctaggcgtacgcgtacgctatgcgactgagcttgagtatgatgtcaacatctggggggtgagcactggctggtgctagcacttcgttcgctgaccatgagcatggccgaac

SEQ ID NO: 33812 - DNA, 634 bp, Glycine max
  Clone ID: PAT_MRT3847_130536C.1
ctttcttctcattcttcatttcccatgttttctcactctgatctgcaaaaatataaatgaattaattgctctttatataaaaatgttctatttaattacaatgacaaacaacgctctattgaccacgtcgtctttttcttctgctaaattctctttgtttcgaaaacccaatactttcactgtcaattccaatattttatgttcggaatcaaaacttgcccacaagcttaccaacctgacttcagaattcacctctctgacgcagccaatagatcgagtgaagcgcctcttgcactacgcctcccttctacctcccttcgccgacaacgagcggattccggcgaaccgcgtgggcggctgcgcctcccaggtgtgggtggtggcggaggtggacgagcggcggaggatgcggttccgggccgacagcgactccgagatttcgaaagggttctgttggtgtctggtctggatacttgatggcgcgaaacccgaggaggtgctctcggtccacagggacgatttggctaacatcaacgtggggttggggatgagtctcaaggcccactcacggaccaacacgtggcacaacgtcttgttctccatgcaaaccgctgctaagggtttcctcctctga

SEQ ID NO: 33813 - DNA, 588 bp, Glycine max
  Clone ID: PAT_MRT3847_130537C.1
aacaaaagctcatattggaacaaaaatcaaaggggttattttccttttttttaatctatacctatcgtataagttaactaatattcacaaaaataaatgttacaataaaaaaaaggcttaggattttgggggcccgactttacaaacagaccactcttaaatcggggacatactaaaagtgtaaatgtacaaactcgcggaacatcatgtgtcaaaaatgtttgacatctatcatgaatttagtaatgatgcatacttctaggtgagcaggatatggctcaaattatgcatctaactccatgcttcaatcttctgcatgttattctaggaatccaaggccttgaaattgttttatgaatgtccattttgtaccaaacaaagcccctatgtttctggcaaagtcactcatataacgacaaaaccaaagagccttgaatgctaagtaccaggttattctgctcccataaaaccatgacagtgtcctaaagcctaatgggaagtccaaagttgtggaatgtcttgatggttccatcacaaccagctgccacaatggatagtccccatgtttctgatacatgttttttatgg

SEQ ID NO: 33814 - DNA, 964 bp, Glycine max
  Clone ID: PAT_MRT3847_130538C.1
gccctgtgcctgctaaaaatcaagtggttgcttcaaatttgaactcagcatccctgccattttacccttcaggctcttccaacaaagataataatttggcacaaagaagggaggtgcaaacaggtggcagtagcaggaacattagtcctgttgttgtggatgagggttttccagttcaacaaaacaatgcacagcttcggggaaagaatgttgttgattccattagcatggcaaagttgtatattgatgaatccatccctcctccatctgttggaaagcctggatattctgcagtcagtgcttctcaatctcctcatctcaagaggagattgagaggggtgcatcaatcccaatacagatgaattatcagcgtgctccctcgcagaataaagggtctccatctcaattccaggttattcagacaagttctgcaccagggaggaattcaacttctgtgcaagctactgccccacagttggggaataggcctgatagtgggtctcaatcttcatctcccctcgaaacatccatgccaataagttcacatgattctggggaagtggatgcagcatcagaatcaggtaaagtcaaaggtgctatggttgggaagggaagggaaggttcccaaggtgcaggaaggggctctttcatttatggtggggcacaggtaatgggcaccacaggaaatgcggctgttagtcatggagatccaaacttcccagccttcttgccagtcatgcaatttgggggccagcatcctggtggtatgggagttcctgctgttggcatggcattccctggatacgttggtcagcctcaacttggtttgggaaagtctgaaatgacatggctaccagtgttggctggtcctgcaggagctttaggggctacatacccattccttcctgttgatggtgcaagcagtcgacaatctggacaggcctctgcaatgggtacttcaagc

SEQ ID NO: 33815 - DNA, 620 bp, Glycine max
  Clone ID: PAT_MRT3847_130539C.1
cacgcgtccgctgttcctagttcctacactacaccagagagaagtgtcaattgttttctttttctctctttcctgaattgttgcaagagagagcatgttgttgcatgagctgaaccttggtatgagggagtttccaaccagggaacttcgtgtacgatgctgaggatattccatttgggacgctgtggtggttcttttatgctggaatctcttgtttgctcgttctattcgctgggatcatgtctggtctcacccttggattaatgtctctgggtctcgttgatcttgagattctccaacagagtggctcctccactgagaagaaacaagctgctgctattttgccggttgtacagaaacagcatcagcttcttgtgaccttgcttctttgtaacgcctgtgccatggaggtatctgtaacttcttttttggggaattagaatccttgttaatatgggtttcatttttttttttttgctatctgattaccctgcataatggtttttttttttttttatatttttttatcccatgtaaaatttgttcttattgtagaaattgtgttgcctgaacattgaaccaaaagatatgtgatatagtacggtcaccacggtgccttg

SEQ ID NO: 33816 - DNA, 269 bp, Glycine max
  unsure (1)..(269): unsure at all n locations
  Clone ID: PAT_MRT3847_13053C.1
caaaaaccgaaaaagaaacgatagggcaaaccagnatanaaatagccatgggaaatggggacttattccaattagggcttaagtgctaaaatcttctccggaattatgatgcagttgaggaaaacggacacgttgcttcgtaccgttggaacgtatcttgccgtcgttcgccacttttccgcttcggcggaggcaagagtaggctccgccgccgccagttccagcggcggtggagacacgctggggcggaggcttctgagccttgtgta

SEQ ID NO: 33817 - DNA, 459 bp, Glycine max
  Clone ID: PAT_MRT3847_130540C.1
ttttcattataatatcggaggtgcattgataacaaaaatgtcagtaaactttacaaaaccacttatagattaaaagtagcaaagctaaaatcacctgacaaatgatgtaattacagaaacaaatgatatatccattcaagaactgcaatgcatcctaagaagaaatagacatctcatccgacaaataaacctccaacgggaacgccaagaacaatgaaatgatgcaaagcattcatgcctcagctgtagtgtgtacaccaggcaacttttaatcacatttgtaatgctgtttctttcctccttttcccaggactcatggtgatttttcttttactgttgaacttggatcaaagagaagactattttgtcaaaatgaacaccaaacattttatcgacttttgtcgacttctccataagtctataggacaaatttgaaccttcacctcattcacattttat

SEQ ID NO: 33818 - DNA, 550 bp, Glycine max
  Clone ID: PAT_MRT3847_130541C.1
ggctcgagcatatccaccggccaccgccatttagatcgccggcactctcagccgcgatcaccattccaatccctacttcaccactgaggcgtaacacaacagagccattgaatcttagccatgaggagaactggctttcacaggaggcaaagcggaggaggctcaggattcaaaggaatgattgtgaagttgtcggttgctgctgtggtgctcttgatctgcacgctctcattgttcttctcctcaacaggaacttcttccaatcttcaatccaactatcgctccgagatccgtttagaagagctttggagcaacgcagattccggtggttggcggccgtcgtctgctccgagaactcattggccccctccttcgaatgagagcaacggctatttgcgtgttcgatgtaatggtggcctgaatcagcagcgtagtgcgatctctaatgctgggcttgctgcgcgaatcatgaatgctacacttgtgctacctgagttggatgcaaactctttgtggcacgacgacagcaggtggcatggtatctatgatg

SEQ ID NO: 33819 - DNA, 332 bp, Glycine max
  Clone ID: PAT_MRT3847_130542C.1
cattatggccgctgcgcctaaaccaccaaaccattttataatcttaacaccattctctggcttgaccagcaacccgcatgcaactgctccgcagagcgaaacctgcgcattagagcactcagggggacttggaccctgcatagatgagtacggtgcacataacggaacagaaaagcaccgtcaactctccaaaccaagcaggttattacaacaccaccccaaaagccttcactctagctgagcgagaggggctccaacgctcggagcagatatatggatgggaatgggaggacaacacggacaacccatgtcgagaaaatgccactagctca

SEQ ID NO: 33820 - DNA, 1881 bp, Glycine max
  Clone ID: PAT_MRT3847_130543C.1
ccacgcgtccggtcggttctctccacggggcgaagacttggatatgtatggtggcgcacaacaacataacagatccttaaattcttcttttctccgccgaagatcgattctctccatcttcttccaatcaaaaccctaaccaacgtcactctcatactctttctcaatccgttactgccatgagctatcacatgcataataatgaagaaacacacagaggtttgaaaagaaagcccccacatatggatcgagggcaagaacggagaccatacaatacgaattctagaccttatgatatgaacgcggttcctgatggttggttagactgcccaccacatgggcaagaataggatgtataatcccttcaaaggttccacttggtgattccttcaatgattacatttcaagtcaaaaatatactcccaagcaagcaattcatcaacaaagagtcttaagtagagaacttggtttagtgattgatctgacaaatactacttaatcctatcctttttcagattttgtgaaacagggatcagatgcatttgatgaagggacaatctgcaactccttaagacaacgatattaactatgccacgtggaaagctgatgggacacgatatatgatgctgagtacatgcgatgtatgttatctgattgacagaaaaatacttatccaaaggatatgtaagcaatacccatacagatataataagaggggtacacctgagaggaatcaccactacacattacttgatggggagatgattattgacacagatccgcatacacataagcaagagagaagataccccatttatgacttgatggctatcaatcaagtttctttgacagagctccccttctatgaaaggtggaaattcctggagaaagaagtaattgaacctcgaaaagaaagaacgcacgggtctatcaaggagtataaatccttattatagatatgacttggaaccatttaacgtgaggaggaagggttttttgttggtatctactatgtcaaagaaaattcgtaaattcttgtcacatctagctcattcatatcatgtccttgttttccagtcgtagtttgaaccttttttttccctcacatattcacgttttcaggagtatatttgctctaacagcaactctgttgctttcctctgacaggtgggagctggagatcgtcccttgctttttctatttgaacgtggaaggaagaagttaatggaggagaatgttatttttaaagatgcatcggacatttcttcctattcagggaagatcattgaatgctactgggattccgcggagcatcattgggtttgtatgcggatcagaatagacaaagccgctccaaatgatatcaatacctatagaaaggtaatgcgaagcataaaggataacatcacagaagaggtcttattgaatgagatcaatcagatcattcgcctacccttgtatgcagacagaatacaaagggatatcaaggctcaccagcatatgatctcttcgcggcgcaagtgagttataataaaagctaagcatgtcgaacgacatcgtatttttattgaagagctagcaaagactcctgaatgcagtgccagcagaaaagctgtacaattttttctaggagattgtatttgtgctacggcattgttcggctcatgcatcacataggaaagaagcttaggttatatggttttgtttggctaacaagattttggtcgctgttgtatattagcaattttgcctattatttcttttattttcattcctttttggtatttcttttttaacagcagacagagttcacaagatcatattggaaaaaggtcaataaaaacggctttgataggggatccagtacctgatgatgaatcc

SEQ ID NO: 33821 - DNA, 1558 bp, Glycine max
  unsure (1)..(1558): unsure at all n locations
  Clone ID: PAT_MRT3847_130544C.1
atatcactgagtctttcaagcagcttacttagtgaggctaaaacagataagtatagagatttgcgagcccttcttcaacttctctcaagtctttgctctaaagacatgattgatttctcatcagattcgattgaagcccaaggcactaacatatctcaggtggtttactttggtcttcacatggtcacaccattgatttctatggacctcctgaaatatcccaaactttgtcatgattatttttctctcctgactcatatgttggaggtttatcctgaaacatttgcacaactaaatagtgaagcctttgctcatatacttggaacccttgattttggtcttcaccatcaggatgcagatgtggttagtaagtgtctgagagctctgcaagctcttgcttcttaccactacaaggagactggtagtggtaatataggcttgggtgcccacactgtgggtcataaggattcgagtgggaatgttcaggaaggtcttttgaaccgtttccttcgttcattgctgcagctactcctttttgaggattacagttcggatctaatcagtgttgcggcagatgctctccttccattaatcctgtgtgagcaaggcctgtatcagagattggggaatgaattgatagagagacaaccaaatgcaacactcaaatctaggctggcaaatgcattgcacacactaacaagtgcaaatcagctttcttcctcccttgatagaataaattaccagagatttaggaaaaatctcaatagcttcctagttcaagttcgtggatttctgagaaccatgtgatcaactgtgtatggcttgtatttgtataaggcttcaaaagaagagttgagaattaagattactaattaaaccatcagctggagacgaaaatacagagctgatcttttgccagacaagtatttggggctacagaaaacagagtcctatcttcactgggcatctgtaagtcatatcactttggttgtatgccaaagtaaaagctttttggtttgtcagaggctattgcaaaagcagaaaagctgtctgaagatcttagagtagcaattcagtgacaaaatggttgttgaggcaacattcttttctgtcaagttgcatccttgcgtagatatacattactatcacttagtttggtaggagcctctatatttacactctttcatgtttgtgctctactgcacaagcacggaattcgtttagatctgttagagatgatgttaaagtgttaaaccattccaaagtttatgcaaacttaagctttgagggaagttgattcttcagaagatcaaattcctagagtggttttattcacattagttttgcaattatgttgtaataactataaatatgtccgcattgtatgttaaggtcttgctcatcaatgtgtacagttacgtgtaactgtaacttcaattgccgagtaagtattaacgccgaatctttgattaatctcgtttggggaaaagtaattcataatgaataattctctgcatggtttgttcccccgnggggtaaaaaataaaaaaaaagaatt

SEQ ID NO: 33822 - DNA, 536 bp, Glycine max
  Clone ID: PAT_MRT3847_130545C.1
ggggttgtttgcaaaaagtaaaagctttttggtttgtcagaggctattgcaaaagcagaaaagctgtctaaagatcttagtagcaattcagtgacaaaatggttgttgaggcacattcttttctgtcaagttgcatcgttgtgtagatatacattactatcacttagtttggcaggagcctctatatcaactgcacaagcacggaattcgtttagatctagagatgttaaagtgttaaaccattccaaagtttatgcgaacgtaagctttgagggaagttgattcttcagaagatcaaattcctagagtggttttattcacataagttttgcaattatgttgtaataactataaatatggctccattttagttttggtgtgtccgcatggtatgttaaggtcttgctcatcaattgtacagttatgtgtaactgtaacttcaattgccgagtaagtattaacgccgaatctttgattaaaaacgtttggggaaaagtcattcataatggataattctttgcataatttgttacaac

SEQ ID NO: 33823 - DNA, 969 bp, Glycine max
  Clone ID: PAT_MRT3847_130546C.1
gactgcggtttttggctcgaggaagaagaaagatccgtaaattaacattctctccctcccttcgctataatagcaagcttttcaagcatatttctggggtttggtcccttttccttgtttggggttttcttgggaaaaaagaagtaattaggtataataatagtataactaaagcaaaaaaaaagacagtaatatgggaaggggtagggttcagctgaagaggatagagaacaagatcaatcggcaggtaactttctccaaaaggagagctgggttactcaagaaagcacacgagatctctgtgctctgtgacgctgaggtcgctttgattgtcttctcccacaaaggaaagctctttgaatatgccaccgattcttggtaattaattatatatcatagatctctatttcttagcacgtattcttgctaaatattttaggttttactatactttatatgtgcatatatcgacaaagtttgtaagtgttttaaaccttagtatactgtgtgtaattcttatgaataaaaaaacatgtgtatatatcgtataatctccatagatctctctgttaaaccctatatttagtgcatgagtgtggagtgagggcgatctatgaatatcatttattaatatacttttacattgagtcaagaattgttcagccttttttgtttaatttgttgaaattttcttgcttttttcccttaattttccgtttagaatggtttcggttttgggcttaacaaagctagaggccggagaaacttctttcatctttgtttgcttccagaagtcttaattatttttggctagatcaaacaaatttctttctgtgattgtgcacaaacaaacctatctcatatcttaaagaaaaataagcaaaaagaaagaacctgtcccatttatgtgaagagtaaattcttcacatactgcgttagaaaataatgtgtggtatcctctggtcatgc

SEQ ID NO: 33824 - DNA, 198 bp, Glycine max
  Clone ID: PAT_MRT3847_130547C.1
tactgttgcgagaagacgacagaagggggacgcaccatgcagaaaacgctacacatttaccaggctcataacatgacttcacatgaggtatagcgcccatgaccttgggacatgccacctgagcatgacccatacaaataataagttatgatcagatataatgataaactctacctctgaactcgtccatgcctacca

SEQ ID NO: 33825 - DNA, 157 bp, Glycine max
  unsure (1)..(157): unsure at all n locations
  Clone ID: PAT_MRT3847_130548C.1
gtttaatcacgcactatcagcacaacaantnacttgngtaagctananaatttcatnaagactgcnatggattcctcgtgtgntccnatgnnattgaagntgttgncatcnccacanaagtacgaagggggatggatnaatnttgagaacanaaaaa

SEQ ID NO: 33826 - DNA, 312 bp, Glycine max
  unsure (1)..(312): unsure at all n locations
  Clone ID: PAT_MRT3847_130549C.1
cctagcgctggaacgtctaccgcaacttccagctggcctaattaatggacaaactcgtgaagcccgggacaaggttcttgcagggtcccatgcaagctcgtgtggtggcggacattgaccgcctgcgaaaagcagatggcacatgggattctgggatgagaggcggctaaccacaggaggtggagagcatctatgaaacatgaagattcgagtggaccggggccgctgaaaatcatttctggaaccattcttgcaacaattttgggaacaancttctggaaactcttttcctttcttagagatgctggtaat

SEQ ID NO: 33827 - DNA, 557 bp, Glycine max
  Clone ID: PAT_MRT3847_13054C.1
tttggttccttcaaacaaaatatcacaatgaataataaagtaagaaacaccgtatcatcaaacaaaatatcagaatgagttgccatcccatttctggcctatggactataaattacagtccataaaatatccacgattaaagaaatgacgactttctaatcctctattccgtatcaacagtttcagtttcagtttcataaaatatcacaacagtttcaggctttcagccttcataaaacagacgcttgtcaaaggcaacatcactatgcataacttccgtcagtcatgttgggtgaactccaacaaatagaaggggaattttctgctctggctgtaacatttatcacgcttacatgaaaacggacatgtattttacattctgaactacataaaagtcagggagatgttagctataagacagtacaggggatgcatagagcagaaatgatcgcttgcatatagatgatgtatcttcatctaattataatttgattctacacatgcatataccatgacaagcaacccctttagcgcccatgattgtagaaggccttctt

SEQ ID NO: 33828 - DNA, 389 bp, Glycine max
  unsure (1)..(389): unsure at all n locations
  Clone ID: PAT_MRT3847_130550C.1
cctattcgaccgagnggcactgctccatcaccaacgggctatcttgggggcaaacacaccaacacagcaccgagcaaaagtgaccaccaaaaaaaacaacggacgatgaaattggaggactcggaaaacgcccaacagaacaagagctcggcaacttaaaccaaaaacacaagtagctcggcgaagaaccccggggccacggaatccctgacaaggatctatgcgaggaggaacctaggaacgcaccaggggaagtagcatcgccatcagcaacacgatggggggacccagataggacttcctcaaccccaggagaatgcaaggacctgaaaagcaaaagggttgaacaggacaaccaaggggggaatctggaaagccactgggaaaga

SEQ ID NO: 33829 - DNA, 244 bp, Glycine max
  Clone ID: PAT_MRT3847_130551C.1
ataagcttcatcatcatctacttctactctgcatcatctctatggctgtagtacgttcacaataagaactatcccaacatgtgcatgtccacgtaactcacacatcacaccccataagtccatggtcgtagtagcgtggcagtggcattctgatactcatcccggtgatatctctcacgggttccctactcctagctctcctcgccggcgttccacttagtgcaatgctactcctcctctccgg

SEQ ID NO: 33830 - DNA, 449 bp, Glycine max
  Clone ID: PAT_MRT3847_130552C.1
tcttaccttctcaacttttgctgccggacagagtctgggacctagctcactccactctccatttggcttgtccctggacgcctcctttcttggcacggcggctgctcccccccctgggaggcttgggtcagacccacctccggggactgcatcttagccaaggcttccttacttggacggcatactctaccttgactatggatttgactctctctgggactttcttaccctgcttgaacaggatgacctcattgtaccgaaatggctaacatatcgtgagataatcactggtcaccatgcacctgctggacgcttctgtagcactagcacctgaaattctacgctaggctctgctgatccctcatgagacagctctcccatggtttacaacggccgtgttgccacctgcaagaacctacagctactggacacactcctacacactgttc

SEQ ID NO: 33831 - DNA, 511 bp, Glycine max
  Clone ID: PAT_MRT3847_130553C.1
cttgatccaatcaaggcataaagttcaatttatacgtatgttttcttgtaacttcatttaatttaaatcaaatctaacatgatgttttagctcaagtttattttcgtatatagaaatatatcactagtttattttcgtgtatagaaatatatctacattactgtagtaaaaaatcaaatagaaataaaggataaattttattacatcaaacttctattataaagtgttggtattgaaagtttgcaaataaaaattcgactatttaatatctacttggtcgaattgatatcaggtgtgaaaaaaaaattcatattaaatttgatcaacatatttaaattaaaatgtaatattttttttatgatatctataatttgatatattcaaaatttattaaataatgtgtagttgtatacgaacgatacaattatttaaaataaaattcatatttaagttagttaaaaacatattatcttattcaatatattctttagcacatcaattaacctatttt

SEQ ID NO: 33832 - DNA, 329 bp, Glycine max
  Clone ID: PAT_MRT3847_130554C.1
ttcctttccaggaaggtttcccgtcatcactgtatgacgtcctccttctttgggggggggggggggggggggggggggggggggggggggaaaccggcaacgcgccgcagtagaggataggagagcccggtggtactaatagtacaacgaatgtgggatacgagaacgagctaaagagagagaactagtgggaaatcccgagctggctgcaaggccgcgtgagggtaaccttttggtaagtgtataatcgaggtgatcgcattggggacgcgacgtaaggtgtgtaattgcgtaagggtaatgtgttggggaatgggtggcccttaggg

SEQ ID NO: 33833 - DNA, 814 bp, Glycine max
  Clone ID: PAT_MRT3847_130555C.1
ggctcgagcaagaagataagaaagctttggaacgactcacaaaattgaaagagtcagcattgctagaagcagagaggattctgagaagtgctctagatagggctctagttgttgaggaggttcgaaatcagaacattgacttgaagagacagattgagatctgccaggaggagaacaaactcttagagaaaaaccatcgtcaaaagattttggaagttgaaaagcttagtcaaaccattcaagaacttgaggaagtcatcttagctagtggagctactgctaatgctgttcgtgattatcagcaacagatttctgaattgcaagaagagaagaggacattagagagggagctagcaagggtaaaagtttcaaccaacagaattgcaaatgccgtggctaatgagtggaaggacgaaaatcataaggtcatgcctgtcaggcaatggctggaagaaagaaggattatgcaggcagagattcaacggttgaaagacaagcaagctatatcagagagaacagctaaggcagagtcccaattgaaggataaactgaagctgaggcttaaaacactggaggaaggcttaaagcatttctccaataacccaatcacttcgaatgtgtcttatgcatctcaaaaagcagaaaagtctaacatactaggtttcctaacaaccagtgctggactgagaaagagatccacatcacaaccaagggcatgtacggttggaagctcattggtccagacaccaaatataaaaaacaacagaggagacatcgtagctgggaatttcagaaagctcggggagcccctcac

SEQ ID NO: 33834 - DNA, 364 bp, Glycine max
  Clone ID: PAT_MRT3847_130556C.1
cagcagcgaccgcattcacgactctccgggtgacccacgcaaccgggcgaccaccggcccacccggtgcgtgcggtcgccataatacaagccacagcgatagagctgatatctgaccctgatgacatcctatatcccaatcctgccttaattatggccctacgctatcctcgttttatgtccagcaaggctgacgaaagatgaaccagatgcaccctatcttccctgggcgaacaactgaatccggatgcacccagacacacactatagaacaactggcactccgtgcggcagaactcaacgaggatcgtgatgacacgaggactaagcttcgtcctctcgcatggcctaccactgctggactg

SEQ ID NO: 33835 - DNA, 583 bp, Glycine max
  unsure (1)..(583): unsure at all n locations
  Clone ID: PAT_MRT3847_130557C.1
tctgagtagccaaaaaataaagatttagcatatggtatcagctactcaatcagaaccaataaaagtctaagaaaggttgaaaaaaataaagagacaatttaaataagacagatacggaataatacataaatatttcataatgcggaacaaaacaacgtaagatgtcactgatcctgtcctcgtcctcatttccatctctctccccgcatcattcacttaaacctcaacttcacaaatttgtcaatgtttttaaattatcatcctccagaaacacatttccttcagaataaacctaatggttttcgccgaaagaatcaattcctttacattagtgaccagttgcagccaacttgggcataccgaagaatcctcataatgactannngcattaatatatacttttcaaagaaaagaaagattgcacgtggtggagtatttattcctacaagcgtaatcttggatagttagcaacctaagttttggagtagaaagcacaattgtaccagctcctttcaaggtattatccagaaccaaacagnnnnggttggaattagatatgcatatgacttcagcatgctcgtct

SEQ ID NO: 33836 - DNA, 307 bp, Glycine max
  Clone ID: PAT_MRT3847_130558C.1
tttgattttataacattttttattatattatttgattacttcaatttgacacataaaccacaacagaggaagcgtaaaatagaaaggatcaactaggcaaacgagctatagacatcaatatgggacctataatagaaaaattggtgggggcggcattaacctcttataaaaattcacacaaatcgaacaacacaagcaggaacatagagagaggcttaaaacgtgcacatgactacctcgattaaataaccgaaccttgcctaggatacgagatatggccgctgagcagtcgaaccacaccagcatt

SEQ ID NO: 33837 - DNA, 220 bp, Glycine max
  Clone ID: PAT_MRT3847_130559C.1
ggtttttgtaactgctgcctttcatgcacatctcgaatagattaatcagaacgatcctaaaggccaaaaatatgtgacgatataatgaaatctgtgaaggaccggcaccatcgccaaacaccactcggacacagacacatagacacctgaaagtggcatattgcagaacacaatacgggtggatgtcgcagccgggaccctaaagagctaaaagagggaa

SEQ ID NO: 33838 - DNA, 241 bp, Glycine max
  Clone ID: PAT_MRT3847_13055C.1
agtaccggttcggaattcccggctcgacccacgcgttcgttaaaataaaaccgctttctattgcaacaataacaaatcatcaaacccctgggggtggtctctcgttttaaaccattttgctctgtccatggcggttgtcccagcatcgcggtccgattcaccacttgtaatggtgtaacccgtcgcctgttctgtcttacctctttggcaaaggccctaattttttgctgggttcatcgtg

SEQ ID NO: 33839 - DNA, 675 bp, Glycine max
  unsure (1)..(675): unsure at all n locations
  Clone ID: PAT_MRT3847_130560C.1
attctctgaatttttcatctagaggcagagcagtacctggctgcaaaaaccaaagtggttctgatgaggaaagtggatggacatcttacttagaagatttctcaaaaggcatagagccaagttattgttccagtttggatggctcctctttgctctcagatgctgcttcttgtgctgcatggaaattttctcatcagaattttaaggtcagcactgcaccaaatctacccaaaaaactaagcttcaagaaagcaagagccaaacagatatcagaggatgaccctttggaagacactgctagctctccagtcaatagccccaaggttagagacttgaatccagctgaaatgagttctaggaaggttgatgatcaactagaaggttctatgggtaaggaattcatcacatcatcagagcattattcagatttgaagatggatgataatgagcatgaattaaaatttaatggaaagaacattgattgcacagacttgaagaaaagggggctctccctggctcctttgtctttgttgtatatatatatatatatatatatatatatatatatatatatatatacccctccttttctatgtgttcttctatgtggctcaagttatggaattgtatagtattaaagagcatgatcagtgactgtgatgtannatttgtttg

SEQ ID NO: 33840 - DNA, 647 bp, Glycine max
  Clone ID: PAT_MRT3847_130561C.1
aaagaatggaactttaatctttatttacaggacatgacagggtacgaaattccacatagaaataaattcagaggacagcttcatagagtatgtacagtttataactgttcaagtatagtttcttttgtaaaaagtgctacaataacaaaccacatttaaaaagagttcttagtagagaaacagtaagacaaatctatgagaacacagaatagcacagcacatagctaacaactttgtgccttagctggacattagaagttaaaggtcccaggagctccatcctgaacttggaaggcgaagccttcagaggtagtttctggcaccacattttgatcttcctcttcctccactgagaagtacttctcaattaagttcaatgaggccttgtatacagactcgttttcatgcctctgtagtgcttcaattttatccaagcctccacactcttcaatcattatactaagcttttctgtctcacctagtttctctgcagcctgaaagatatttgaaatggcgtcaagaataacctgaataatcttggtatcttttgcactcaggaggttcatcaaaggttctattatcccacagtgaacgagatacacaatctgctcaacagtcccaccgctggtatagttggttatagccca

SEQ ID NO: 33841 - DNA, 361 bp, Glycine max
  Clone ID: PAT_MRT3847_130562C.1
ggtagcccaaaccattttaaatgaccgggggaagggtcgagtgttggggccaccgtttaaaaagggcctaccactggcgtgcactagtatcttccaatttttacaaaggaaacttaacctaaaatcacatgcaaagcttgaggaaaaagatagctgaaagggggccccattatttagggcgcgccttttaaagggcaaggttttaaacaaactttgttggggaaatatacactcaacactcttcatttaagtttggaattagcataaaacctgggagatgccgatttttctgaaaaagaatgtgctccaaagaatgttgccacctggggacctgggaccagacttaagctacccctaatgg

SEQ ID NO: 33842 - DNA, 258 bp, Glycine max
  Clone ID: PAT_MRT3847_130563C.1
gggttaggagataacaaatcctataacataaaaaattcggaataccggatggctcctgggttcccaaacatttgccccttgggcaatagagggagagaagtggcgggaaagggaaaacacccaaccccataggaagaatcaaggcccatggcacaaggaatagataatgggaatacccacaaacaacaattaaaggcccacggggcaaagggcttctggaactttccatatcccaaaacaatagggggggaatgttga

SEQ ID NO: 33843 - DNA, 186 bp, Glycine max
  Clone ID: PAT_MRT3847_130564C.1
ggggtgcgggaacagagaagacgacagaagggagagttgttggggtgatgaccaactgggccggggtttcaataggacatgacactcaaggggggagggaccccaatgagaggaaggctaaagaggaagagaataacagtggcaaagaaggacccaatggagccacaagatgagaaaaggatcaag

SEQ ID NO: 33844 - DNA, 309 bp, Glycine max
  Clone ID: PAT_MRT3847_130565C.1
gatttagcattataatatcatggtattgaaatcggagacgtagaaacttataattactataataatctctagctcagatattactcactgacaacgagtgactctgactcaacatgtttgcgtacattcactgtcgctatagaccatgtctggcttctttaccagaaagacggacattgacattaattacatggctagccacggattgagagttgcatgcatgcaggcatggactgccaatgacgagttcaactcagagaactcttaatacatgccagacgaggattatgcacaattgtcaaatgatgt

SEQ ID NO: 33845 - DNA, 303 bp, Glycine max
  Clone ID: PAT_MRT3847_130566C.1
actttctttcgtccggggtcttatacgaagaataatggatgataatcagcgggatcaagaggctgatggagcagattttgcaacgctggaagaggaggctgcagaataggaggctccacgctaggaaatggtactaaagcacctaatgactgcatatgggaaaattcacagacgaaacctcagaattggctatgatgctactggaacattacatgaagctgctggaggagagctgaaccagcctggatatcttgactttcacacgccaccattaattgatagatggcatgaacttccaaattt

SEQ ID NO: 33846 - DNA, 248 bp, Glycine max
  Clone ID: PAT_MRT3847_130567C.1
ggaacaaatcactaagccctattattcttcctcaataatgtcaattacacttcacgtctctgcagcaactatgcctaaccctaaggtcgtctgggacatgaacatctgcgatcaatctgctggccgcatcatgatggagctctatgcccatgtcactcaccgcacagccgagaatttccgcgctctttgcaacggcgataacggcctatggcggagcgacaatccccaccaatacaatggctcctcct

SEQ ID NO: 33847 - DNA, 212 bp, Glycine max
  Clone ID: PAT_MRT3847_130568C.1
gaaaggcaccaaatcctaccacatcattagctatgattaccacactctcactctctcctttacttctcttcctactcttctccctagtccaaggactcattcccaacatgtgacacccaagaccatggttcaacccttgaagttttccatgtgttcagtccatgctccgcatttacgccgtcaagagtattctcatgggctgagattgtcct

SEQ ID NO: 33848 - DNA, 180 bp, Glycine max
  Clone ID: PAT_MRT3847_130569C.1
tacggctgcgagaagacgacagaagggggtatcacattggtttattttgaaaccctaaagtttgcccccttacacgttttttgtcttcttgtgtctcccatctttgtttcgagaagcattgaattagagaagagacatgaatccggtttcaatcaaccattcatctcagtgttgaagttg

SEQ ID NO: 33849 - DNA, 744 bp, Glycine max
  Clone ID: PAT_MRT3847_13056C.1
gtgcaataaagttggcaactggcaagcaagcaaagcactagaaaaactaggaagagagaagaacccagttgcaacactaattttctctttccctttttttggacttatccttctttctgcaactccaaaatgggttccaaaggggcaaaaaatctagcactctcttcagccttgttgctccttttggtcggttttgcaacctcagacatcaatcaagacaaagcagaatgtacggataaacttcttggtctagctggttgtctttcctatgttggtggcgaagccaaagtccccaccatggattgttgctctggtatcaaagaggttattaacaagagcaagaggtgcctctgcatcctcatcaaggatcgtgatgatcctagtcttggcctcaagatcaacgtcacccttgctttaaacttaccagatgtttgtgaaacacccactaatataactcagtgtgttgatcttttgcatttggcacccaagtcccaggaagctaaggtgtttgaggggtttgaaaaagccttgaccaacaaaactagtccctccccggtccttagtgctaataacacaactgcaaagggaacaagcacaagcgcgaacaacaacagcggaggtgggtggggaaagaggtggttagtggcagaggtggtgttgtactgtctgtttcctttagttattttttgcctcagtgtgtgcccatctcctgctgtctgcgtgattaattctccaactaattaa

SEQ ID NO: 33850 - DNA, 546 bp, Glycine max
  Clone ID: PAT_MRT3847_130570C.1
cgtatgtgtcgcagtagaaagataccctatctcaccggatcaagatgcaattcttagttaagcaccctcactggtaagaccatcactggccaatttgggacttgggataccttaaacaatgtaaaggccttaatgcacgacaaggaaaggatcccaccagatcagcgacggctcatttttgctggcctgcagctcgccgatggaccgtcccttgctgtttataacctccaaaaagaacccactctccgcttggaacttcaccttcgcggagggatgcaaatctttgataagaccttgtcgggaaagacattcccccttgaagtccacagctccgacaccgttgacaacccctaggctaacattcatgacgcatgaggtttccctacagatcaacagacgctgatctttgctggaaagcagcttgaggatggacgttccctagctgattacatcctccacatggaacccacgcttcattgggggctgcgcctacgtggaggaatgcaaatcgtcggtgagactctgtccggaaagacattcccccta

SEQ ID NO: 33851 - DNA, 392 bp, Glycine max
  Clone ID: PAT_MRT3847_130571C.1
ctgaacagcggcgactctctctcaccacaacaaacttctgtgcaagcgcccgctcaagtattcacgctcgattgagccaccacgcagcagcgaagggatttggaccacacctgtgggacggctcgggctactggtgcgagaccgggcggtcacgagcgaccacgacagcgggcacgagaaagaggatgcgtacggcggcagcgttgctgcagaggagaaaccgacgaattcggcgacggatacggaaaagctgaaaaaggccttggtggattcagtgtgtggcacccatcgtggactgagagctgcgcgcctgactagagcggcgactggagtgctcatcgcagagttcgcggcgaagaaccctaaccctggaaccaccgacgccatgactc

SEQ ID NO: 33852 - DNA, 731 bp, Glycine max
  Clone ID: PAT_MRT3847_130572C.1
ggaaaatagatcaaagaaaaactaacgtggaaaaatcaatgaaagttgaagattcaaaggaacactaaaacgaattgatacacgactcaattaaaaattcaaaggaacattgagacgatcctagcgcagctccggccaaaagatccgttgatgtttgttctcaggttcacattgcctttttacattttcgctgcacttgttgttccaccaattctcttcataggaaaatctttgtaggcttgtgctggaaatgctctgtgacttgtgctaatagtatcaccaaaagaagtcaaagaatcagaaagcattaatctggatttgcagtttgcacatattggcagtagttttcttttttcatttttcaattgttaaactagatgtctagaagacccccactccctcgtctcctccttaacaatgtctcttgcatgagaaatgcccagcaagttctgcgccatgtgaatgtctctcttcatgatggaggggcacttgtgctaacaggtgcaaatggctcgggaaagacaactttcctgcgcatgttagctgggttttcccgcccttctgctggtgaaatcctttggaatggacatgacattcaacaatctacaatattccatcagtataaacttcagcttaactggctctctctcaggatgccattgatataagatgtcagttcttacaatgtacaatgggttgaacttcttgaaacaaggaaggaaggctatggc

SEQ ID NO: 33853 - DNA, 799 bp, Glycine max
  unsure (1)..(799): unsure at all n locations
  Clone ID: PAT_MRT3847_130573C.1
ctcgagccgaatcggctcgagctttgatgatgatgatgatggggtgcttttgctagcttcactttcttcttcctgtgtttgtatttgctaatagctcccatcaaaggcccaaaaatgggtaccatcgttgaagcagataacacatataccaagatcctaggaagatggccagtcttttattatggcatgggacacatgctcaatgacataactgctgcttgttggttcacatatttattattgttcttgacagatattggactttcaccaaggaatgcagctgttgtgatgctttctggtcaagtggctgatggatttgtcaccatatttgttggtgaactgatagacaggtttggacacttcaagatatggcatggtgctggatctttattggtggcaatttcattttcttctgtttttggtggttggttaccatgcaaactgtttagttccaattcaggtacttttgaaactttgagttacagcatgtatgcagcaatcttcaatgtgggctgggccgctactcangtttcacacatgtaataatttcctctgattcatcttttccatttgatgctgaaaattaaaaccataagtttgaatgtcaaattataagtggttggctggtttggttacttataaaatgatattccaacttgtgctcttggtaacttaaactttaaatttgaagtatctaaacatcattgaccttttgatagttatgtgatatctatattgggataagccataattttgttgagaaaagccattcaaatgaaatgatgatgactggtatgtg

SEQ ID NO: 33854 - DNA, 730 bp, Glycine max
  Clone ID: PAT_MRT3847_130574C.1
tccggaattcccgcgtcgacccacgcgtccggtccaacctttacctttggtttacacacacgaaccgttcaaccgcacacaacacaacgtttgagttgaacaaagcgaaggctcctgaacaggacaaaccaactggtcttgttgtgttgagcctaatctctatcaattttcaatattttatactattcttattcttccagttatatatatggtttgggtgtgctaatagctccaatgggtactattgttgaagcagatgacacatataccaagatcctaggaagatggccagtcttttactatggcatggggcacatgctcaatgacataactgctgcttgttggttcacctatttattattgttcttgacagatattggactttcacctaggaatgcagctgctgtgatgctttcaggtcaagtggctgatggatttgccaccatacttgttggtgaactgatagacaggtttggacacttcaagatatggcatggtgctggatctttattggtcgcaatttcattttcgtcagtttttggtggttgtttaccatgcaaactgtttagttccaattcatgtactttcgaaactgtgagttacagcgtgtttgcagcaatcttcaatttgggctgggctgctactcaggtttctcacatgtccatggtgagttgcatcacactgaacttctcaagcagagtggccctggctagctgtcgcattgctttta

SEQ ID NO: 33855 - DNA, 520 bp, Glycine max
  unsure (1)..(520): unsure at all n locations
  Clone ID: PAT_MRT3847_130575C.1
gactaccaaagtttacattgtttattattctacgtatagacatgttgaaaaactacctagagagataaaaaaaagaactacttctataaaaaaagtagaagcagaactgataacaatacctaaaacattacctaaagaagtccttactaagttaaaagcacctccaaagagtaatattccaattattactcccaataagcttcctaagactaatagctttttatttaattttcccacaagatttaaatctataaccactcaatttaaagcattttttaatccaactaaagaccttgtgcatacactaacactatcaagaagaaccacagaattcttctatagcactanttctcaaagagagaaccaataaactaccccattaacatctattactcagcttattcaccatgaattaatctgtgtccccattatatacacattgaggcataacatattttagttatataaaatgaatggtacgtgcgcatatgatgctggaactttactgggaaatactcga

SEQ ID NO: 33856 - DNA, 358 bp, Glycine max
  unsure (1)..(358): unsure at all n locations
  Clone ID: PAT_MRT3847_130576C.1
tttttttttatttaaaaatnttatntataaaanaaattaaannnntnaaaaanttnattttaaaaatttnaattattaaaatattgtaacaacaaaaagaatttaaaaaaaaaaaaaaaaaattttttttttttaatttttttaccaaaaacctaagcaaattataaaaacaaacgacatttttttttaaactttttaaatccaaaagttgattacaattaaaatcaatggcgttatttataaaagttccataaaattttaaacgaccaaaagccggttttttcattgatgtttttttaaaacatgaatttatttttcaataacaaggggcaaaaattaagtaaatttgcggtatttg

SEQ ID NO: 33857 - DNA, 612 bp, Glycine max
  unsure (1)..(612): unsure at all n locations
  Clone ID: PAT_MRT3847_130577C.1
ccacgcgtccgacacactccaagacaaagagaaataaagagagagagtctgcgtttttcttactactgttcaacttaagaacactttacgcgctgttccacatttaaccctaaccgatcagagtgtatacttcttggaccttcccgtaatttcgctcacattcgatctccgcgatccggtgcgtggagtttctctctcactctattagggttcaggcgttttgttctctctctctctctctctctcattcgattccttccaaattagggtttctgttcccgattcagcgcacttctcccgattcgaattcgcaggataggnngtttttgttgtnntccgcgtctcgctttccgcgatgccgcgcagnttcgaagcacanaatcgagcaagcacnnagttcgcgcgacgcgagggagcacttccgactcggagcgagattccggcgccaaggatcggaggagcaaggaggagagtggcggcggcgcgaagaaggattcgagttccgcggagaagcggaggctggattcgaaggacgcgcacgggaacggggagtattccgacgagtacgcgtcgtcgtcgaagcggcgcanagacggaggcggcggcggggga

SEQ ID NO: 33858 - DNA, 418 bp, Glycine max
  unsure (1)..(418): unsure at all n locations
  Clone ID: PAT_MRT3847_130578C.1
actaaaaaaaccaaccatttatatacttataattcctttaaatgatatgggcccctaaatttttcatgggaaaaatttcaagggacatagagcataccttttttttttataataacaataggaaaaatcaattaaaaagtttcccatacatttgacctttccaaccttttccacagttaactttttttcttacggggccctttgaccttgaaagaaaaaataacctttttccttgatatatcagggcaagcagtttttgggggaaattttgaacccactttcactttttccttcttcccttggccctttttaagcaccttcaaaggcctggattttttagaacctttggggtgtaactttttctnactatccccgaatctgatatattatggaccaatcctgaaacttaaaagcttgc

SEQ ID NO: 33859 - DNA, 385 bp, Glycine max
  Clone ID: PAT_MRT3847_130579C.1
ggctcgaggttaaatatgattttgaatgatttagaaaagcacacagaacacatctctgaaaaggttgctgctgtagtacgaagcataagagagattgaggaggaaatatcagattcagatggtgggtaattagtgccattgtagcatgtttcctaattgtcgacatctggttgagattgttgagaaggctaacattattctgtcggcattttagatgtgatttcgcttgaagtagtgtagcggtcaagttaaaacttcaggcagcatatatagtttaccaggaaattcattttttctggtgtatcatgtcctggattaggtagatgcttaaagtgtaacatacattttttattgtacttgccaataagcgttttcccttgtgagt

SEQ ID NO: 33860 - DNA, 117 bp, Glycine max
  Clone ID: PAT_MRT3847_13057C.1
tctacacgatccacgattccttccgccaccctgccacgaaatggttaaagaatgccgctacctatagggagaggactggccgcaaataaacatcttctcaactgtgtgacccatgct

SEQ ID NO: 33861 - DNA, 185 bp, Glycine max
  unsure (1)..(185): unsure at all n locations
  Clone ID: PAT_MRT3847_130580C.1
catcaccacaacatcaaacacatcctgtatataccatgactccaatccagaccccctattcactatcctttacaacatatcttgacttaatacttcatctgcactgatacacatctantgcactccacagtgactcacagcatatgtacaagctcaactgtaacattgcccccatacaacgttct

SEQ ID NO: 33862 - DNA, 284 bp, Glycine max
  Clone ID: PAT_MRT3847_130581C.1
tctgccctttttttattttcttttttttattgcatatatttataacgacatgcacataactcgcatggaagtcatagcggtgcatacaagtcactacaatgtgtacatttatacaggccataactatataccattactacgactatcaaatcacatgacaatatacaaagcaccaccagtcgcacgacttactacttaagaacacatgcctaaaagatctatgtttatcaccactttcaacaccaaccaactattgagactctactactgattgcagctcaact

SEQ ID NO: 33863 - DNA, 359 bp, Glycine max
  Clone ID: PAT_MRT3847_130582C.1
ctcaattgtgattagaattgcttagcttacattctagaactttaatgtattggaatggtatgtcaatggcactgattggaacctatcttaattgatgtattttgaattcaacagtcgttgtacttgtattgcatgggtgcctggaggtgatggttcttttgttgtttctcacactgatgggaatttgtatgtatacgaaaagaacaaagatggtgctggtgattcttctttcccagttgtaaaggatcaaactcaattttcggttgcgcatgcacgttacagtaagagtaatcctatagccagatggcatatatgccaatgttcaattaatagtatttccttcccaatgggatgggcat

SEQ ID NO: 33864 - DNA, 627 bp, Glycine max
  Clone ID: PAT_MRT3847_130583C.1
ccaagtaaaaatatttcttctattactctcagtaaattttctccttgggtttatttttaattttgagacattctaagtacctttgtttcacctccctcaaaaaatttccaaaccacgacgggggttttcctatggctaggctctttaggaatttgaataattaaaaacagaactggccccaattatagcctaagttttaaaaacctaggaccaaatttttttccctggactaatcaatggttttggatgaaccaaaaaaaggccccctttcctgaatttttcaagtggagggcccattttttggatgaatttgaccaaattttgaaagccattggaaagggtccgcaatggcattaccctatttcttttgaagtggcagggaagaactggagttttttggcccttcaccaaaaaaaaaattttttatggcagttccaaaaccaaaaccctgaggttggccccataatcgacttttttcacatcttacccaatccatatttgccctgaggtttttgaatggtggtggaattttcggtttaagctaaggcccatttgggcctttcccaaattactttcttcaaccggaatggaccttgcaccttgaacctgggggttgaaaagaacctg

SEQ ID NO: 33865 - DNA, 246 bp, Glycine max
  unsure (1)..(246): unsure at all n locations
  Clone ID: PAT_MRT3847_130584C.1
aacaagaatgaacacgaagtcgnanggaatncggntcgagnngacagnaggggnggcnantagcnnannagtnaaaaaataaaaanngtgaagttgctccttcgncacnactcccngcccncctgggtgtctcccgaagattctntgnanaaagaggagtgnnactggtggcngaagaaggctggaggaaaaaganaagtatgngcttggtcaccagccngctaacncnaancngtcaagcaanaa

SEQ ID NO: 33866 - DNA, 592 bp, Glycine max
  unsure (1)..(592): unsure at all n locations
  Clone ID: PAT_MRT3847_130585C.1
anaccccaataatgatgcatacattcaattcaattgtgggccaggggagagcgagagcatccgcaaaatgagaattaaattaacttaaaagaaaacttcaggggcatcaaccatccaaccaaagatcaacgggcaccgagtgggcggggaganaaacacaagggaggggaaccatacacagaagaagagttccgggaaattcaataatacacattttttttttttattatttcatttttcccctctaataatcagtgcgtggaagctgctcctgggggtgggtgaggaaaacaacctcggagataagcccagcaattccacctccgaggagaggggccggcccantaaatccacggggtgtggccacgggccagctcacgacagcgggcccaaatgggacagcgaggggtcatggggtgctccggagaaggccccacccaacaaaatgtgagcgccaacaatgaaaccaatggggaggggggcaataattcccaaattgcccttcttgggggcaacggggagggggtanactgggtacaccaaaccgagggggatcacgatctccaacaccaaagcggggccaactccgact

SEQ ID NO: 33867 - DNA, 1209 bp, Glycine max
  Clone ID: PAT_MRT3847_130586C.1
tcgcccccacgcgtccgcccacgcggctggttgcgatggagaaggaagcgagtagcaccgacgacccttcttcgttcacgcttctagtgtcgtgtccttccggcctttcaccttcacaggtttctgtggcattcagcgacgcctacgaccggatcccccactctgacgtcatcttggagaacacgatttccgagatatggaagcagaggagtcagaagaacaattcgctcttcaatgggaagaagttcaggtatggagggtgtgttttgcatgccaaagatggatccgaccatgaatgtgaaccgcatttatgcctccatctaggtttgacagattacaggacttttgtggggacaaatttaagtcctttgtgggaaaggttcctggttccatcagaagatgattctgttctttgtcagcacaccttcaatccactaggaaatggtgcactggtggaaacaaatgacaacaaaatacttgtattacaacgaagtgataatgttggtgaatttcctggacattttgttttccctggaggccatcctgagcctcaagaaattggtataacatctcatcaatataacaaggagttaacagaatctattaacactaaggtttcacaggagatgtttgacagcattgttcgtgaagtagttgaagaaattggagtgccggcttcatcccttagcatcccggctttcattggtatatctcgcaggaacttgaatgttagaccagctgcatttttctttattaaatgcggtcttgactcaaaggaagttcggcagttttattcaagtgcacaagatggctatgagtcaactcagctatatgctgttccaatgattgaaatagaaaacatgacttctaggatgcctggctgtcatcgaggtggatttgccctctataaattgatggttgacaccaggaagattacttgatggaaatttgtagcgctcacaggtgtcaagaatcgtagttgcttgccttcaaggatttttcctgcgtgatgtagtttgatgctgacattaccgagttgaacctccacttccccgcccaatgaaagagacataatttaaccgagtgcgaatcttcccactgaatagtgaatgctacagaatttctatttcattgcaatagattatactcatgcttgttttcaattcatacccaaataaaatgaggtcaaaactaagatgcaattgtttt

SEQ ID NO: 33868 - DNA, 451 bp, Glycine max
  Clone ID: PAT_MRT3847_130587C.1
aaaataacccccactttacccattattaccaccattaaaagagggggggaaatttttaaattggccgaaccttcttcacaagaggggcctgccttatttccttttttggaataaaccaaccaaccagccaaagaaaaccccaattcccaaatcttccaaaggatcccgattttccaaaaaatctggcagtaccctgggaaccaaaaaagcctggcttaaaagtttaaccaccattttcaaaatcttgaaagattcccagaaaaatatcaaaacctgaaaactgttgggaattgccaataaggaacctcaaaggccatgaagtttgattggcccactcaaacctccacttttcaaaaccattattaggaccacatacctctattgggaagatcaattcccaggaatgtggttctgattttgtccacttacatgcatcaaaatgctctgtact

SEQ ID NO: 33869 - DNA, 276 bp, Glycine max
  Clone ID: PAT_MRT3847_130588C.1
ggaaactttttttgcttgccaacccttctattaaggagggtattctgttcccacggcgggcccaaccagaacatgctttccatcaagttttaaatggcctagcacgtaaattgccacacgacagaagtgtattcttgaaaccaggggagaaggccttgaattggactgctggccctttgggggaccttaaacctttgaagcttaccatttaactcactctttagatgcaattataattctttacaaattcttttttattctggcgagtgggggtgt

SEQ ID NO: 33870 - DNA, 403 bp, Glycine max
  Clone ID: PAT_MRT3847_130589C.1
gaactggatgaaccaaacacaacatctccatcattttttttgatcaaatagaagattatcagcgtgatgagaagtgacacaagcgacccatcttcaattggaggatgatcagcatccactcagggacacaaattgcaaacagtgttctagtctatatccaagataatggggggtggactctagaataagcactgacaactcatggccatttagtaataatcaagatattggaggcagggacaccctactatagacacaaagtgccggcagggaggaccgtgactagaatggcaaggcgcggctgaggctggtatgaagaaataaaaaagatcctgatcctagtgacattaaagaactataagagcttgacaaggtagagtatgcatagaaagggagccacaga

SEQ ID NO: 33871 - DNA, 322 bp, Glycine max
  Clone ID: PAT_MRT3847_13058C.1
cccacgcgtccgctgtttacgctatttatcttttagcactacgatactcatagaatatgctggttgtctttcaacctggtgaagggatatgttgtaactataaaatgagtcactgtctgcgcttagttagaagatattagaattatgcatctatctgtcttgcaagatgtcctgggggcatgaaatatgcacatgcgatgtttatacaactgaatattctgtacgaatttctatcctttggaaataaatatatatggtctctattgggtgtaataacaacttgatggaagaatcattttatatccgctatttgtacgaacaa

SEQ ID NO: 33872 - DNA, 294 bp, Glycine max
  Clone ID: PAT_MRT3847_130590C.1
gaaaagggaaaaaaaacccctttttggggttaataaaaccccccaaaaaataaaaattgttttggacattaaactttattgcccgggccttttttttgtgaaaacttgttaacaaaattcaattttgcataaaacggggtttttaaaccaaaaacattcacaaaaagtattttcttttttatttctaagggttaataaagcttttccacacctgttaagccggttgggaagctggtcccaattttttccaagtgttttgctccttttaagtccttttgaaactaactttttttt

SEQ ID NO: 33873 - DNA, 239 bp, Glycine max
  Clone ID: PAT_MRT3847_130591C.1
tttcgggtatctagagaaaaggaaggggacagaaagagctagaatctgtatcatcggagggactgagtacattggaaaattaatagtggaagccagcgtcaaaaatggccacccaactttcctttgggagagggagaacactgtcacaaaacccggaaaatcaccccttatagacaatttgaaaggcctcggtgtcaaacattgatttaagagatctatacgatcaccaaaagttggag

SEQ ID NO: 33874 - DNA, 493 bp, Glycine max
  Clone ID: PAT_MRT3847_130592C.1
attgagagtgctaaaagcatgtaaaacatgaaagcgaatggaacacaatcatagctcatgaaggtccgctaaagaaccacgggatgcacacatacacaaagtccaggagcatatagaaagaataaccagattatagactctccatacttaacctacaccaaacaggggacctgcatgaccattctaaaactcaaaacccaccccaaacacacaagacaaggtgacgagcacactctttatgaaagttgaacacagcaggaggacttccattctccagtcacttcccagaaaagagcaacctctagttgctcatggggggataccatgccttgggctgtatattacccttgacattatcaattgcggttgaacattctacctacgaggacgacagttttccctgccaaagtcttcacacggaactggataccgcaccacatacgaatgatcacgtgaagggtagaccccttttgaatgatggagaaagccagcg

SEQ ID NO: 33875 - DNA, 479 bp, Glycine max
  unsure (1)..(479): unsure at all n locations
  Clone ID: PAT_MRT3847_130593C.1
aataaccactcttttctcatcgaatntacctagcactcaatcacaaccaacacaataatgatgagtgtatgtaaccaaatgatcaaacaatttagttcaatcaagatcgatgtcaaatgctagtttgtgagaagtaattctatttcaagctcaaacaccaattaattacacctatcatcatgnntccaacctcaaaccccagcattacacgttatatacaattgctaacttaatcataatttactcaaactttcatncnnnncatcaagcaccaagtccatatgggtgtattgaagttgaactcctatttagtttaaaatcaataaattatgaccagttttcttttttccaatgcaaggacagaagggcattagactccattcaataccagcttttccctatgttgttatgaatccaaataacagacacgggaaaatggacaggacagagggcagatctgaaatcaagaaagtatgaaa

SEQ ID NO: 33876 - DNA, 470 bp, Glycine max
  Clone ID: PAT_MRT3847_130594C.1
ctgggcaagtagttcgttcagtaaacggcccagaaattttccgggggtccacgagctcatctactcggcgcgcgcccttttttttttttttttatcccttttatcctaaggaacgatattttattcataggagcaaggcttttaaattctagatacattgatacctttacatgatttcatcacaaagctacaaacataaacacgttaaacaggcagagaatttcagatacacacacgtatccaattaaaaacttaacactacgttatccatggacaacaacaatgtactagtcttttcttatgaccaacccaccaacacacgattttagagcttcaggacccaaaatacccctcaccatcgtcactagaaccaaaatacaaaaaaacctcgataccgtcactggtggctcctgctgcgaccccccaaaaattaacgtcttgttaaactacctgtatggcttcaccaaccc

SEQ ID NO: 33877 - DNA, 554 bp, Glycine max
  Clone ID: PAT_MRT3847_130595C.1
catatatcacacccagtggaataaataacagcaattctaccccatggataatggaattggatgggaatactgagggaactcaaacagtggaagttattaaatataagtaccaggtagaggtttaacgtatcgaggggccgttgtggtaaaaaaaaagttaggtaaaatgagaggtgttgactgggtgcatggtggctcttagcacttgaccgccttagaggccatatgcgaacgataaaagggtggtgtcagcgacaccatctatgtagagtgcaaaggcctagcatgggtcctcttggatgctttggccaacaagaaaactggaaacccttagtataagagagcaggcatttaggagctccctgatggcgctattgaaacaacaggagtctctttgcatggagcttgggagtcaaaatggtgataaaccctttcatggagggaacaaactgtttattataaaaagcgggccgttcctgaggtcggaatggatcaacaatgttgacaaccataacagctggggcatggactccctcatgttcaccaccctcaga

SEQ ID NO: 33878 - DNA, 412 bp, Glycine max
  Clone ID: PAT_MRT3847_130596C.1
gctggtggggctctttaccattcctttttttacaaaacatgtgcgctgacttatacgaagtggaacacgagcaggtgctagtaaaattgtcgcagtacaagatcaatggcagggacaggcatggtcattagatgctaaatatgagcgtcgaattatgccgagcgcggccggggactgcctatggtgtcaataagaacgagaaggggagggttgtaccgaatcatatgtcgaataagataaacatggctcggtccaggggcacatcttcacggagattatctatgcttcagaactttggctctgaggaagatatgcacgcgacgatggcagatcacggaaagaagaagagaatgatcgtaatccgataaaccggacgccgaactcgcatgttgaagcagatacacttggacga

SEQ ID NO: 33879 - DNA, 333 bp, Glycine max
  Clone ID: PAT_MRT3847_130597C.1
cacgcagtggccaggacaacatggaaaacggttcaaactccggtagactgggaccgaacaggttattaccgagggccagtacacaaaagggaatgagggcacaaccccgggataagcacaaagcttggcgacgtgaacaaatgaaaccaacctactcccgagccaatcttaaatcgaatacgaaccgtcctagtaggcaaggctaccacaccatgatcatcaatctctgggccacaagcagcaacaaggccaggccctaagcggttacccggaagagcacctacagggcctcccaaaagaccgatgatctcggatccccccgctacaagaaca

SEQ ID NO: 33880 - DNA, 712 bp, Glycine max
  Clone ID: PAT_MRT3847_130598C.1
cactaggaggaggagaacgtagagtgaaagagaggttaacaataacaatggcggcgacagagagcacagtaacttcaaaccctagcaacagagaacgaccaaagccaaagccaaagctactagtcataacgggccccaccgcttccgggaagtcgaagctagccgttgatttggcctcccacttccccgtcgaactcatcaacgccgattccatgcaggtctaccgcggcctcgatgttctcaccaacaaactccctctctctcaccagaacggagttccgcatcatctcttgggtaccgtaagccccaacgtggaattcactgccaaagcgtttcgggattccgctattcccattattgatgatatattggctcgtcgcgtgggcggacttataggtgggggcactaattactatatccaggctcttgtgagtccgtttcttttagatgattctgcagaagatatggatgaaagctgtttgggtgatccaactgggtctggtaacaatttcattggtgaaaatgactgttcaaacaatagttatgacctgcttaaagatattgatccagttgcagcaaatagaatccatccaaataaccatagaaagataaatcaatatattaatttgtacaatcgcactggtgttctttctagcaatatttttcaggaaaggcagcagaaaaaggggtcacgttgataacttacgatatg

SEQ ID NO: 33881 - DNA, 416 bp, Glycine max
  Clone ID: PAT_MRT3847_130599C.1
cggaattcccgggtcgacccacgcgtccggttacatagtacttcatcatcttccacaaaattatcctcatatcactcccaagttcacaacactaggtctaaatttgattgaagatggttggaattggggttccaatatgcgtgcaatgtggcaacaccagcaacccttgccggtgcaaggtggtggggccaacgctcgggttcctggcgtttgcggcggcagcggtggttgagtggccggtgggggctctcgtgtattgctttcgccacacaaagggtcgcaaaatcatgggtcatcccgctacagtcatatatccttcagtcaccaatgccatccccatctaagttctaactatatgttaattaatttccccatgataataatgttatatatatatatatatatatatatatata

SEQ ID NO: 33882 - DNA, 538 bp, Glycine max
  Clone ID: PAT_MRT3847_13059C.1
ttttggtcaataaaacacttaaattatatatattattacatcagattcattctctataaaatccaaatactatctgcaatattgttcaataatttctttttcagaatcttgagtgtttacaaattacaaaccagacatacaaaagcaaagatgaattccaaacataaatttgcaaaaaaagagagcagctgattacgaaacctttttcagttttgaagttttagccttgaaacacataaaccagaaaaacccatcacaccaactggggttaaatctaacggaaagagcctgttcttccacgacctggtaaatcaaggtttgaatctcattggaaaaagatgtctacatttagtatcagatgtatcaaatagaattggttccaaagaagaaaaacccatcaccatccctgaattggccaccgtctatctggatcgggaagccaagaagagcgtttcttgtccttctttaccaccgtctccgacaccttataggctctacgactcgtggggagaggaaactcttttgaagagaaacctta

SEQ ID NO: 33883 - DNA, 144 bp, Glycine max
  Clone ID: PAT_MRT3847_1305C.1
gcattacaatcgctcccagaatctgttctagtttgttcataactcaataattgtcatcatgggctcactgactgttacaggtgaaaatgatgacaaactaaagcgtgtatctcttccctttgtatcaaccggtcacctcattcc

SEQ ID NO: 33884 - DNA, 440 bp, Glycine max
  Clone ID: PAT_MRT3847_130600C.1
cctcgtgccgaatttcggcacgaggcagaagtaatacaagagatttattccaacaaccctttagaaaaagaggacccgttaaattatcaacttacttagaaatctataaatgtggagactatgttgatattaaagctaacccctccattcacaagggtatgcctcacaaatattaccatggtaaaactggtagagtttggaacgtaactcctcgagcaattggtgttcaaatcaacaaacctgtcggaaacagaattatgaaaaagcgaattcacgttagagtagaacacctccaaaagtctgcttgccgaacccatttcttggaaagacttgtagaaaatgaaaaatacaaagctttggtcagacaaggaaaagctccccgaaaatctcttaaacgagaccccggaactcctaacccatcaaaatttgttaaaggaagt

SEQ ID NO: 33885 - DNA, 252 bp, Glycine max
  Clone ID: PAT_MRT3847_130601C.1
gttcttttgttttgtgcttttttctcccaggcccagccacattggcataaaaaatgctcaacagggctaccttctcttaaactgcagtggttttgtacattccctggctttggattgaatgtccttaggctgtttacctcccacgactttgatgcgctttacagctcaccattcactctaatgttccgggttagacaaatgattcgattccaaccctaagagagtgggtgctcttttctattttttagtccc

SEQ ID NO: 33886 - DNA, 273 bp, Glycine max
  Clone ID: PAT_MRT3847_130602C.1
attgattacagcatcccaaatcaaagtcatactcagagttacctctctctcatttctgcaactgtcaggtcatgtggtcggagccacaacaaaaccgtcatcaacattatttagattttaaataaataaaaattcagatgagagagagagagagagaaataatatgcatggatagattaattagtggcgaaagtggagtatttatatctaattactattcaattatcttaatagccgcgcgcgagaaaagcaacagcgttatggcaagaagaa

SEQ ID NO: 33887 - DNA, 273 bp, Glycine max
  Clone ID: PAT_MRT3847_130603C.1
attgggactgtgtttgtacttatttgcgtgggttactctgtttgactactttgtatttcttgggtcagtccactttgggataaagtgatatttttagtcacaacttcattcccaagtcaaggatcgatctccattgccaacaactttggattgccaaaaatatgaatcttaataatctcataaattgtgttaaaaaaaaaaaaaaaaaaaaaaaaaaaaaaaaaaaaaaaaaaaaaaaaaaaaaaaaaaaaaaaaaaaaaaaaaaaaaaaaaa

SEQ ID NO: 33888 - DNA, 182 bp, Glycine max
  Clone ID: PAT_MRT3847_130604C.1
gacacgtgtacgggttatagcaacgtatactgcctccaacttgaatcgagagagactgtctgatttttacacatgatgggcacatacaacctccagtaaagtctcctaagacatgaaaaataatgatattcacagaaatgagatgaacggggtgatgctctgcatgacactcaactacactt

SEQ ID NO: 33889 - DNA, 277 bp, Glycine max
  unsure (1)..(277): unsure at all n locations
  Clone ID: PAT_MRT3847_130605C.1
tcaaggttcctcaaaatgtatctgatgtttgtgttgctcttcgtcatatcaattcgattgaatatgtgatatgataanataaacattgtggtaggttatatngtggacnctgaggagggaancancattaacgagctgaagaagcctgttgtggagaaagatgctccagggtatgctatatgagggcactgtatgtacggcctcggaggggaaccagataattatgttaactaaataatctggaaccctaatgtatgagtgtgatcatcagtgtgta

SEQ ID NO: 33890 - DNA, 644 bp, Glycine max
  Clone ID: PAT_MRT3847_130606C.1
gtttttgtttgcccttcgtctttcctgcctccgacctctcacgcgcgtttctctctctagggccctctctctcgcgtttctctctctagagccctctctctcgcgcctctccttctctctctgttggcaatctcagtgacaatggggagtgacgacaatctaaagacatgggtatcagataagttgatgtctctactgggatattctcagcccacagttgtccagtacatgattggactatccaagcaagctacttctccagctcatttggtgggcaaactagtggagtttgggatctcgtcaatggacactcatgcatttgcggaagaaatttactcaagagttcctcatagatcatctggtataaatcaatatcagaaaccagagagagaagctgcaatgttggcgaggaagcagaagacttacttactcaattttgaaggctgatgacgatagtgacgatgactatgtagataaatcttcagtaactactgcatcatctagaaggtctgacaaccataaaaaatgtttcaggaagaaaactgaagttcaagatgatcaagatgatgagggtattttgagaaaggaaaaggagagacaagttaagagaagaacttcccctgatgaagttagtgattctgagt

SEQ ID NO: 33891 - DNA, 352 bp, Glycine max
  Clone ID: PAT_MRT3847_130607C.1
tttttgtttttttttttttttttttttttggtttgggtttttttttttggggggggggaaaaattgaagggtgcctttattttactttttagttccccaccccgacaagatgtcaaaaaaagccgcaaatttttgcctttttgggaaaaaaaattcattttttggggaaaaaatgacaaataacatgattttgaaccccttttttatccaccacatttttgggctcaaacttagcaaacctaaaattaaggggctccccaaattttttacttttaaatctcccaaaacagtttgtgggaacaaaatcacactgtttacttaatttttaagggttttatttaacccctttttt

SEQ ID NO: 33892 - DNA, 227 bp, Glycine max
  Clone ID: PAT_MRT3847_130608C.1
ctcgagccgattctgttcgtgagatcactcttttgacgtgactaaaagatgaattgattggttacactctcagcaggtgagagtctttcaagccctagcatggctttctctaatgctaacggaatttactcaacacaaaaggccctctccgctaggtttcctgctgtgtcgaggcccatccaaaagtacactggtttggtgaatacacgtcccattcagacaacccc

SEQ ID NO: 33893 - DNA, 203 bp, Glycine max
  Clone ID: PAT_MRT3847_130609C.1
gtagacattaggtcacccatggtcttcaaaaattattttccggcatgtgccaaattccttaacatgcattggagttcgaaaactgaaacctaaaattcaggatgatggaatctccaaaagccaaaacaaatgggaatgttcgtttagttccaacaaacaaagtggggtggggggtacaaatgctttggaaaattttcacactt

SEQ ID NO: 33894 - DNA, 253 bp, Glycine max
  Clone ID: PAT_MRT3847_13060C.1
cgaacccattcaagcaaaattacgactctctcgtcgttcccatcccttcctcttcgcccccaaaattctgtttcacaatcctaactccaaatccaaaatggaacaaccccctaagcccgaaacagtgactgaatcgcacgtcccgaacggcttctccaccaccaccaccaccgtcccgaacggatcgggatcggaatcccaggcccccaaggaacacaccgcatcgtcgtccagtagcaccaaaaaatcggtg

SEQ ID NO: 33895 - DNA, 692 bp, Glycine max
  unsure (1)..(692): unsure at all n locations
  Clone ID: PAT_MRT3847_130610C.1
ccgggacgcaacaaagggtttcacttttctaacttcatgatcattcgaaggtcatggacatgtcaaatccttctgtatttgtaaatgctcagttgattcccaactttatagggaagaaagtaagagcagtggttcaggtgagccaatgtgatggtggggttaccacagcaaaatccactgatgactgtcaattaaccataaaagggttgccacaagtccctcttatgaattatattgaggtcattggcattgctgaaacttctctttcaatcagttgtgacaactggccaatggtggatttaagggtctgtttctctaggtacatcaaggaatgccgggtcagcaattggatggggtttgtttgaagtttctgctttttatactaaagcacgtgtttacatgtaaatgtaggaactatgcttttgagtatatggtatccgcagaggagcagggcacatgtgctctgtaggaactgtttcattatctcttatgttagctaggttgagtttggcttatgtctgcatctgattccatcgtcttcaattatactcccttgaatgaaatgaggtattagtttcatgtggaatattttgttcttcacctaactaaaaaaagtagtagtttcatnnnnnatattttgtttttcacctaactaaaataccttggatgtttccccccttccnngttgtatg

SEQ ID NO: 33896 - DNA, 471 bp, Glycine max
  Clone ID: PAT_MRT3847_130611C.1
gttttttttgctgtgccgaagcattcatgtttccaaggcagttttgtacattggttacatgcggctgttggtctccttagtgtccagtctcttttttgcgtaccaatacatgatggtcgtcactggccaattgttctccgaccattggattaaccaagtgactgctcgctttatgtcacaggcaatgatgtccatctgtttgcaagtgattgtcgtggtacttatggtccacggtgtgaaggctgagaagaagtccttgttgcttccttttattgcatatgctgcgatcgcacttttggctggttcgatcaaggttatgagtgatttggggtatttggacacaagcgtttacaaaaacaatgaggcggagagtcgagccgccaaagtgcaattttctcactaatctgttgcgcactgggcttcaggcctggtggctgtctagtgtttggcgttgttttggttacctgaccg

SEQ ID NO: 33897 - DNA, 599 bp, Glycine max
  Clone ID: PAT_MRT3847_130612C.1
aaatcttgctgtatttgtaaatgctcagttgattcccactcttatagggaagaaagtaagacccctggttcaggtgagccaatgtgatggtggggttgccacacccaaaatcccccagatgactgtcaatatgtgatgaaagggttgccccaagtccctcttatgaactatattgaggtcattggcattgctgaaagtaacacctctattgatgccgaaatatggactgactttggcagcacatttgaccccttctcttacaatcagttgtgccaactagccaatggtgaatttaagggtctgtttctctagggacatcaaggatgctgggccagcaattagatggggtttgttagaagttactgctttttatactaaagcacgtgtttacatgtaaatgtaggaactatgtttttgagtatatggtatccgcagaggagcagggcacatgtgctctgtaggaactgttccattatctctgatgttagctaggttgagtttggcttatgtctgcatctggttccatcgtcttcaattatactcccgtgaatgaaatgaggtattaatttcatatagaatattttgttcttcccctaact

SEQ ID NO: 33898 - DNA, 519 bp, Glycine max
  Clone ID: PAT_MRT3847_130613C.1
taaaaattttaaaaaaaaaaaaaaaaaatataaaaaaaaacaaactaacaaacacaaaacatacaaaaaaaaaaagggcgacctttgggcggcctcttttttggttccgcgttcatgccccgtcctagctcttttatagggtctcctttagtgcaacctactggccgtccttttgccgcgtttttactgggaaacccctgggataaccctgctttttccctttttagccccttcgcatttcacccccttttgtcttgccggagtggcccgaaaggggccccctcccatcccctttcccaacctttttgccgattgggtggccccttgtaccccccctttaaccccgccttatgcggtggttacggggagtttacccgctacgtttcccatccccttgccgcccccttatttccctttctttcctttttttttcgtccctttttccggctttccccgggttgccctaaatagggtgttcccttggggcttccttttgggtgcttattgggggcttgaccc

SEQ ID NO: 33899 - DNA, 538 bp, Glycine max
  unsure (1)..(538): unsure at all n locations
  Clone ID: PAT_MRT3847_130614C.1
atcattagaaggtcatggacacgtcaaatcctgctgtatttgtaaatgctcagttgattcccaactttatagggaagaaagtaagaacagtggttcaggtgagccaatgtgatggtggggttgccacaagtccctcttatgaactatattgaggtcattggcattgctgaaagtaacaactctattgatgccgaaatatggactgactttggcagcacatttgacaccttctcttacaatcagttgtgccaactagccaatggtgaatttaagggtctgtttctctagggacatcaaggatgctgggccagcaattatatggggtttgttagaagttactgctttttatactaaaccacgtgtttacatgtatatgtccgaactatgcctttgtgcttttggggctcanactggagcactgtgcatgggctatgatcagaccgtacctattttactgaaggtgacagactactggagttactgcctaaatctaaatgccagcttgcttaatttgatgaccgtggccatttgctattcc

SEQ ID NO: 33900 - DNA, 948 bp, Glycine max
  Clone ID: PAT_MRT3847_130615C.1
cggccgctcgaggcggcgggccgggtttcaaaaaggaagcgtgttgcaaaattccggctggccccagggccacgccggcaaactcaaagcctaaacacatttcattcccaaaaaactcactcacgagagtgcatcattcctcatttgatcctctcttcccccatgaccttccaaccagtccccactctccttctccttctcctcctcgcgtccgcaaattcccattttgccctcgccggaaagcgcaaggttcacatccccgacgagttggacgacgtgttcgacgacgaggaggacgacgcgtggcgagaatggggcaagaaacccgaaccccctttcccttcctccgatatctccaagctcgatccctcgcagatccagcaggagatgatgaagcgccacgccggacccgtcatcggattcgtcaagctccggccagggtctcgccgtactccggacatggtagctgaatttgcaatgaaatggacacatgttctgagaactggagctgttggagtaaggtttatgggtgttgatctgaatacaattatgtttaacttggaaagcatcaaagacttggaagagttgaaggaatttgtcttggaccaatcagaggcatatgagatcaaaatgggggatcaattttttcgaagatctggagatccacctcttgatgaagttattgagaagtacaatagtgagaaagccaaagcagataatgctgattcagaggaaattgatccgaatgttaaaacagagttgtaattaaacggtatatagacataaactatgtttggttttgcgtcagttttaggaaaattgtgtcaaatttccatgttaacagtgaagcaacttcatataatttttcacttttccacgtttttcatgcacattatgtgttatcaacgcaacaccgaacattctaataattctctagaagttgacatg

SEQ ID NO: 33901 - DNA, 235 bp, Glycine max
  unsure (1)..(235): unsure at all n locations
  Clone ID: PAT_MRT3847_130616C.1
tgtatcttcatcattgtccanagcgttcancaacaccaaggctanaancgaaaccacatcnacgttttctcttctcttcctttgaggtcattagnctaggtggagtgtgancctcacnatcatcagtgagttttcagtctgatcactgggtccggntgtcgtgtgttagatttagggttcaattgnggagcccataggagttgacctggtagnccccttgnagaatctctggggc

SEQ ID NO: 33902 - DNA, 373 bp, Glycine max
  unsure (1)..(373): unsure at all n locations
  Clone ID: PAT_MRT3847_130617C.1
cgggccgggatttccgggtggagcccacgcgcgctctcctgtgtgggcgcatattaatattcggagacgagaagtgtagttttagtgggagatggaagaagattgacagagagagagaggaaggagcgcgaatagactaaatggaccttggatcttcgngtttgctctctctacgattcatttttcgttggncttctaaaagcttcttccaccatgagcagccgggccaacggttccaaagagctcaacgccnagcacaggaagagactggaaggacttcttagattaccaganaatatggtattgtgctgactgcaaagctaaaggnccaaggatgggctaggggtaaatcttgccatatttatatgcatgc

SEQ ID NO: 33903 - DNA, 219 bp, Glycine max
  unsure (1)..(219): unsure at all n locations
  Clone ID: PAT_MRT3847_130618C.1
acacacccggnacacaaanaaaacnaaaccggacggaagcccagcacacaacacaaacgcgacagacaaaaccaaaacacaacagacccacccnggctcaggcaacacaacggacaaggacaggacaaaacaaggcgccgccgacagccccgcaaggaacggaaaaaagccaaaaaactaactagtttggttcccccacaattgggtggttaacatagg

SEQ ID NO: 33904 - DNA, 363 bp, Glycine max
  Clone ID: PAT_MRT3847_130619C.1
aacgttcgcatatacctctcccctacgcaaacagctgcgcttaaccctaaaaaacaagccagccaaaccgatgcagttcaacccccccccgcaaaagaacctgcctatcttaccggtaatgattgtccatgggcgaatcatagcgatgcccacaggaggattacccttacgaccaaaccctccgcagaagagattaatcatactcatactgttgcacgacgagcgtacacgtgacatgcctagacggtctgtggaacgtgaactacctcttgacgatcgccgtattgctggggatatccatgaccaccccgggccagtgcaggctcaagaaccgatcctgctgcgaagccgacgttgacgtag

SEQ ID NO: 33905 - DNA, 396 bp, Glycine max
  Clone ID: PAT_MRT3847_13061C.1
ttcttcttctcctctcggggtgacccctctcactctgggactgtcgatggcaaataacgtgttccttggaaagatctgaggattggttctcgggagggaacatgaaaagaaggataggatgaattgatccagctactatggctgccaagaaaagaacacctggacaagctgtgatgagacaaggatggaataagggatttgacccaaaccttgccgatcgggttttataaaccactcttccatcaacacagaagtcggaccctccaggcaccccatcatcaggaaaagcgatgaacttttctctttttgggttttaaagcacatatgatataaaaatgatgactttaatgtattttgccactaaaaataagcaggttccaacctgatgtggaaaat

SEQ ID NO: 33906 - DNA, 363 bp, Glycine max
  Clone ID: PAT_MRT3847_130620C.1
tctggcctgcgctatgaatagctcttgaagggggcgtgccaagtgtgatagggacaccatctgctctcaagactgggaataatggaatcctgcttgcacataagcaatgactatgccatttaatccaaatccgtgttctgatgcatggagttcggaatttatgaagcgcaccgggttacattgtgatatcatatgtgtcactggatggactggcaccccaatgcaggacggtcaggatacaatggatagggtcacatcctctcaagaatgcgtgcccaggacctatagtgctagaaacccacataatccatctgggttaaataggacgagggggaaactgactcacccccaaggcacttcccc

SEQ ID NO: 33907 - DNA, 426 bp, Glycine max
  Clone ID: PAT_MRT3847_130621C.1
gaaaaaagggggggggccccccttttttcataatcggggcccccctcccccacccccctaaaaaggtttttaggggggaccccccaaccccccccaaaggaaattgcctccctaaattcaaatacccccaagaaaaaaaaaaaccccccaaccctgggcttgggcccctttcataaaccccaaataaacttgtaatcttcaccccccaaaggggggggaagaggaggcttatttggaaccataacgtattcaaacaggagggctgcaagggcccccccaaaaaagggccccccccaaaaaaaccagggggaggcccatctccaccccaccatggcaggcccaaaaccccgaccagggttaatgcttcccccataaaacggccccccagaaaggatgtttgccccaacaccaaacccaagggctaag

SEQ ID NO: 33908 - DNA, 266 bp, Glycine max
  unsure (1)..(266): unsure at all n locations
  Clone ID: PAT_MRT3847_130622C.1
gtttgttgttgtaactcgttcttcttcttttgttgttctgtgtttgtgtnagtntttnctctcacctgaaaatgtctgctgcggtggtaactgtggttgcggaagctccctgcaagtgcggcaagggctncggaggcngcaagatgtaccnagnntgnncnacactgagtcaaacccaccaccganaacttggtangggaatggcnccnggtnaaggcncaanttgaggtgctgaaatgggtgnanccccntaanaananggctna

SEQ ID NO: 33909 - DNA, 237 bp, Glycine max
  Clone ID: PAT_MRT3847_130623C.1
agaaacaacatcattggtatataaaatggaggggggtatattcatgcataatttacttttcccaatttcatggggaaaaggggaccaaggtgggaattcaagactttcttggccaaaaaaattaattgggccccgttttacccaccggccccatccaaggaaattaattccctggccaagaaaaaggatgggtcaacacaacaattggcatttttttcccaaaaacctgggaaattt

SEQ ID NO: 33910 - DNA, 159 bp, Glycine max
  Clone ID: PAT_MRT3847_130624C.1
ggtgatgatgatgcttttgagtattatggcaattttgctaggaagtttgggttctctattaggaaggaaagatctagaattagccctcattggggatttacaagcgtgattttgtttgttaccggtctggctttgccccgggaagaaaagcctatggag

SEQ ID NO: 33911 - DNA, 135 bp, Glycine max
  Clone ID: PAT_MRT3847_130625C.1
gttgctaagaagacgacagaggggggcggctgctagaagccatcagaagggtacggcttttagaaggcgtcagaaggggacacacagcctggtctattctatagcgcaacatctgctacccacttgataattcca

SEQ ID NO: 33912 - DNA, 318 bp, Glycine max
  Clone ID: PAT_MRT3847_130626C.1
ctcacgcgttctctctgcttgggttgcagctcagcttctagtacatctaatgatggagggaaaggaaaagggtcacgtcaaggttgacattattgtccatgttaacggtcataaggactctaccactggcaatatcacttaccacctgatctacattctcaaacgcattatcgagagagttattgagagatctgataagatgaacactaagactaacaagaatgccttcaagcatgactagctgcttgctaagcttaaagcaggactcacaagaggtatcaccttggataatgcctagaccaccattgactattgcac

SEQ ID NO: 33913 - DNA, 402 bp, Glycine max
  Clone ID: PAT_MRT3847_130627C.1
cgggttgggtttgtctttttttttttttttttttttttttttttaaaaaaaacacacacttcacacgtggttcccacattaaaaaaagggggggaaatttccaaataggcaaaccttccccaacaggagggtcttccccaattttcttttttgtttttccccagcgggggtgcgaaaaaaaactttattcccaaatcatgcagaggatcccccattttaaaaaaatccggcagtctcctggggaacaaaaaaagctggcgtaaaattcttccccccagttgcaaaatcttgagaaacccccaaaaaaatatcaaaagccgtagactgtgtggaattgtcaataaggaaacctcccagcccctgagatttggcttgcccactccaacctccccatttaaaaac

SEQ ID NO: 33914 - DNA, 412 bp, Glycine max
  Clone ID: PAT_MRT3847_130628C.1
cttcattaactattttggggttaacctttttggtgtggcttttgttttaaaagaacacacacttgacacatggttacactactaaagaggggggggggaattttacaaaacgcggggcatactcaacaagagggtgatgcctaaattcctttattggattcatcaaacgacccggggaagaaaaacactgattccatgcccaggagaggattccgcattttcaaaagagctggcaacagcctgggtaacaaaaaaagctggcttaaagatattcccatgatttgtaaaaaggtgagaaactgccaggagagaataacaaactgcaaactggttgggtttgccaatgcgggacctcacatgccacgagacttgggctccccactctgaacttcacatggcaaaaccagttttg

SEQ ID NO: 33915 - DNA, 343 bp, Glycine max
  Clone ID: PAT_MRT3847_130629C.1
aaaaaaaaaaaatttttggttacccccaatttttatttggcacacaggggcaatactccaagggtcaattaacttggtaatacggaaaccgcgctgggtgaggccaaccaaagatcgcgggtggtaattaattaattaattaattaaggaacttgcttttgaaacatgcatgttttgatccaactttttaacaaagggtttaatgacttgggttgggcagcaaatcaaaaccaaaattcctttttcacccttgggattctgactcggcacatgaaagttccccgcagggaaagccccagccccaggaactggcatttcaccatacagggcattcccccaacca

SEQ ID NO: 33916 - DNA, 358 bp, Glycine max
  Clone ID: PAT_MRT3847_13062C.1
aactcggaattaggaactagcaaaaaaaccacaaacacacttaagattcattgaataaacactctcacgctgaggctagtagtgccttcatgaaagggaacaaacaaacccacctcaccacactaacgtcaccacccaatatataggcacccgagataaaacaacatggccatttccataagaaccacccccaaagcctcaatatagatctaacaaaaaaagaaaccccaccaactcggaactacaagcaacgtttcaaaggattcaaacactatccatcaaaagacgaacaaggcctaattgctcacaaaccacccgtggtgaccgtttttcctcaacaccagcagaatcaccacac

SEQ ID NO: 33917 - DNA, 434 bp, Glycine max
  Clone ID: PAT_MRT3847_130630C.1
ggctcgagagggaaacgaacatgtaagatatgtccacaaatacttgactggaacaaggctccaactctgcttgatgcacttggccagattagagagcccgagaggccctttgacaagccggtgaggcttcccctgaaggatgtgtacacgagtggatgtatcggaactgtgccagtgggacgtgtcgagaccggcgtattgaagcctggaatggtggtgacttttgcaccagctggactgacaactgaagacaagtctgtggagaggcaccatgaatctgttacagaggcacatactggtgacaatgagggattcaatgttaagaaatggagctgttaaagatttgcagcgtggttatgttgcctcatctcaaaggatgacccttgaaaggaggctgctaacttcacagcccacgtcatcatcatgaaccaccc

SEQ ID NO: 33918 - DNA, 1097 bp, Glycine max
  Clone ID: PAT_MRT3847_130631C.1
ggctcgagatctgaagaagctgctcaaagtagtgcctgtacatgcttgtgggtggtgcagtgaaatccatgtaggacctgttggacatccattcaagtcatgtaaaggcacacaggccaacatccgcaagggcctccacgaatggacgaatgcacatgttgaagacatattaattccaattgaagcttatcacctctttgatcgtcttggaaagcggattactcatgaagagagattctctatccctcgaattccagcagtggttgagctctgcattcaagccggtgttgaaattccagagtttcccaccaaaaggagaagaaagcctatcatccgtattgggaggaaggaattcatcgatgctgatgaaagtgacctaccagataaaatctcagagggccctttaaaaccattactagctgaaatacctgattaattaagtatagtccctcttgccgaggaaactctccaagcatggaacgggtgaggaaaggtgcgaagagactaatgaggatgtacaatgtgagggtgtgtggatattgccctgaaattcatgttggtgcccagggtctcaaagctaaaaactgtgaagcccataaacaccaacaacgcaatgggcagcatggttggcagtctgcagttctggatgatttgatccctccaagatttgtatggcatgttcctgatgtaaatgcactgctagaacgagagcttaggaattcttatggccaggcgcatgtagaagtggaaatgtgcattcaggctggtgctgccttaccagaacagtataaatcgaccatgcggctggatgtggggatcccatcaactttgaaagaagctgacatggtagtttgagattaatttcccttatagacaaaccccaacttttgaatatagtgtaaattgtgtcaaactggatgcaatgataatttactgatttatttagggactagaataagcatcactttggttagttctatttgggggtatatatgccatctagacaaacgctgtcattttctatcctctgcatgcaggcaaaagatatataaaattgtcagtgtaagattgatgttgtaaaaattattattcaagct

SEQ ID NO: 33919 - DNA, 410 bp, Glycine max
  Clone ID: PAT_MRT3847_130632C.1
caagattcatctatgtaaacgtttatggtatcatgcaaaatatcataagcaacccatcgtcctttggtgtcagagtcacaaatgttgggtgctgtagggtagcaagcaacaacggtcaaagtacatgtgtgcccctgcaaaccccatgcttgaacaggaacgagtacctgtattgggatgcatctaatccaacagagaccgccaatactatcattgctaggagagcttacaatgctcaatctacatcggatgctttccctattgatattaatcgcttagctcagatctaaatagggtctagtagtggcaataagctctagtagttgcaataagcggtgccataataacagtgactgactgtaatgtgtaatttttggagaagaaaatgatattttttaattgagtttaac

SEQ ID NO: 33920 - DNA, 989 bp, Glycine max
  Clone ID: PAT_MRT3847_130633C.1
gcgtgcggtgttggtgccggtgcaggaagagagggcttgttggtggatccgattcagaaaaaatgggttcaaacccgtcgtttgtcccggagatcggatccgatggtcttcccagacaatcttccgttatcacttacaccgaacagataatcgaagcagaacagcttcaattgaagaagtacattcaagaaaactatactaaaattcgtgatgtggagcgtgagcttgcaaatcttggattagagatgaagcttacatctggaccaaagaaagcagcgctggaacatatgagaaagaagatagaggcatcaaccgagaaaattcgtgtggcaaagatacaggaagaacaggcacgcaaggtgtgggaatcagcatcaaaaacagtgcaagaagaagaggcaataaagcagaagttatgtgaagacttaagcaaactggatggaagatcaagttctctggatagtgcaatccaaggaggatcggctgggaatgttccataccaaaataatggtctgaaagttccagtgaccaatgagcataaaccacagcctcctagtgaagaaggaagaaataaaaagaaagttaactatcaaagaggaaaaggaattggcgcggtgcccaaaactaggtcttcaactcctgactggactggtgctggctttgatgtagatggcagaacctgagagtagtatggtaatacgttactgcactaaatacatttttggctgagaagtcattagggtctgcacaagttgacacagaatgacagaccagataatttatttgtgctagactgcttgtacaaacttgtgaataggatattttcatatggaagatcagatcaattcatcaagacatctctagaaggtgcagtgcgtgtttggttcaaaagcttccgaagaaaacttaaaaaaatatatattttttttcaactttaatctttaccagacatggtggaagaaactaatttccactttgaccataagaga

SEQ ID NO: 33921 - DNA, 353 bp, Glycine max
  Clone ID: PAT_MRT3847_130634C.1
gaaaaagcaaaccaagcaaaaattgaacacaaatttaaaggtgccatttaaaaagcaaaccaacaacgcagggggaaagccctaaaactcggtgggcttaacaaaaatggaatggggggttctcacaaaccccccccttttaaacaaaatgataaagggggttttgccaccgtgaataaaaaacccaattttgggaacaaaagttgcaaaatgaggggggaaacttaaaactatggccgaaaaacaagcttcctaaaaacgaaaacccaggggcaagaaaccaacttttattgtaaccataaaaaacgacctcccctgttgaaccaaaccgcgcgatttatttttttttttgg

SEQ ID NO: 33922 - DNA, 468 bp, Glycine max
  Clone ID: PAT_MRT3847_130635C.1
cccgccctttttttttttttttttttttttgaaggaccaaaataatatttaatcatttttttatcaattgtattcgtaagtagaaatttggtacaaattgaatgggtgtggttaaaataacacgtaaaacccaaatgttgaacggaaatgaaccgataacaatcgaactacaaactaatcatatggtcaaagtggaaattagtttcttccaccatgtctggtaaagattaaagttgaaaaaaaaaatatatatttttttaagttttcttcggaagcttttgaaccaaacacgcactgcaccttctagagatgtcttgatgaattgatctgatcttccatatgaaaatatcctattcacaagtttgtacaagcagtctagcacaaataaattatctggtctgtcattctgtgtcaacttgtgcagaccctaatgacttctcagccaaaaatgtatttagtgcagtaacg

SEQ ID NO: 33923 - DNA, 1086 bp, Glycine max
  Clone ID: PAT_MRT3847_130636C.1
ccacgcgtccgcttgttggtggatccgattcagaaaaaatgggttcaaacccgtcgtttgtcccggagatcggatccgatggtcttcccagacaatcttccgttatcacttacaccgaacagataatcgaagcagaacagcttcaattgaagaagtacattcaagaaaactatactaaaattcgtgatgtggagcgtgagcttgcaaatcttggattagagatgaagcttacatctggaccaaagaaagcagcgctggaacatatgagaaagaagatagaggcatcaaccgagaaaattcgtgtggcaaagatacaggaagaacaggcacgcaaggtgtgggaatcagcatcaaaaacagtgcaagaagaagaggcaataaagcagaagttatgtgaagacttaagcaaactggtcgaagagagcaataactctcagttgtctaggctggaggatttaaaaagacgattagaagctatgaatccgaatcgaagttcaactagtctgcatagtgatggaagatcaagttctctggatagtgcaatccaaggaggatcggctgggaatgttccataccaaaataatggtctgaaagttccagtgaccaatgagcataaaccacagcctcctagtgaagaaggaagaaataaaaagaaagttaactatcaaagaggaaaaggaattggcgcggtgcccaaaactaggtcttcaactcctgactggactggtgctggctttgatgtagatggcagaacctgagagtagtatggtaatacgttactgcactaaatacatttttggctgagaagtcattagggtctgcacaaggtaataacatctttcaattttccattctttatacccattaacaaggaagtgtcaattccccccaatttttgtgacagttttttgacagttgacacagaatgacagaccagataatttatttgtgctagactgcttgtacaaacttgtgaataggatattttcatatggaagatcagatcaattcatcaaggtagattcgtccttctgactttctgagtatgcaagctgagacctcaatttgatttctttgttttgaact

SEQ ID NO: 33924 - DNA, 595 bp, Glycine max
  Clone ID: PAT_MRT3847_130637C.1
tcctctagagcggccgcttttttttttttttttttttttttttttttgggacaatattaacttttaactcggtctcaaggaggaggggacactaacaaaatttacgagtatagaaaggttccctgaaccttacaaataaaccttaggcttaaaagttaaaagcctgaaacatatgcctatgaaccagccccatggaaaaggatcaactagtagggacttcataactagacagatcatgaactatgaaaaatcttaaacgttctccgaccatgggtattcacaaaacatagccttaccaagaggaagagacccctctaatattgcgatcttgtcacggtaaaccagaaaatgctggctcaccaaaacgatgacggagaataaaaacaccagcgatggcctctgttgtcctatgaacccatagaagcacacccagaaaattggcacagattgattgcaaaaacatccctgccttatttggcttctgaaccagaaaaccactggatgaatggaacaacgcttcagcgtgctacactaattctcataaactttatctttgtctgaggcatgtattttattaaagaaccccaaacttggc

SEQ ID NO: 33925 - DNA, 1895 bp, Glycine max
  Clone ID: PAT_MRT3847_130638C.1
tttttcttttttttgattcaaaggttcacatcgcagtacatttgcctgattaacataaacattatcatacaaagagcatcaatcattaagcttaacaactttattcaaaaaaataacaagcagcgtgtacaagagatcattattaacttactgtggcacctaatttctgtgtttaaaagtgtctatctgattgtatcaagctgacttcatgaaatagagattaacaatccatttgctgcagtcacttcttaagcagcattttttgattcaagtgttctgtgaataataattgcactctactttctataaaaacttcgatcaactaatgaatccaacacttcgacacgtacagaagaaagaatatttttcatggagatccctcatttccatttgtgaggcatgatatcagggtgaagtcccaaaacatgctctggcataaaatcatggcgtgttagaatcccaacaactggaggtctcccttggctctttggaacaacacacatgtgcctgagtccatgttgtcggaaaagaatagcagctttggctagtgacattgtctcaaccacagtgtaaggagatgcattagttatgggatggagatcaacatacatatccatctcttcctcttggatatcaagatcctctagtttgatcccctttcctgatcccgcctttccaaaatccaaagtagaaattctttggaagatcctttgatttgcaaaacccctatcccttgaaaaaatcttctccttcagtaacactagtaaatgagacctcagtacaagtccacataactctggtgaatctgagaaaggtggttcatcaatgacaggaaacccattatgtcctgtagtattcaaagcttgcaatatatttgcaaccttttcgatgccagaaaacgttatcaatggaccggaaacaacatcgcgtgttactaaattcctcatgtaaggttctgcatgagcctccaaataaggaagtcctttgatcttaagtatttgatcatagacacccttgttgaagctgtctgccacagtttttgagactaataagaccaacattacaagtggaagtaacaagagatcattagtgagctcaagcaatatgacacaaatagacactgtcattctcatggtgccaccaaggaaggaagcagctccaagtaaggcaaagagtcctctgtcgagttcggtaatcgtttcgaagagccggccgaagagacggccataggcagcaccagcaagtatgacaggaatgaagagcccggatggaatagcaatgccataagtgattatcccaagacagtaaatagtagcaaagtagataaacaaactggtaatatgaaactctttgattatcctggggctaaatagattgcgaatagcatcatcattggtgtttagaaacagggaagcaagatcattgtagtagcctggtgggcattgaaagcttttgtagtctccagactcatcaacagagggacaaatcactgttgaattagaaggacagcgaatgcactttgcaatccatggcaagaaataataacaacatgatgtcaaaagagcaattgtgacaacaagagagattttggaaaatgcaccttttccattgatgatgctatatgtccgaacaaccttatccacaaggtaattatatatgcttccaagaattccagcaatggctcccaaaagtagcactgcaaatatcccactagcactatatgttatattggctgaactaacgtcatacattatcagaccaccttccccaaatagcccacatttccctgtggcacaaaactgaattgcaactcttaaaacaatagctaccactgctgttgtgaaaaaagtcctccaaagaagagcactccgccaccatgaagctgctcttcaagg

SEQ ID NO: 33926 - DNA, 339 bp, Glycine max
  unsure (1)..(339): unsure at all n locations
  Clone ID: PAT_MRT3847_130639C.1
tttggggaaagctttttttttttttttttacttttttttttttttttttttttttttttttttttttttttttgggccaaaaaaagaataataatttgtgaccaatttggggtaaaagcaaattactgggccaccggaacttttattnnnttgtaacctgaagaanggggtgtnanaanaaacaaaggcgaaggggggtgaaaacattccaaaaaggggggggggggggtagccatttttggacttgaaaggggggggaaaaaagggggggggggaaaaaaaacaacactggcccgggtgggaagggggggaaaaaaagggtgtacaacgggggggggg

SEQ ID NO: 33927 - DNA, 309 bp, Glycine max
  Clone ID: PAT_MRT3847_13063C.1
ggcgcacccgcctaatgatcttttggcatgtgctcgcctgaaggagatagaagtatgacacctacaagcatgactgcattcccaactctaggacctagcatggtcataaaatcaactacccttcttacaagctaccctgcctagctacaagagagggggtagctattaggggctatgctaatttacaacttgccaaagaaaaccgaacttggatgccttttcttgttgaccacacagaaaatcttccttattgacaatggaaatgatctccttatcccacaagcatagtggctgcattgaacattgcat

SEQ ID NO: 33928 - DNA, 421 bp, Glycine max
  Clone ID: PAT_MRT3847_130640C.1
aggatatcttgatcttctgtcttgtactctcttctcttctataaaatgcttttataatttttatattactactagttggggtgttcaacgggcgggttcgggcggatttcggtttaaaatatccaatccacacaaactgaaccatctaatatcttggcccatctccgaccgcactttccattggataaggtgggttacaggtttgcaggtcatgggtcgaaacgggtggattgaatcgatttcaacatctatttgcactcgtattctatgcttcgaatgtcatcttccttgcaaaagatcgtactggttcaagtcggcattaagagttccttatgtatgtggccggactcatcatcgttggtggtgcgaattttagcacctaaactcttacagaaaacaaaaagaagaaaggtgaaagatt

SEQ ID NO: 33929 - DNA, 379 bp, Glycine max
  Clone ID: PAT_MRT3847_130641C.1
gtttgctctgttgttttctcagcagttaccctagaagacactattagtattggaagtcttgcaggcatgtttctcatgttcactgggctctacttggttctttgggccaaaggaaaagaaggacacgcaggtggagatggcttagagtaatcttgaaacagctgttccctttgacgtattggtgacacagaattcccaagagcacattgtagaaagacagaggtctcttgggtttgaagcaatgactcatgagtcatgacaccgttgttgtttttctttcttctttataaaatctctaggtcatatatatataggtgcgacattttaagatgcaagtgaagcaaaatttaacccctggctaggtacaagcaaaaaaata

SEQ ID NO: 33930 - DNA, 230 bp, Glycine max
  Clone ID: PAT_MRT3847_130642C.1
gttacgctgtgattgtcgtgggtgattatacagccctatcatgaggttaccaggcagcgcgcgagtggtcagatgaacaggatgcgtgtgccattgcaggaataagcaccttgattggctgtatgacaccttgctacacacagaaagagttgaagtgtattaacaaggtggaccaaagttgatgacaaatatagggatctgtgttactaacgagttgattgagcatgacc

SEQ ID NO: 33931 - DNA, 467 bp, Glycine max
  unsure (1)..(467): unsure at all n locations
  Clone ID: PAT_MRT3847_130643C.1
ctgtttgagcatttttgttttatagcaaatactatctttcaggcgaaaaacggaagtgctatcggaaccgacactgcaactgagaaacatacgcgaaaaaatacatataaggcggggcccattaacagtagtgcaacatgcacgaccatgacctgtgacaaaacatacagagactatactttcagtagctaagttcacagaagaaaaaagatattgctaattgctgaaaaaagaagtggatgaagcaaattctatggtgatcttcagatatcaagagaggagttatgtgttgctgttggncatgactctagtgaatgtaacagaacagcaggtgaaagtgtgaatcaagatgcaaggggttaaaaaacatcgagctctaaagggcaaacacccatggcgggaaggtctggacagagataatacttcttattgcacttgcgataccgacagactaaatgacagggagg

SEQ ID NO: 33932 - DNA, 350 bp, Glycine max
  Clone ID: PAT_MRT3847_130644C.1
ccagaagtgactagtggtggaattgcattgaagatctttgcgtcggtgttgctagaaggtcgggctgcaggtaagataacgtctgctaaaggagatgaagaaattggccttaaagttcggttaagagtccaaaagatcatgggttcaaggccatacaaaatagctgaatttgaaattatatttggagagggtatcagtaaggtcggatgcattttagattgtgccgaaatgacggatattgtctcaaagaaaggctcttggtacagctatggagatcatcggatgggacaatgaacggacaaagcaatacaggacttaaaagagaatacacatcttttagaagaaattga

SEQ ID NO: 33933 - DNA, 394 bp, Glycine max
  Clone ID: PAT_MRT3847_130645C.1
tttgtgggttttacatttgtttacatacatagatttgtgagggtgatccgcgctgataagagaggtttttatcgccgcgggggcggcggcggcgctgtgcttcgcggccctggtggccgtggccgtccgccaaggcgaggtcgacccgcctaggctcacggacctgcggtgctggcaggaggttccaggacatcccgctcgacgcgtgccgcccggtccttgactcgtatttaacccgcggcggaagcagcggccgccttggcccataccggtggggcaccgggctccggatgcggtgcctcctttgctcccagacgggagccgcgagtgcccctgcgccgccgtcccgagcatgatcttgggatacgaggaggccttgccccccgtggaaaaa

SEQ ID NO: 33934 - DNA, 207 bp, Glycine max
  unsure (1)..(207): unsure at all n locations
  Clone ID: PAT_MRT3847_130646C.1
aancnnnnnaccggnngaccctcaagctaatgcagtcatgtgaaattttcactgctaaaaaaaaaaaaaaaagggcggccgccgantaatganctcgtcgacccggganttaatnccggaccggnacctgcaggngtaccagntttcccnanagtgagtcgtattanancttggngtaatcatggtcanancgttncctgtgnnaaa

SEQ ID NO: 33935 - DNA, 181 bp, Glycine max
  Clone ID: PAT_MRT3847_130647C.1
gttggtttcctgaagcgcacccctgtgaataacaggtggcttttcatggatgtctctagtcagagaaaaatgataaaggcttaaattgaggattaacagaagcagattaacctcagaaatcctgtctggctggcagatttcaagtaaaaaaaaaaaaaaggtgggttggggggaccctttt

SEQ ID NO: 33936 - DNA, 314 bp, Glycine max
  Clone ID: PAT_MRT3847_130648C.1
aaatataaggacccagtcatcgtacattgcaatgcgccatatatacgtgattactggattacagtactaacatgcacatgcatacgggaactaattagccaaatatttgacactcttacagctattatgacgatgagtcaccacaaggtcattggcgaatgtactcaaaatcacattcttaatgctaatacgaacaaggcgtagagctactggaagctgatgctccttactaggaaaaaccactggcttaccaaacccaagtgctgagaccattcatttgttgaactagcaagaccctaagttacctgtagacc

SEQ ID NO: 33937 - DNA, 184 bp, Glycine max
  Clone ID: PAT_MRT3847_130649C.1
acaatgctgtgatcattgcatgtgcacacactatatgcctcctgagggcacttgttaacatattgcggtgttttcgtgccactgatattgtcagagctgattgatcgcacgctcacggcctggacagtgttattgtcttaactccaacgactactgttactaatgttgcaggtacatagatgac

SEQ ID NO: 33938 - DNA, 341 bp, Glycine max
  Clone ID: PAT_MRT3847_13064C.1
cctacccagcaccagcttctctttatttaacaaaacctaaccatttaattcaaattaaaaagaaggagggaagaaaaccgactatttaagtatttacccggcccccccttttaattactctatcatcaaaacaaaacattattctctcatttttttttttctttccaaaaaaaaaaaaaaaaccctttagccccccccccgttagccccactatcattctcgaactcgttcacataatggaaagcaaaattggggttggggttgttgcccccgctaccgtaaccataaattccgctgggttcatgcccatgttcggggacatgaacaccggttctaacggg

SEQ ID NO: 33939 - DNA, 671 bp, Glycine max
  Clone ID: PAT_MRT3847_130650C.1
attggagtaatctaagatgttattttcgaatggtatcacattctcaatattcagtgatattaatctcagtttgtggtaaagatgaccaatgtaattgactaggtagggatccttagctgactcgtgaattaggaaagttatgcagatattttttaattattagaaattgtaataagtaataccttaaaaatgttgaaaatatcatcacgtgggtctttaggaattgcttcttcaatttcctttattgttggaagatgtgttttattgctattaactaggtctataggaatttgttagtggttacctgatctataggagggtatgtgtcttttctttttgttttgcatgttcagatgagtgcttagtttggtgtttgaacatagagctgtaatgcctatatataatctgttatattgatgaataaagtgttagttaatccagaatttcttcttacatttaatagattctttacttaattttttatcagtggtatctaagctagagagtgataattgggtgaaaaacaggagagggcgagccaagagagaaggagttcgtgagacactgctgccaagagtgaatttaaataggagagattgagtgagtcaaaagatatggagaatatgtcagatataaaagtagagcagtagctttgttccttttttttggct

SEQ ID NO: 33940 - DNA, 322 bp, Glycine max
  Clone ID: PAT_MRT3847_130651C.1
cggattacgacttttctgtgcttgcgcagttggtccatccggttgccgaaagggaagtgggttaacattcccacgccaggctagggaaatgacggttcgcaagagctgttttgcgcggtaacgcaaatgaactcgcagacgtcatgtggagtccgagccagagttctcttttctggtttagggtgtgcgcgcctggaagtggctcatcctgagatagggatgttagactcgctatgcaccacggttcttgtggaggtttgtgcactatacacggtcctttaaaatgagaggcaagctcttagaatgctctgcctgagaatac

SEQ ID NO: 33941 - DNA, 314 bp, Glycine max
  Clone ID: PAT_MRT3847_130652C.1
tattgaaatctgattgaaacaagggcttacactttgattaaccttacgtcataggaaaccacacgttcgattttacaattttttatgagcaggaatgctacacccaatttgttgttttgtgtgacataccagtaaaggttgattgaaaattccacactttggctatcgcactcatatcacgtgggccaaagctggaaacaaataaaaaagccttgttgtaattgaactttttgctcttcacccttcccagtgagaaagatgcgaactatttgtgggacctgcaacttcgtgacatttcttccatggatccaaca

SEQ ID NO: 33942 - DNA, 337 bp, Glycine max
  unsure (1)..(337): unsure at all n locations
  Clone ID: PAT_MRT3847_130653C.1
aactagcaaganagcagaatccatatgacttcactcttctctcttgcgttaatgtgtgtttcggtgtgctaagatgataccttctntntctatctgtctctcgtgttattctcnatagcttttccaaaaaatagaatttcgtgcaggtatttcacgtgaaggcaattctttgccatgagataagttcnatcataatggacaaaaatgagncataacaaatgtcacttgatttttccatttttggattaaaacccctccaaatacacctacaattatcngagaatgagaatgattgatgtatctacgtcgcatgcagantcgcagcaagaagcaaaga

SEQ ID NO: 33943 - DNA, 388 bp, Glycine max
  Clone ID: PAT_MRT3847_130654C.1
gccagcgctctagagcatgtggcaactgatgataataaaactgatggatcatacaaagttcatgactgtcactggacctgaccctaacttattggacatcctaggccaaagctgtccacactgtcagaaacttgaatcgagagacctgacaaggcagccttcgccatggctctcgtctcctaggctactacgtctgacgagatcaggtatgtaagcgtcgacctctgatgaatctgtgctactgatcgttgtgagtctacaggaagacagaagtggtccacaatgcctcccttctgggagatgtgcactttgggacaagctgctacatgaaggctgggtgcgtgctcatacgtgatgatgaccgccttactattaggatctggagcta

SEQ ID NO: 33944 - DNA, 434 bp, Glycine max
  Clone ID: PAT_MRT3847_130655C.1
tttcgtggcatgatagtttgcgacttctgggggcgtggtctctttctgagttagagaaaaacaccaaaaccacaaatactaccatcatggagctgagtttggatttgagtttaggctttgttcccaaacctctttccctgtttttcgccgacgtttctgcgaacagagacaaagtggccacactcgatggcttcgtgcagagattggaggaagaattgaaaaaggtcgaggctttcaaacgtgagcttcctctctgcattcttctcctaaacgatgctatagctagattgaaggaggaaaaagtgaagtggtcgggaatgcaagatccgccactgaaaaccaggtctggaggaaacaaaaatgaaagctctgagaagatgaattggatgagttcagcgcaactttggagcactcagaaaaccaaatcgagaaat

SEQ ID NO: 33945 - DNA, 480 bp, Glycine max
  Clone ID: PAT_MRT3847_130656C.1
ggctcgagcggcggctgcaacgattataacgggggggactccgtcattggctacgcgggcaccaggggtgtccgctcgcgcgtgttgacttcaccggggcggtctttaacgtgctcaacgccattgttggagcgtacagcgagaatttgccgttgatttgcattgcgggtgggcccaacttcaacgactacgggacctgtcggatcctgcaccacaccatggggttacccgatttcaggcaggagttgaggtgcttccagaccattacttgctttcaggctgcggagactaacttgaaagaggctcatgagtcgtttgatacagcattttcaactgcgctgaaagagagcatgccggtgtttataagcatgagctgacacttgcctgggatttcttaccccacttttgagcgtgatcctgttcctttttctaacctccaagattgagttacatgatggggctggaggctgtagtggatgc

SEQ ID NO: 33946 - DNA, 265 bp, Glycine max
  Clone ID: PAT_MRT3847_130657C.1
tgatgatttgtgttttcttcatgtccaagaagtgttttcaactaagattttcagttacaaaactcagaaagtcattcttatgtatgaactcactttctctgattatcaatgttctctgtaatatcgcaacataaatgtttttaatacctgtttttgtcacacttttttccttccaattgaatgtacctgaaaagcagagaattcagttgtgcatcagttccaatatttcaacagcctctttcagtttttcatattaattgcatga

SEQ ID NO: 33947 - DNA, 412 bp, Glycine max
  Clone ID: PAT_MRT3847_130658C.1
ggaaattgcagactttattcatcgaatgagtataccataacaaattttgcaaggaaaataagggtgaatgaatacacagaagtaacgaaaagcttgcatagttaaaggctcttttcttctttttggctaataaaaagttcaaaattgaggattttgaaggaaatcactagcttgagagacaatgaagatatgaatcatccacaaacaagaatttccaatattcaaacctaagctatgttgtcatgaacagacaaatcttcacgtcgttttggcgcctttgtcagctttgaaatcagttgtggagcttattgatcgatttgggcaaggccgttgtcattgcgctccagatttcgtttaatactaatttatttattggtaattttttaatgacgtgtcagtattttattatgtt

SEQ ID NO: 33948 - DNA, 333 bp, Glycine max
  Clone ID: PAT_MRT3847_130659C.1
ctccagccgggcgggcttttgaacccggaagccttgtcacccagacaccgcctttgggtgcgacgatcccacgcccctcggtggactcatgcgacacgagggtgcgcctggctgtgctgaggtcctcaatccctaccagcagttggatgatgacatttaattacgtactgaatttcagcatattattagcctactttctaatgtctgttgatgtggagcgctacatcttcattctcatagagccatgctatatatggggatggacccaccctgcggaatcttatcactgcatcaagatctgttctgactccaatacatttaagccgggcgtct

SEQ ID NO: 33949 - DNA, 378 bp, Glycine max
  Clone ID: PAT_MRT3847_13065C.1
ttttaccatccttttcatttttttagaaaaaaaacaccataagtatatttttctttttgcccaggtccagagcttcgaaaattatactttaataggtaccattgataaaaaaaaaatggggggttagatttgacaacaggggtatacagctagggaagtcctaaagatcgaacaactcatctgcgccagtgaaatcttttgggaggacaccagatgcgaaatttttaaggatgtccaaaggctgtaaattgaggaaaactgagctctattggccggaggcttctcacgatcattgatctcgtaggaaattgcaaatgatccttctcctacctatgataggagctgaatgacaaacccgctagagataggacttgggga

SEQ ID NO: 33950 - DNA, 1582 bp, Glycine max
  Clone ID: PAT_MRT3847_130660C.1
gccggcgtttttccgtctgtgcagccctcctcacggttttcagctgacagcttccttggaaattctgtgctatgtcggagattggtgtaggatcaatatgttgcccttatgtaccaaaatcaagagagatgtcttcgagagttgctgttgtatgcctcacgcttggaattatgatattgttggccatggtaattgtagcgttctacagatccagccaatcgaagcgattgaggaaaggatccagcagaactgggcaaggtcctccaaaactggttattcttcacatggatatggctatccacaccttggatgatataatgagaagtactgagaatctcaatgagaaatatatcatagggtatggtgcgtctagcactgtatacaaatgtgttttgaagaattcccgaccaattgcaattaagcgactgtacaaccaacaagcacataatttaagggagtttgagactgaacttgaaacagttgggagcattagacatagaaaccttgtcaccttgcatggatatgctcttactccctatggaaatctccttttctatgactatatggcgaatggctcactgtgggatcttctacatggtcccttgaaggtaaaacttgattgggaaactcgcctgaggattgctgttggagcagcagaaggacttgcatatctccatcatgactgcaacccacgtatagttcacagggacataaagtcttcaaacattctgctggatgagacttttgaggctcatctttctgactttggcactgcaaaatgtatctcaacagcaaaaactcatgcatcgacttatgtccttggaactataggctatattgaccctgagtatgcccgaacatctaggctgaatgaaaaatcagatgtgtatagttttggaatagttctgctggagctacttactgggaagaaggcagtggacaatgagtccaatttgcatcaattgatattgtccaaggcagatagcaacactgtaatggaaactgtggatccagaggtctccataacttgcattgatctggctcatgttaagaagactttccagcttgctttgctttgcacgaaaaagaacccttctgagaggcctactatgcatgaagtagccagggtgttggtatcactacttccttcaccactaagtaaaatccttgcccctcctgcaaagaagttcgactatgcccatttcgtgatcgagaagggacaacaacgaaaagtggaagaacaaaaacctcagcaggataacatcttacccaatgctcaatggtttgttcgttttggggatgttatatccaaaagcacttgacctttcttacccatgtgcctttgaagggttcatgtcagtgacataagttcaatgggtgaaaaaactagtttctttttgtgattagatatatcctttatattatttttacatatagagtatggagcatatggataggggatacaaaacactttactgttagagaacgtttctactgtatatcttacaagcacttgttttcaggcattattatgtcaaatgtttagagcacttacgatgcttcttttgcatgttatgttttt

SEQ ID NO: 33951 - DNA, 911 bp, Glycine max
  Clone ID: PAT_MRT3847_130661C.1
ctgcgagaaacgacagaaggggggaaactcgcctgaggattgctgttggagcagccgaagggcttgcatatctccatcatgactgcaatccacgaatagttcacagagacatcaagtcttcaaatattctgttggatgagaactttgaggcgcatctttctgactttggcacggcaaaatgtatctcaacagcaaaaactcacgcatcaacttatgtccttggaactataggctatattgaccctgagtatgcccgaacatctaggctgaatgaaaaatcagatgtgtatagttttggaatagttctgctggagctacttactgggaagaaggccgtggacaatgagtccaatttgcatcaattgatattgtccaaggcagataacaacactgtaatggaagctgtggatccagaggtctctattacctgcactgatctggctcatgtcaagaagacctttcagcttgctttgctttgcacgaaaaagaacccttctgagaggcctagcatgcatgaagtagccagggtgctggtatcactacttccttcacctccaagtaaaatccttgcccctcctgcaaagaagttcgactatgcgcattttgtgatcgagaagggacaacagagaaaaatggaagaacaaaaacctcagcaggataacaactcatccaatgctcaatggtttgttcgctttggggatgttatctccaagagcacttgacctttcttacctatgtgcctgaaggattcatgtcagtgaaaaaactagtttctttttgtgattagatatcatatatcatttggatagaggttaaagggctttactattataggacgtttctactgtatatcttacaacagttgttttcaagcattgttatggcaaatggttaagagcacttccgatgct

SEQ ID NO: 33952 - DNA, 481 bp, Glycine max
  Clone ID: PAT_MRT3847_130662C.1
gccagtgtgtcaccaccatggccaccgtcacatcccaagcctgcgactcgattttaccgccatgtgcctcaaattcgagggttctgaccggctcttcccgttaacctcaccgtgaagtgactataaagccactgtggcgcccttcttctgcctctttctaggtggaagcctatatgggagcagtggctacctggcttggcctacacaacttacctcaatggcactcttgctggtgacaacggattgaaccctctgggactagctgaagacccagagaacttgatgaggcacggtcaatccgatcttgggaatggacatcaggccttgttaggtgccgcaagattgctacttcctgaggtttgcaccatatatcgagatcatcaatgccactctatgatatgatgctgggaactcggagtactttgatgtatcgtcgaacctgttgaggatcagatgcatgttgttccactacgctcgagat

SEQ ID NO: 33953 - DNA, 932 bp, Glycine max
  Clone ID: PAT_MRT3847_130663C.1
ccacgcgtccggttggcggtgataatgaggttcagcgcactatgcttgaaattgtgaatcagcttgatgggtttgatgctcgtggaaacatcaaagtcttgatggcaactaacaggcctgacactctggatccagcactactacgacctggacgattggatcgtaaagttgaatttggccttcctgatttagagagtaggactcagatattcaagatacacacaagaaccatgaactgtgaaagggatatccgctttgaacttttagctcggctttgcccaaattctactggagccgatataaggagcgtttgcactgaagctggtatgtatgctattcgagccagaaggaagaccgtgacagagaaagacttccttgacgcagttaataaagtcatcaaaggataccagaagttcagtgcaactcccaagtatatggtttataactgagtaattctttcctctatttcccagaaactatattagcggttaccagtgaaaatttaagggcgcatgtttctttcaattagcagtttctgaaattcgtttgtttgaatgttgaccccaaaatatctaccaaacgtcttcaaattgttacatccaaagtgtgtctcattgcttttattaacaataccaagagtaacgtttaagcagttgcgttctttgaaagaaaaaaaaaaaaaatatcctcgtattgtcatttgcatggagaaattgattaggatggatataaggaaaattgatttaagttgttagatgaaaatggttattgtgaaaataagaccaatataaattactagatgttatttgtatataaacccatcaatgtttataataaacacccaaaaaaagggcgcccgccgactaaacgatcgtcgaccagggaattaattcaggacgggtacccgcctgggtcgagcttctaccatatag

SEQ ID NO: 33954 - DNA, 101 bp, Glycine max
  Clone ID: PAT_MRT3847_130664C.1
gctcaggtccaggttgctaccaactattccatatgctccgcccacatgacgatggatgggaagatcgatagtcaagtcattcgtatcttaacttgacacgc

SEQ ID NO: 33955 - DNA, 579 bp, Glycine max
  Clone ID: PAT_MRT3847_130665C.1
catgaactgcgaaagggatatccgatttgaacttctggctcggctttgcccaaattccactggagctgatataaggagtgtatgcacagaagccggtatgtatgctatccgtgcccggaggctcgaggtaacagagaaagacttccttgatgcagtaaataaagtcatcaaaggataccagaagttcagtgcaactcccaagtatatggtctataactgagttattctttcatcttcttttcccgagaccatagtagaacgtacaatctttattttcccctgaaaattgaatggcatgtgattctttctatttaactcctgtttgaatgcatccttgtagcaaacctttccttgatgttacatccaaaattgtgagcaaaaccttcttttagcccttgaagaatatacttattattatcaatggaagttgttcgtcatttgcatggagaaattgattaggatggatataaggaaaattgatttaagttgttagatgaaaatggttattgtgaaaataagaacaatataaattactagatgttatttgaatataaaaagatgaatgttcatgattaaaaa

SEQ ID NO: 33956 - DNA, 365 bp, Glycine max
  unsure (1)..(365): unsure at all n locations
  Clone ID: PAT_MRT3847_130666C.1
ggaacgaaaacaggggcgcccaaaccagggagaagaaaatgaggggcaaacgccaagaccnaacaagggacaaaagacgacgcccgagngcacgaaccaaaaggaagagagacagcaaggggggcccccagacccgacggagaggaaaagaggagcctggaggacaagaaacaggcacaaaaggaacaaccccgagcagaaagccggctggcgcaagcaaggacagctgacggaaggcggaccgcgacaaacgagaccgggcaggacctaagctactacggaaacatggnggaaggacgcggccggtgagcgcaaaaaagcgggggcacgcaagcatgtgagaacaagaccagggaagggggagg

SEQ ID NO: 33957 - DNA, 337 bp, Glycine max
  Clone ID: PAT_MRT3847_130667C.1
atctctaacaaaatgagtgttttatatatcataaaaaaactcatggtccaaataaattgtacctttttagaatcaatacaaaaggaatttgaaaacaaacaatttatggcaaagaattcataacattacatgtataaataataaattcttaattatgcaccactcaagaattattctgtatgtataatgcatacttattgcagaacctttgcattgaattagttcacattcctgcagttaacccgaatttcaccttgattcccagtgaggggctgaatatttcccatcttaatcatcgagttcgcaaagtcctcatagaaatcttcggtatcgtcgc

SEQ ID NO: 33958 - DNA, 1937 bp, Glycine max
  Clone ID: PAT_MRT3847_130668C.1
cggtccggattcccgggtcgacccacgcgtccgcccacgcgtccgaaacacttgaagctgggggtgaaacgttaatgcattccactgggcatcgcttctcctctctcccaagaaagaatcatcaatggcgattgaacacgaagacgatctcaaagacgagaagaaccctcgacctctcgacgaggatgacatcgccctcctcaagacctacggtttgggaccttactccacaagcataaaaaaggcggagaaggaaatcaaagatatggccaagaaagtgaatgacttatgtggtataaaggagtctgatactggtttagctgcaccaagccagtgggatcttgtttctgataagcaaatgatgcaggaggagcagcctcttcaggtggcaaggtgcacaaagattataaacccaaattctgaagatgccaagtatgttatcaatgtgaagcagattgcaaagtttgttgttgggctaggagacaaggtttcccccactgacatagaggaagggatgcgtgttggggttgatagaaataaatatcagattcagattcctttgcctccaaaaattgatccaagtgtgaccatgatgactgttgaagagaagccagatgtaacatataatgatgttggcggttgtaaggagcagattgaaaagatgcgagaagttgttgaacttcccatgcttcatccagagaaatttgtcaagcttgggattgatcctccaaagggtgttctttgttatggccccccaggaactgggaaaacacttttagccagggctgtggctaataggactgatgcttgttttataagggttattggaagtgagctagttcagaaatatgttggtgagggggctaggatggttcgtgaactatttcagatggctcgttcaaagaaggcatgcattgtgttttttgatgaagttgatgcaattggaggtgcacgatttgatgatggcgttggtggtgacaatgaggttcagcgcaccatgcttgaaattgtgaatcagcttgatgggtttgatgctcggggaaacatcaaagttttgatggcaactaataggcctgacactctagatccagcactactgcggcctgggcgattggaccgtaaagttgagtttggccttcctgacttagagagtaggacgcagatattcaagatacacacaagaaccatgaactgcgaaagggatattcgatttgaacttctggctcggctttgcccaaattccactggagctgatataaggagtgtatgcacagaagccggtatgtatgctatccgtgcccggaggaagactgtaacagagaaagacttccttgatgcagtaaataaagtcatcaaaggataccagaagttcagtgcaactcccaagtatatggtctacaactgagttattctttcatcttttcccgagaccatagtagctttatctttattttcccctgaaaattgaagggcatgcgattctttctatttaactcctgtttgaatgcatctttgtctgtagcaaacgtttccttcatgttacatccaaaattgagagcaaaaccttcttttagccttttgaagaatatacttgttatcaatggtagttgttcgttattggggaaaaactattataataaagccaaaatccactgcagctgatttaaggagtgtatgcacagaagccggtatgtatgctatccgtgcccggaggaagactgtaacagagaaagacttccttgatgcagtaaataaagtcatcaaaggataccagaagccctgcgcttttcccaggaatatggtctacaactgagttattctttcatcttttcccgagaccatagtagctttatcttcctttaccagataaagaaaaaaaaaaaaaaaaaaaaaaaaaaaaaataaattctaagatgtaaaaaaaaaaaaaaaggacg

SEQ ID NO: 33959 - DNA, 436 bp, Glycine max
  Clone ID: PAT_MRT3847_130669C.1
ggctcgaggcctatttggatgaggcaaccttatcagatcacagatgaggaatatgctgctttctacaagagacttaccaatgattgtgaatagcttttggctgtacagcacttctctgttgaagactacctggattccaaggcctgtctatctatccactagagggcaccgtttcatctttgtgacactgataaaacccctagcaacatccaactgtatgtacgccgtgttttcgtcatggactcctgtgcggatctgatgccagaatatcttagctttgttaagggtatatgatgattctagggatcttactctcaacattcctagagaaatgctgtagcagaacaagattcatggagtcatcaatgagaacttgcgcaataaatgcattgagatgtactatgaaattgctgagaacacggaatactatagcatg

SEQ ID NO: 33960 - DNA, 361 bp, Glycine max
  Clone ID: PAT_MRT3847_13066C.1
ctcatcagtattgtgggcaatgcccatgtcgactctgagagatgcactaccactggtcacctgcttcacaagcttgaatgcatcgacaatcgtgtcattgaaaggtttgagaaggtagttgatgagatgaacaagaggtctctcaagtttgcctgcgtgctggactaacttagcgctgagcgtgaaagaggaattaccattgatattgctgtgtggaagatcgtaaccacaaagtcttaatgcacattcattgatgcgtctgtacatatggatttgattaataatatgattactgggacataccaatctgactgcgctgatcttatcattggttcgaccactagtcgttttgaagctggta

SEQ ID NO: 33961 - DNA, 264 bp, Glycine max
  Clone ID: PAT_MRT3847_130670C.1
atgaccaaagggggaacaagggcttaaggccgagtaaggcccaacaagagacaacatggagggtcttagggggctttacgagacttacccacatgacattaacagacattaccaaacctagcttttgctcctatcataatagcgcaccttatcacaccttattacgtacaaactggagctaactttatctaaaatgttgagggacgtcaaagtgctactcaagggattacatggcattagggagcttaaagggcctgctttggc

SEQ ID NO: 33962 - DNA, 464 bp, Glycine max
  Clone ID: PAT_MRT3847_130671C.1
acagatcaagaaaataaatacctatgaagaagataaatattccaatagtacgtatttatcatcagacaattttagtaaaatatacttgttctctctcttaattttaatatatgcatcattgaatcttttaagataacattatttatagaaggacaaaattaaaataaatgttttaatatgtcattcaatgagaacatcaatcaatttgaaatatttttcaaagactaaaacttcagtcattttaggacagaaagaatacaactgagactcttaaaggaagtagagctcataaatttttgaaatttccaatatatttcggataataatataggggtataaaaagtgtctcttctggaaaggtggaaatatctttataccataagagatggcacccctctagcccattttttattcattcaagccaatatttattaaatgaagtaatggattttgtaccttgtttt

SEQ ID NO: 33963 - DNA, 1494 bp, Glycine max
  unsure (1)..(1494): unsure at all n locations
  Clone ID: PAT_MRT3847_130672C.1
ttacaacgaggcagacacagaaacagacacgttcagattaaaggtgaagccagggaagacatatcttcttcgtttgatcaatgctgcactcaatgatgaactctttttcagcattgcaaaccacaccttggtaactgttgaagctgatgctacttacgttaaacctttcgagtcagagatcatacgtaatagggccaggacaaacctcaaactttctgttaaagacaaaacctgagtacccaaatgtcaatttcttgatgctagcaagaccatatttcactggcatgggaactttcgacaattccacagttgctggcattcttgagtacaagaaaccgcttgttgctccaaaaaacactattcccactttgaaaccctctcttccagccatcaatgacacttccctcgttgccaacttcagtagtaaattcctcagtttgaacactgacaagtaccctgcaaaggtgcctcaaaccgttgacaagagcttcttcttcacaattggacttggaacaagtccttgccccaaaaaccaaacatgccaaggaccaaacaacagttcaaagtttgcagcctcaatgaacaatatatccttcactcttccttccatagcacttcttcagcaacatttcttcggccaagctaataatggcttttacaccactgatttccctgccatgccactcatgccattcaactacacggggaccccaccgaacaacacaagggtcagtaatggaacaaagactgtggtgataccctttaacacaagggtgcaagtggtgctccaagacactagcattttgggagctgagagccaccctttgcaccttcatggctttaacttctatgttgtgggtcaaggctttgcgagctttaatcctaacactgaccctccaaaattcaaccttgttgaccccgttgaaaggaacactgttggtgtgccctctggtggttgggttgcaatcagattccttgctgacaacccaggtgtttggctaatgcattgccattttgatgtccaccttagttgggggttgaggatggcttggattgttgaggatgggaagctacctaatcagaagttgcctcctccaccagctgatctccccaagtgttgatgattttctggcctactggcatctgcaaattttttccttcatttccacaccatttgattttccaattccaagttaatttccggaattttggtttgcctactatgaaagagtacatgaagagtaatcaccaacattggcgtttcagtttttctttctttgtatcaatctgtcacgttctggatgacttttctatacctccacctaattttctagtgccaataaagtagggggtggctggagttataccatccagaatatcaatgcgttcctccctagctttcaaagtttaataaaaacttaccttggttgnantnaaaaaaaaaaaaaaaaaaaaaaaaaaaaaaaaaaaaaaaaaaaaaaaaaaaaaaaaaaa

SEQ ID NO: 33964 - DNA, 161 bp, Glycine max
  Clone ID: PAT_MRT3847_130673C.1
ggctcgagctccctcacttcacctgcaaccgtgggtcttacccctgaccttggggccgccagacgccccgggattcactattccacttaaccgccgtactgactgtctgtcccagtatcctgcacaccttcttctattcgcatcgaatgactccagtattc

SEQ ID NO: 33965 - DNA, 1037 bp, Glycine max
  Clone ID: PAT_MRT3847_130674C.1
gtgaagagcgcgttaaacagaaaggtgaaccaggaacaaaaacaattacaacaccaacaactaagaacccattaacaggggaaaaagttggcgaaggtgaaccaacagaaaaagtaacaaaacaaccagtagatgaaatcacagaatatggtggcgaagaaatcaagccaggccataaggatgaatttgatccaaatgcaccgaaaggtagccaagaggacgttccaggtaaaccaggagttaaaaatcctgatacaggcgaagtagttactccaccagtggatgatgtgacaaaatatggtccagttgatggagatccgattacgtcaacggaagaaattccgtttgataaaaaacgcgaatttgatccaaacttagcgccaggtacagagaaagtcgttcaaaaaggtgaaccaggaacaaaaacaattacaacaccaacaactaagaacccattaacaggggaaaaagttggtgaaggtgaaccaacagaaaaagtaacaaaacaaccagtggatgagatcgttcattatggtggcgaagaaatcaagccaggccataaggatgaatttgatccaaacgcaccgaaaggtagccaagaggacgttccaggtaaaccaggagttaaaaatcctgatacaggcgaagtagtcacaccaccagtggatgatgtgacaaaatatggtccagttgatggagatccgattacgtcaacggaagaaattccgtttgataaaaaacgcgaatttgatccaaacttagcgccaggtacagagaaagtcgttcaaaaaggtgaaccaggaacaaaaacaattacaacgccaacaactaagaacccattaacaggagaaaaagttggcgaaggtgaaccaacagaaaaaataacaaaacaaccagtggatgagattgttcattatggtggtgaacaaataccacaaggtcataaagatgaatttgatccaaatgcacctgtagatagtaaaactgaagttccaggtaaaccaggagttaaaatgatgaactactgtaccatctga

SEQ ID NO: 33966 - DNA, 417 bp, Glycine max
  Clone ID: PAT_MRT3847_130675C.1
gggtttagcctctcatagccatgagagactttatacttgaaagactaatacaagaaagggatggatgactagtagtaagaaagaaggaatgactaagaaagaggatttcctctaaaggatagacccaggccttggatagatttgagcctcaatatatttttcttttgcttcctcctccttatataggcactatgaagcttaattttcatgctaacttcgtgcttagtgtcggcttttgcgctaagcgcgcctttggacttcattatgggctttttcgcgcgctaagcctgagctgtacgctaagtgcggacacgcgctaagcgagctgtccacttcttcaatttcgcttcaaggctttttcgtctactttttgcctcaatttttcttcaaagcacttgaattcctcatctcttgact

SEQ ID NO: 33967 - DNA, 396 bp, Glycine max
  unsure (1)..(396): unsure at all n locations
  Clone ID: PAT_MRT3847_130676C.1
aacataaatttttatttaaattgtgtacatataaaaagttnnnatttaaaaacatttgattacatttccctaaatattaactccttcacattntaatacatgaccactaaacaacacatttaaaaaatatcaaaatcatcaactcaattgcagccctttcactatttctaatttcaacttttttccacctaacaatcaactaacataacgaaaatactttattaaacaaaattataatataattcacaataatatttccatttcaaataacttacataaatataccacttatttcaaatttaattataatacataaacttttccacatttataaccaaaaaaatctttaataattttaacaaaatatacaccatcctaatttaaaatgcacaaaaa

SEQ ID NO: 33968 - DNA, 292 bp, Glycine max
  Clone ID: PAT_MRT3847_130677C.1
gaccgaagcgttcttacagctgaaaaaagactacataaggggatgcgaattatatatctagacgctggaaattggtcaatggtagctctcgtgcaattcaaatggtcataactttgcactctgatttgcgattcatgctcataatatatcgtgacccttgtaatagatcaactgaagctctcgagcacataaatgatcctaacttttcacttggagttcctattaaggcgcataatatatgtagacgctctaaattgaataacgttggctcttgtgaaatgcatatggtcat

SEQ ID NO: 33969 - DNA, 669 bp, Glycine max
  unsure (1)..(669): unsure at all n locations
  Clone ID: PAT_MRT3847_130678C.1
cccgagcgtccgatcgtgcgttggggcgatgaggcttgatagaaacagagtcgcagttctggaagccagggacggagaggcctcagggtcgcgtggtggacgatgaagaaggcggtgttctcttcttgtccggctctcaccattcctcttcttcttctcgatacggctacgccagcatcgataagcagcgccagcgtttgcctgtgttcaagtaccgcaccgccattctctacctcgtcgagactcgcgccaccactatcatcgtcggcgaaaccggaagtggcaaaaccactcaaattcctcagtacctgaaggaagcaggttgggccgctggtggcagactcattgcttgcactcaacctaggcgacttgccgttcaggctgttgcttccagagttgccgaagaaatgggagtaaaactcggtgaagaggttggctacaccattaggtttgaagatgttaccaaaccggatgtaactgtgctaaagttcttaactgatggagtgctgctaaaggaaatgatgggacgatcctcttttgaccaatacagtgttataatgctggatgaggctcatgaaaggtcaatatcaactgacattntgcttggactattgaaaaagattcaacggcgtcggccaagtttgcggntgattatctcatctgctacta

SEQ ID NO: 33970 - DNA, 576 bp, Glycine max
  Clone ID: PAT_MRT3847_130679C.1
ttacttacacactagtatgacaaactaagaaatagcaatgcatctctcatctagatctcccccatctcaacatgacgtgaatgttgaacaggaatgttttaaagcatgtatgtctgatgaaagatgatgactcctaccacctgagtcttcccaacatagacttgcttcatccttcatggattagtagaagcatgccatggttcgaacctatccatatcacccggacgaaaatgatccccataaaggactatatatctctcgaatatctgttaagcttgtgattgaatccatgacataacatgtgagagattcacgtcattacaccttctacaatgattccaggaccgtcctgacgtagcttcctaacactgctcatcgccatagctctctcattccgagctataatctcccagaagatgtagccaatattactatttgagacgcttcgatacccctagtcatcgtatagctgacatacatcttgatgctatacacgtgtggctttgagcgcacaaatgtgaaccaccaatactctaaatgactggagacacataccgaccacctgtacaattctta

SEQ ID NO: 33971 - DNA, 491 bp, Glycine max
  unsure (1)..(491): unsure at all n locations
  Clone ID: PAT_MRT3847_13067C.1
gccaatagctttagcttatattatagacgtaccacacttattgtatcaagacacaaaccctaatcttcattttcaaccatggactggttctcctggctatccaggaccagcctagagccgtccctcatctacgaatacggccttgccttcgcgcgtaacgagctccagctggaggatgccatctacttcaaccacgagtttctccagagcatgggcgtttccatagccaaacacaggctggaaatcctcaagcttgcgaagaaagaagacggcggggtggtggtgaggagcagcatcaagttttccatcaagaagtgcctgaggaagtgcttcagcaagttggtttcgcgcgaagaccaccacgaagcgatgatcatgttgaaggacatgccgcctgagccaaactggtaccaagggaagtggaggagggcaaggcacaatgggaacaatgaggagctcanaggagagaataataacaacaacaagggagt

SEQ ID NO: 33972 - DNA, 929 bp, Glycine max
  Clone ID: PAT_MRT3847_130680C.1
cactctttacatctctctctctctctctctctccaaagcaaacagaaacagcgacaatcacatgactcgtgccttgagatatttaggcgagcgaaactcggccacggactccgccgtcgtcgattccgacttcgtcgtcatcttcgccgccctcctctgcgctctcatctgcatcctcggcctcgtcgccgtcacccgctgcggctgtctccgccgcctccgcctctcctcctccaacgctactccccagcctcctcccgcctccgccaacaaaggcgtcaagaagaaggtcctccgctccctccccaaggtcaccgcctccgccgaatccgctgtcaagttcgccgactgcgcgatctgcctcaccgagttcgcagccggagacgaaatccgagtgcttcctcagtgcggacatggcttccacgtcagctgcatcgacgcctggctcagatcgcattcctcctgtccatcctgccgtcagattctggtggtttctcgctgcgacaagtgcggcgggatcccggctccggcgagttccagctcggcgccaccgctggcggactcgggggacagattgaagggaagggaggaggacgcgaatagattcttgccttagctactgctttcggtttatatcaactcaaaattcatgaatccttctaaaaaagaaaaacattgtctatatagtgtggaaatagcaggtggtgtgtaatttgattttttataattctgatatggttagggctgtatgtattattgcatttgtgggcatcagttggatcagctgaattcgccatgtctcatttgtggaaactacttcattttttttttaatcatatatttttctgtataaagaaattaatttgttttaactagtaaaccagtagtatgtatgcctgtgacttttactttgccgtgtgctaatcgct

SEQ ID NO: 33973 - DNA, 487 bp, Glycine max
  Clone ID: PAT_MRT3847_130681C.1
gaagggcacattaccaagtcatatgattcaatgattaaaacttattaagcatcttttttttaattttgatcaactcatgggaccccattccagagatgctcggagtgctttattgctttttaaattaaataaaaccagacatttttattactcccttcctcccaaagttattgtcaccctatattattttatacaaacccattataaattaattaatgaaaaaaatgatatttttataaaaataaatttatatcatcattaatttttttaccttttgccattctttatttatatattaaagataccagtaaaaaaacgtcattaatatccagtttaaatttaaaataccaaatttttaaaaattttttttcttacaccacattttaataaaaccggaaggagtattattttacaaaaatttaaattatattatgaaatattttttaaattttttactttgaaaaaaaaaaccccctttgaaaaataa

SEQ ID NO: 33974 - DNA, 410 bp, Glycine max
  Clone ID: PAT_MRT3847_130682C.1
ccccgggcaaaaaggtggattaattcccttttttagttaaaaaaaacccctttttttccaacaaacatgatttttttgggtttccattccacccaccctttataagcaagacgggtttaaaaaaaaatttacaacccctccccaatacaaaaaatgggtaatcccattcccccaacccttaaacttgaaaaattgcttttggccggttttgggggggggggccctattgcggccaaaaaaaaaaagtatatgtcccaccgaaaggttttttgggtttttttttaaccgggaaacaaacggggaacccctcggtttgacccccaactttttttggcgtcccacaacttatctatcaaggaattttccttttttttttcataaaaaaggaaaaccgggaagaatttttaaag

SEQ ID NO: 33975 - DNA, 512 bp, Glycine max
  Clone ID: PAT_MRT3847_130683C.1
atttgccgtgctacatgtgtaggagtgctgccttcttggggggggggggggggggggggggggggggggggggggggggggggggggggggggggggcttaaggctgaaactaaaactgaaaacgggagggaagaagtgtggggagaatagaaggaggaaagtagtaaggaagaagctagaatagaaataggccttgtaataaggctaggtttacttggcacagtaaattaagcccgttgacttgtactagatttgggactaaattgcaaaaccttatgtttggtaagtatacctagggtttgtattggccccaaaatttaaggttgttttaagggccccagcccctgcttaggcgatggtttggtaagcaaactaaaaggtaggcttaacaacattaagtgtatgtgcccacctaaaaatcgaaaaattggcccaggggtttataactggccaatggaaggtgccctttaaccgtaatcccggcctcagtagcggcattaacttaaagctg

SEQ ID NO: 33976 - DNA, 410 bp, Glycine max
  Clone ID: PAT_MRT3847_130684C.1
agcataaagatggttttttctttttttttcccccaccagaaaaagggcttaaacgcgctaattgccccccgtttaaaagcccaacccgcaaccaattgttccgggtttacaagggccccccaaaaaaaattaaaagggagctcctaaggcggggggggacccattttttccaagtttctaaagagggggcccagtaaacaaggggaaaattctccggccccctcccccttattacccccaatgaaggccgccccaaaaaaaatattgcccccaaaaaaaaattgcccccatgaaaattttttgtaaaaaaaactttaccccccttttttttttgggtgaagggggctacaattttttttgggagggggaaatggccctaatttggcccaccaaaactttaaaaacccccc

SEQ ID NO: 33977 - DNA, 309 bp, Glycine max
  Clone ID: PAT_MRT3847_130685C.1
ctcggaattcggctcgagcaggcaataaggatgcccaaattgcaattggcacctttgatgtagaagagataaacagaagcagccataggtattatagatatgttggctctcttaccactccaccgtgcaaagagggtgtcacttggaacattctaggcaaggtaactaattactatatatgctctcctttggtgggaaagtatgaatacacacataaggagggttagaaatatactatgcacaattttttcttaacacattattaatcgtaatataaaatctgtccggccaccattctatacttttaaa

SEQ ID NO: 33978 - DNA, 591 bp, Glycine max
  unsure (1)..(591): unsure at all n locations
  Clone ID: PAT_MRT3847_130686C.1
cccacgcgtccggtacaaccccgggtgtaaattttagccaagggagtggtctgggtttcacctccaggaaaagcgcaaaatgctactctctgtgcccctttcactctagctctggaggtcttgcgggtggtgttcttgctggaatctctacttggagtagtaacaaggactttctgctacttggcattttgtgtgtatgttacatattaccgaagaaagaaggtatggaagaaaggatttgctctcagaagaatccaggaagaactctgctagaagttaagaatgatgaagcctctggtgattcggctgcagaaggtggtactaacaccattggcattagggtgaacaaatcagcagagttttcatatgaggaactagccaatgccacaaataacttcagtttggctaataaaattggtcaaggtggttttggggtagtctattatgcagagctgaatggagagaaagctgcaataaaaaagatggacatacaagcaacaagagaatttcttgcggaattgaaagtgttgacacatgttcatcacttgaacctggtgcgcttgattggatatttgngttgagggctccctt

SEQ ID NO: 33979 - DNA, 396 bp, Glycine max
  Clone ID: PAT_MRT3847_130687C.1
aaccaaaattaacattcttaataggaaaatatcgattcattcaaaatttaattggccaaaaatgaaattaccgaccaacacctttgatccagggacctccaagacctgatttatttaactcaccttcacattaaaaaaaaaaaaaaaaccttcttgtctttttgataaacaaacccccaacattagcctagggcaagtaaaaattttgtaaaatttgaaagacaaaaagagcctccatgacacccataaccttgatttcgaaacctatgctcaattaacaaacgggggggtaaacttggattgcaaacttttttttagctgggcccaagtaaacgtagcttgatgagaaccaaaactttttgatggagtgatgcgaaaaatgcatattttatctta

SEQ ID NO: 33980 - DNA, 395 bp, Glycine max
  Clone ID: PAT_MRT3847_130688C.1
gcgtccgctcggctgagaggagacaacggagagggaacgagctgttgccgttgaagcacattctggctagcaatgtgaaagcagtacggtggctccgggagcttctcacaacgaagcttccgtcggggagttattcattgaaagttacgatgccggtggttcttactgtaagggtggcggtcacatccaccaagttcgaggatctgctacctgtggagaagtatctacaagcacggatcaagtcctacgcatttgctcaatgcaaatgatgatcatccatatgggacaagcgcgtgaaagacaagaactattactagccatatgtggggtgggggagtaagcaccacaaccagtattttcttcttctggggataactattcggacccttttgcta

SEQ ID NO: 33981 - DNA, 1415 bp, Glycine max
  Clone ID: PAT_MRT3847_130689C.1
ggtgggcccgcgcggccctcgagtcttgccaacacttccttccttacttactttatgtcttgtccaaaacaccacacattaactccccgaatgttggagggccaagcaacaatgcgcacgtgggcgcgcatgtgcgacacgtgccgttcggtcccctccaccgtgttctgccgctcccacaccgcctttctctgcgccacgtgcgacactcgcctccacgtctctctcacgtggcacgagcgcgtgtgggtgtgcgaggcctgcgagcgcgccccggcggcgttcctctgcaaggccgacgccgtctgcctctgcgcctactgcgacgccgacatccacgcctgcaaccccctcgccagctcccaccaccccgtccccatcctccccatccacgcccgccacaacaacaacaacgacgacgacgacgttgctgacgtcgacgacgaagacgaaaccgcttcatggctcttgctcaaccctatcaagagtgctactgtccctaacaccaataaccataacaataataacgggttcttgtataacgaagaggttgatgagtatttggaccttattgataattgttaatcttgtctcgataataatcacttcgcttcagctgctgctactactgatcattacgctcagcaccaacatttcgctggtgtttctcagaagagttatgctggggacagtgttgttccggttcagcaacaccagcattttcagcttgggttggagtttgacaactccaaacctgccttcagttacaatggttctgttagtcaaagtgtttcagtttcatcaatggatattggtgttgtacctgaatcaccaatgagggatgtctcaattgcccatacaagaccccccaaagggacaattgacctattttctggacctccaattcaggtgccttcccatttttctccaatggacagggaggccagagtcctaaggtacagggagaaaaagaagatgagaaaatttgagaagacaatcaggtatgcctcaaggaaggcctatgcagagactagacctcgtataaaaggtcgatttgccaagagaacagatgtagaagctgaagtggatcagatgttctcgacaacactaattacagaagttggatatggaattgttccctctttctgaatatgctgtgttgaacaaatggccagaagatatcgaagatgctagaggatcatgatcaatagaaatggctaccacttgtgtactaataatgtattttttatgtaatctaattacttgcagttgtactaatcggatgctttattattttgtttattgtcttttgaatgaaacttgtacttgtaaatacagtccatgtattaaattattaaattacagtcaacatatctttgaaaaaaaaagcgaaaatttttcattttctcaatttc

SEQ ID NO: 33982 - DNA, 379 bp, Glycine max
  Clone ID: PAT_MRT3847_13068C.1
ggttctgtgctactttccattcgatcaccgacgggaatgggtggaccgccttcaggctccaaaacatcactcacataccaacgaaggctggcattgttggtaaagtcagtcaccgtaatggagccagcctgcgaaagcagattaagaaaatggaaaaaccccagcacagcccatcttaatgtgaattttgcacaaagtatgctgtgcagatgaaagctttacgaatatggcgatgcaaggactgctgtcaaacaaaagcacacgctgcatatactatgaataccgcacgtgctgtgaccgttcagagcaccatctggaggttttacgcgcaaactgacagttgaactttctagtgatgttatcaattactattagactt

SEQ ID NO: 33983 - DNA, 402 bp, Glycine max
  Clone ID: PAT_MRT3847_130690C.1
cgtacgctaagctcgtgatctcggtatttcgcctcaggggtcgatttgccaagagaacagatgtagaagctgaagtggatcagatgttctcgacaacactaattacagaagttggatatggaattgttccctctttctgaatatgctgtgtagaacaaatggccagaagacattgaagatgctagaggatcatgattaatagaaatggaaaccacttgtgtactaagttattctgctgataatgtattttttatgtaatctaattgcttgcagttgtactaatcggatgctttattattttgtttattgtcttttgaatgaaacttgtatttgtaaatacagtccttgtattaaattattaaattacagtcaagtcaatcatatctcgaaaatttaacattt

SEQ ID NO: 33984 - DNA, 361 bp, Glycine max
  Clone ID: PAT_MRT3847_130691C.1
ccctcccactcgtacgcggacgcagccccaggggggggttatatacctccacaagggagctaacaccccactacatgaacagcgggacaccgctcgcgccggacaccgggtccgagcccgacgcggaagccaagaccaccaccgctgacgaggagccggagaccaaggaaatggaggccgctagcagggccaaacgcggcgaaggccgccgggctcacaccgctcgcagccctctcgccccgggagcgccggaccccgacgtgctctacggccccaacgttgaaaaacacaaaaagaaaacgcagtccacccaaaggggaagggaaaccaaacccccctggaacagcctacacaaatgcaa

SEQ ID NO: 33985 - DNA, 216 bp, Glycine max
  Clone ID: PAT_MRT3847_130692C.1
tctgtggttttatgattccttttttccttggacctaaaaagtgggtcctatttttttcaattattataagtctaatgatacaggataaaaagtgaaattgtgtaactatatgcgcaactcaaaaatctaaaggcaacctcacaatggaaagacttgcggctaccccaatacttcacctgcaaataaatagtttttatagacacaggtagtaaaact

SEQ ID NO: 33986 - DNA, 302 bp, Glycine max
  unsure (1)..(302): unsure at all n locations
  Clone ID: PAT_MRT3847_130693C.1
atacaatacaaggaacgaaagcggggttngaagncaaggaggaatattgccttattgtttttctaaagaatatggcctgtaccaaaacccaaggggccaaagccctgtttacctgaaaagcctaacataaattatcttcactcgtaaaccaaaatggggagacacctcctactttgttagtgcccatactggcttacaaatatatttgactctgacaacacaggtgatgatgttatggtcccttattgggaaagcttatcgaatttgcgataacgacactcagaatatgttttcgccgaaaa

SEQ ID NO: 33987 - DNA, 261 bp, Glycine max
  Clone ID: PAT_MRT3847_130694C.1
tggtgtttataaatagaggaaacgcggctgccgctaatgcaatgattgcaagtgggttacaaaaacccgctgtttgtcaatgcatttgtggttcaattcgtgcggatgacgtgctttgttctaactatggctgtacttatcaataaagaattcgcctttacaagattgattcatggatcttcaacaaggttgctatgtcagggggaaagaggtgaacttgttcactgcacttgatctaaacgacacggacggtcatgtact

SEQ ID NO: 33988 - DNA, 363 bp, Glycine max
  Clone ID: PAT_MRT3847_130695C.1
acgcttatgctcttgttactgcttacaagaagtgcaaattcaatatggcccatatagacgtcttggcaccgctgaccacacaaaggtcttactacaacgacacagaaccgcatgctaaacactaatactaccagagaacttataacggaagccttctgattactgaaaccactgacgcctgtcacacggctctatgatatactcgaacccctggcatattgactaagaaccatgttgaagcttgagaacacatagtcgaacccgtatatgccaaatgcagatgtttcttctgccaaatttggcaccaagcatatgggtaaacttacatattcattgtatcacactaatggacaagcacacata

SEQ ID NO: 33989 - DNA, 513 bp, Glycine max
  Clone ID: PAT_MRT3847_130696C.1
caacggaatagggcgaaggctatattgcatagaatttgaagagagggtttaacgccgccttactcttgctggcattaggaccctaacaccccaccaatactctttcgggcgcctacctaaatctttgaattttggacggggggatcaaggttcattaacgcccaacttccaaatttgcggccctggagacacccttaatttttttttaaaggggaattaaccctagcccttattgaagacctccacagacaccttcattcaaacattatgtccaagtgcgccatcccagtggcgttcgtaatgcctcaaaataatcaggacacggccatggacccgctaatttttaaccggtgcctctggtgaaaccaattttacgtataaggaggatgataaaacctaccacttctagttgacgctagctgcaacctgagagaaaaagtaatccggctgggttgcccaaggctacagatgacttctgcccacatcgaattgtctaacatgccacattattac

SEQ ID NO: 33990 - DNA, 217 bp, Glycine max
  Clone ID: PAT_MRT3847_130697C.1
acacccttccgcccacgcttccgtttgaatccaggaaattatatataaatgaagactaaaaacaattgggagagattttgaaaatggtttgggggggattttaaattaacgctcctaaaggtaaaccaggctttttatgcccgttacaaaatgtcatttaaagaggccgttgcttttaatcttaaggggggcatccgccggttttgggcccctttgg

SEQ ID NO: 33991 - DNA, 2925 bp, Glycine max
  Clone ID: PAT_MRT3847_130698C.1
cccacgcgtccgcccacgcgtccgcccacgcgtccgcccacgcgtccgggaagaagcatacctaggtacctgcttcctgaacatataggaccatgtggccttaagatcacatattctggacattcagacttaagtgtcaagtttcaaagtcacagaagcagagactacactaatccttaccttcctgttgctcaatctgccatggagggaagtggacagcccatggtgggtttggatgggaagagactggaggccgagagtaatgttcttcttgcatctattgagaacatgcagtatacgcacaagcgaattcggaccactggagtatttggttccgttcaactcgagccgctcgagccgattcggaccgcattgggttgggttatctgaagcttctcctgcggaggaaacataactgcgcttgtttgggaaccctagtttggcgaacatctcaagaatcagagttttttttaccactatcaggtttagcattattatctgaaatggcatcggtgtctagtcagcaacagttccgttacacgcagccaccgtcaaaggttcttcatttgagaaatttgccgtgggagtgcacagaggaggaactaattgagcttgggaagccatttgggaaagttgtgaacacaaagtgcaatgttggagcaaatcggaatcaagcttttattgaatttgcagatttaaatcaggcgattgcaatgatatcgtattatgcctcatcgtcggagcctgctcaagtacgagggaaaactgtgtatctacaatattccaataggcaagaaatagtgaataacaaaactgcagcagatgttgctggaaatgtactgttggtaacaattgagggtgaagatgcacgccttgtcagcattgatgtcttacacttggtcttttcagcctttgggtttgtgcataagattactacttttgagaagacagcaggattccaggcattggtgcaattctcagatgcagaaactgctacttctgcaaaggatgctttggatggaagaagcatacctaggtacctgcttcctgaacatatgggaccatgtagccttaagatcacatattctggacattcagacttaagtgtcaagtttcaaagtcactttggcccgcggcgcccaaaagcctataacgctttgtcgaaaagcagttgggttgggttatctgaaacatttttcagcggatgaaacaaatctgcgcacgttagcaaaccctattttagtcaacatctcaagaatctgattttttttctcgccgtatatggtttagtattattaatcgaattggaatcgttttttactcaggaactttgccgttagacaccgccaacgtcgaaccagttgaacttgaggaactgtgcgggaatagtggacaaagtacgtgctatttggacgcgggttgctactttagattacaaagaagctcaatacgcatcagttactgagcagacttctgatgcctcaatctaatgctggatgggggacagctccatctcagtctatgctgcagatgcataacaatccttacacgccatctgcaatggtgccaccgcaaacagcccctggaatgcagtttccaagtcacattcaatagcatcatgcatctcatgtctcttacacaaagtggcgaacatagtcagcgcatctgcagaagtgaggactaccatttaaattgtggcttttcctatgtgaggaaactggcgtttgccaatgtgattccaaaattctctctccctttgtttattattagatgagatgagattttgattgtaagcaattggccaagaacttttggttggctggcaacacaggaaaaaactacacattctatttttcgtttattttgacttggttcggcagttatttttcatccagaaatctaaatctgttaactgcgctccaaaacaacagtagcaaaggtccctggcttcatgggggtcagatccttccattacagggggtcggtagaggacagtgtagggtttctatagagtttacatgctttctggcactctgtcatgtcctatggccacttatctgcaactttcgacttgtccaaaagattgcaatgtttgaccagagtggtggtttacaggctctgattcaatatccagatatccaaacagctgttgtggccaaggaaaccttggaaggacactgcatatatgatggaggtttttgcaagcttcacatctcgtattcacgtcatactgatcttagtataaaggtgaataatgagagaagtagagactatactattcctaatgtacctccacctgtagtgaatgctcagccctcaattttagggcaacatccagttccgatgacgggccctcctcctcaacattacaatggagctcagtacgcaccagttactgagcaaactctgatgtctcattctcaggctggatgggggacaggtccacctcagtctatgcaacagatgcataaccatccttacacgccatccgccatggtgccaccgcaaacaacccctggaatgcagtttccaagtcacattcaatagcttgcatctcatgtctcatacaccaagtggtgaacaaggtcagtgccatctgcagaagtgaggactaccatttaaattgttgcttcctatgatgtgaggaaactggcgtttgctgatgtgattccgaaactctcattctcccttggtttattattattagatgagatgagattttgatattgtgtgtaagcaattggtcaagaactttaggtcggctggctaacattggaaataactacacattctatttttcgtttattttgacttggtttggtatttgtttttcagatattgcttttcataagttaatcagtcaatgaaataaaagttgttaatgaaattcttaggtaatatatatgtaaatccaaattctgaatg

SEQ ID NO: 33992 - DNA, 710 bp, Glycine max
  unsure (1)..(710): unsure at all n locations
  Clone ID: PAT_MRT3847_130699C.1
tcgagtgtgttgcccgcgtgtgccaataaaccaattactctgtgttgataacccggtgatagctccnnttctttaccttttcccttttgttgtgagaacgcctaaggtccgttaattcccgggtcgacccacgcgtccgcgtaaaaaaaaccacgctcttctctttctctcaattctctcagattttgggttatcgtttgaaatggcatcggtatccagtcaaccacagttccgttacactcagccaccgtcaaaggttctccatttgaggaacttgccatgggagtgcacagaggaggaactgattgagcttgggaagccgtttggcaaagttgttaacacaaaatgcaatgttggggcgaatagaaatcaagcttttattgaatttgcagatttgaatcaagccattgcaatgatatcgtactatgcctcatcatcagagcctgctcaagtacgtgggaaaactgtatacctacaatattcaaataggcaagaaatagtgaataacaaaactactgcagatgttcccgggaatgtattgttggtaacgattgagggtgcagatgcacgtcttgtcagcattgatgtcttgcacttggtaagcagttgcacgtgtgtattagttatgtgctaacactgtaatcaagaggatgctggccatttagttttggaattaggtttgngtttggnnggctgnggaaaaatggggg

SEQ ID NO: 33993 - DNA, 388 bp, Glycine max
  Clone ID: PAT_MRT3847_13069C.1
gccacacatgcggcttaatcatctgtaaagtctactgagatgtcttcatgagttggttcatcccagggtctagcttgaacaatccccaataagatccaatataggatctagaatgcttatcactgcatagaattcttttgaggatgtgagcgacacattcgtacctgaactaggatgctggagatctacttcaggtgtctcaactagcacttgtgagtgcacaacatgatctagatattgacattgatccaggatttcttgaaagtgcttgcaattatgctcaactactaacacgtagacattcgactttattcaccgtaaacttatgcacttgaccttgcccggacgcaaacattactgagacctaatgaaccacttgattagatct

SEQ ID NO: 33994 - DNA, 959 bp, Glycine max
  unsure (1)..(959): unsure at all n locations
  Clone ID: PAT_MRT3847_1306C.1
tacggctaccccaagcgctccctccacggtcactctcacatcgtctccgactgtgtgatctcctccgacggcgcttacgctctgtcctcttcctgggacaagaccctccgcctctgggagctctccaccggccagaccacccgccgtttcgtcggccacaacaacgacgtcctttccgtcagcttctccgccgacaaccgtcagatcgtctccggttcccgtgaccgcaccatcaagctgtggaacaccctcggtgactgcaagtacaccatcaccgacaagggccacaccgagtgggtctcctgcgtccgcttctcccccaacccccagaaccccgtcatcgtctccgctggctgggacaagttcgtcaaggtctgggagctcgccacttgccgtatccagactgaccacattggtcacactggttacatcaacaccgtcaccatctcccccgatggctctctctgcgcctccggtggcaaggacggtaccaccatgctctgggacctgaacgagtccaagcacctctactctctcaccgctggtgacgagatccacgccctcgtcttctcccccaaccgctactggctctgcgcccccacctcctcttccatcatcgtcttcgaccttgagaagaagagcaaggttgacgagctcaagcccgagtacgtcgaggtcggcaagaaggcccgcgagcccgagtgcatctccctcgcctggtccgccgatggccagaccctgttcgccggttacaccgacaacaagatccgtgcctggggtgtcatgtcccgcgcttaaatgcgtgcatgataaaaagtcttaggaagagacgaggtgatgatacggcacgatgatgcgcaatacgaggggactgggtttgcgagcagtaggctgaacgtagatttccgatgaaaggttgtagcggtgcacgtgctcacgttcgttcatgannnnnnncg

SEQ ID NO: 33995 - DNA, 961 bp, Glycine max
  Clone ID: PAT_MRT3847_130700C.1
ggctcgagcaggtacctgcttcctgaacatataggaccatgtggccttaagatcacatattctggacattcagacttaagtgtcaagtttcaaagtcacagaagcaggtttcctgattcctctggactctgagtttcttaggcctacatggatccatatttttatagaatttgtattgctctttttacctgtgttctctcttttccctgctggtatttaatttattccttatcacgggtattgctgtccatatagtttcttagcctttatttttatggttattatatcacattctttattgtttttaattattgtaacttttcttggttttttcttcttctagagactacactaatccttaccttcctgttgctcaatctgctatggagggaagtggacagcccatggtgggtttggatgggaagagactggaggccgagagtaatgttctttttgcatctattgagaaaatgttgtataacttttaaagaaatgcactactcatgtgtgtttggaggttcaaatgtcatgggatttgtgtgattacaggtgaataatgatggaagtagagactatactattcctaatgtaccaccacctgtaatgaatgctcaaccctcaattttagggcaacatccaactaccatgacgggttcttctgctcaacagtacaatggagctcaatacgcatcagttactgagcagactctgatgcctcaatctcaggctggatgggggacagctacatctcagtctatgctgcacatgcataacaattcttacacgccatctgctatggtgccaccgcaaacagcccctggaatgcagtttacaagtcacattcaatagcatcatgcatctcatgtctgttacacaaagcggcgaacatagtcagcgcatcttcagaagtgaggactaccatttaaattgcggctttacctatgtgacgaaactggcgtct

SEQ ID NO: 33996 - DNA, 467 bp, Glycine max
  Clone ID: PAT_MRT3847_130701C.1
cccacgcgtccgtgaagctcctgcggaggaaacataacagcgcttgtttgggaaccctagtttggcaaacatttcaagaatcagagtcttttaccactctcagtccaagggactgcgtatttggtgattccgttcaacaggtttagcattattatctgaaatggcatcggtgtctagtcagcaacagttccgttacacgcagccaccgtcaaaggttcttcatttgagaaatttgccgtgggagtgtacagaggaggaactaattgagcttgggaagccatttgggaaagttgtgaacacaaagtgcaacgttggagcaaatcgtaatcaagcttttattgaatttgcagatttaaatcaggcgattgcaatgatatcgtattatgcctcatcgtcggagcccgctcaagtaccagggaaaactgtgtatcttcaatatttcaataggccagaaatagtggatacca

SEQ ID NO: 33997 - DNA, 2100 bp, Glycine max
  unsure (1)..(2100): unsure at all n locations
  Clone ID: PAT_MRT3847_130702C.1
tcccgaaattcccggtccaacccacccgtcccggttgataactgctctgctaccttctacctactacatcttttttcactaaccacaatcccgttaactcgaaataataaaaaaaaaccagatcccttctcgccctctcaattatctcagtccaaggggctgcaaattttctggttcttttcgacagatccacgcgtccgtgttgataacggagaagctccttctttatcgtttcccttttttcgagaaccccaatcccgttaactcgtaaaaaaaaaaaaaaaccagagcccttctcgtcctctcaattctctcagtccaaggggctgcaaattttctggttcttttcgacagattttgagtcattgtttgaaatggcatcggtatctagtcagccacagttccgttacactcagccgccgtcaaaggtgcttcatttgaggaacttgccgtgggagtgcacagaggaggaactgattgagcttgggaagccgtttggcaaagttgttaacacaaaatgcaatgttggggcaaatagaaatcaagcttttattgaatttgcagatttgaatcaagccattgcaatgatatcatactatgcctcatcatcagagcctgctcaagtacgagggaaaactgtatacctacaatattcaaataggcaagaaatagtgaataacaaaactgctgcagatgttcctgggaatgtattgttggtaacgattgagggtgcagatgcacgtcttgtcagcattgatgtcttgcacttggttttttcagcctttggatttgtgcataagattactactttcgagaagacagcaggatttcaggcactggtgcaattctcagatgcagagcctgccacccttccgaaggatgctttggatggaagcatacctaggtatctgctgcctgagcatatgggaccatgtacccttaggatcacttattctggacattcagaatttaagntgtnnaaagtttcnnaaagccaaccaggagccagaagaacctattacataaaataccttaaccttttcctnngttgctttccattcagactgtgncagnggaagctggcacaaggcctactggnccttngnngncctttcttngcngcncactttgcngccggcccaaacaaagactggaggctgagagtaatgttctccttgcatctattgaaaacatgcaatatgccgtaacactggatgtcttacacatggttttctctgcttttggtcctgtccaaaaaattgcaatgttcgataagaatggtggtttgcaggctctgattcaatttccagatactcagacagctgttgtggccaaggaagccttggaaggacattgcatatatgatggaggtttttgcaagcttcacatttcatattcgcgtcatactgatcttagtataaaggtgaataatgatagaagtagagactataccattcctaatgtacctcccctgtagtgaatgctcagccctcaattttagggcaacatccagttccgatgacgggtcctcctcctcaacattacaatggagctcagtacgcaccagttactgagcaaactctgatgcctcattctcaggctggatgggggacaggtccacctcagtctatgcaacagatgcataaccatccttacacgccatccgccatggtgccaccgcaaacaacccctggaatgcagtttccaagtcacattcaatagcttgcatctcatgtctcatacaccaagtggtgaacaaggtcagtgccatctgcagaagtgaggactaccatttaaattgttgcttcctatgatgtgaggaaactggcgtttgctgatgtgattccgaaactctcattctcccttggtttattattattagatgagatgagattttgatattgtgtgtaagcaattggtcaagaactttaggtcggctggctaacattggaaaaaactacacattctatttttcgtttattttgacttggtttggtatttgtttttcagatattgcttttcataagttaatcagtcaatgaaataaaagttgttaatgaaattcttaggtaatatatatgtaaatccaaattctgaatg

SEQ ID NO: 33998 - DNA, 282 bp, Glycine max
  unsure (1)..(282): unsure at all n locations
  Clone ID: PAT_MRT3847_130703C.1
accnncaancnnnncanncngnnacgcncgagaccactcnatnagnacngcangggnncatancgtggttccggangggtctcgnnccangacaacccgcncccgaagncgttcggtggagcccccatccnacctgtctnggcancgacncgattncanggaaccgaacccantnccaacananaccanggncncncanacangcnccgncanggngcgggnnncgnngcccangnngccacnncancanngnncnancancacnnagnancgcggnnngnc

SEQ ID NO: 33999 - DNA, 1264 bp, Glycine max
  Clone ID: PAT_MRT3847_130704C.1
cattattaagattcaccttagcaatatcatcctgaaagtttattattcacttgtgcaggttttttgagcctttggatttgtgcataagattactactttcgagaagacagcaggatttcaggcactggtgcaattctcagatgcagagactgccacctctgcgaaggatgctttggatggaagaagcatacctaggtatctgctgcctgagcatgtgggaccatgtacccttaggatcacttattccggacattcagatttaagtgtaaagtttcaaagccacaggagcagagactatactaatccttaccttcctgttgctccatcagctgtcgagggaagtggacaggctatggttggtttggatgggaaaagattggagactgagagtaatgttctccttgcatctattgagaacatgcaatatgctgtaacattggatgtcttacacatggttttctctgcttttggccctgtccaaaaaattgcaatgttcgataagaatggtggtttgcaggctctgattcagtatccagatactcagacagctgttgtggccaaggaagccttggaaggacattgcatatatgatggaggtttttgcaagcttcacatttcatattcacgacatactgatctaagtataaaggtcaataatgataggagcagagactataccattcctaatacccctgctgtgaacgtccaaccctcaattttagggcaacaatctgttcccatgatgggccctccacaacaaccatacaatgggtctcaggctggatgggggacagctccaccagcaacaacggttcagtctatgccaatgcagatgcacaataatgtttacatgccatctggaactatgccacaacaaatggcccctggaatgcaatttccaagttacaacacagcacaacctacaacaacattgccctcatatcgatctgatcgtactcaatagcatgcatctcctttgtctcaaatagatctctacattggttagcgctggcttatgcagaattgaggactgtcatttaaattagggttccccttctcatctttcccttctgtcatttttcagatgttgaatattgaacgggtctgtaagctattggtcaacaacttttgagtgtcttaactatgaaacaaaatattctgttttggtgtatttgtgttttttggtgtatatgtgtttgagaataagatgtaatccagtataatcgattttgtatggatgacgaagtaatatcatgttattacc

SEQ ID NO: 34000 - DNA, 673 bp, Glycine max
  Clone ID: PAT_MRT3847_130705C.1
ggctcgagcccattccgatttctgagttctgagagactcaaaagttcagagtggtatgggcagtgttgtgatttggtccagaagataacaacacgacactacactcgtgccgttttccttgccttcaaacaaggattggattatattatttatcttgcatcatacatatggcaaccgctcccttcattcacgcgcgctgtgcttactcgcctagaatttccaatcgcaacaacaagcctagttcgcaacaaggccccttggcttcttcgtcttctcatgcttcctcctcctcttcaccctccagttctagcttctctcacccttctggtacaaacagtggacaaagacaccagggccttagagctcaagctatgagtactgtcacacttggaaattctattgctagcatagggaatttgaagaacgatcctgatcatctccttgttcttgttcatggtatcttggctagcacagcagactggacttatgcggaagcagagttgaaaaggcgccttggaaaaaactttataatttatgtaagttcatcaaatactacactaagacattaactgcgattgatggctgtggaaagcgattagctgatgaacgctagctaatcgttaaaaagacaaagagcctgaaaagaatcttctttctagcccattctctggga

SEQ ID NO: 34001 - DNA, 359 bp, Glycine max
  Clone ID: PAT_MRT3847_130706C.1
gcgactcgtgactccacgattccatccactaactctgtggactctgcagaggtcgacattatgaagtcaacacacacacaggcattccatgacctgactatgcacacaccaccatgtatcccatggacacatattctatactctgtgttttgccacgccctgcccattctgacgtaacttgcgcttcccaaacacttagccaaacctacaccaactgcaccaaacttaccaccgtagaggccagcctccacttaagcttcaacaccactaaccgatccctatacaacaccttctccgtcaagccatacttgcgctacaggtgattcgacggtggcctcaacctcgactgtgatggcatg

SEQ ID NO: 34002 - DNA, 431 bp, Glycine max
  Clone ID: PAT_MRT3847_130707C.1
ggctgcccgtgcatttcctttacgggctgaaagagtccgccaatggatgctcttctcacgccaatggcatgcgattgacgcggatcgccaagatgtttggaaattggcgaataaagtggccaaacatttgagcggatggtcgaagccgatccaccacccgcacacggactgtggtgatcatgttgttgttgtcaatttgtccgccgtgagtatgcacgcgtttgactggaaacacacgcatttcttctttaaccggctgtacccaaagagcaaagcggacatccccgcctatcagatccacgagtacgacccgtgccgtgtcgtttggatgtgtattggacgcgaattggcattttctgacttggaatcgagttgttcagcggcgttgtttcgagcggttgcatgtctttcccgatttggaggttcccgat

SEQ ID NO: 34003 - DNA, 272 bp, Glycine max
  Clone ID: PAT_MRT3847_130708C.1
ttttccttctttttttttttgtttttttcttttttttcagtctttttaatttagaatatgacttatttccgtcccccaccctcctccggctgctagaagacgacagaatggggaaaatggtggtgtttgtctatgaacggggacgctgatctgagtgaaaggtttattttcatgaacctcaaatcaaacctttctatttctttctctcatcaatcaattcattcctattccacttatctgttagcttaagttaccctttcttaaaagtcaaa

SEQ ID NO: 34004 - DNA, 795 bp, Glycine max
  Clone ID: PAT_MRT3847_130709C.1
acgaggttggccaagaatcatagaacaataaattttgagagatttcgtgatccttggctcctccggggtagctcccttttcttcttcttcaacaccgcatcatcaacatcgtcaccccatcaaaccaccccacaagccttctctcccaaagctcgctcctttttcttccaattggaacatttcctgcgccctccaagccccactcgctctcagccactgcgctgattcaaagctcgttcaggaatttgaagtggtttttgaggactttattgattctggggtggtcgatgctgagcttctggccaaggtggttctgttgggaattcgagggaagaaggttcggagtgtgattcacgccctcaacaaagttcagggtcgaagaatttctttgtctactcatcttaatggctctgatatcattgcaaaggagtgttgccgcttggtcacgtgcagccacgttgaggaggctgttgaactcatggaggttctcgcacgtttccagatatcaatcagggaacttgttcagccgtctgacataattaaacgatgtgttcttagtcggaacccaattttagctgtgaggtatgcatgtcttcttccccatgcacatatattgttctgcaatattatttcagaatttggcaaaaggagggatttagtttctgctttgaaagcgtatgaggcgtcgaagaaacacttgaatactcccaatatgtacatatatcgggcaacaattgacacttgtggtttatgtcgtgattacatgaaatctaagtacatatatgaggatttgct

SEQ ID NO: 34005 - DNA, 116 bp, Glycine max
  Clone ID: PAT_MRT3847_13070C.1
ggggagtgaggtggatgcccactgtgtgttaagcgagtggtcgatcttcagtcgaacaccataagtgggacacgctgcttgttgagcttgagacacgtgacgagaaacccttctat

SEQ ID NO: 34006 - DNA, 253 bp, Glycine max
  Clone ID: PAT_MRT3847_130710C.1
gttttgattcagtcagagtacttacgaagtttatgttcttgcgtgcttcgcgtggacctttgatcctatctgtcatgagctgcaggactagcataacccgttggatttattagatatgcatttgaggtttgcaatattttcaaatctatatatacaccacctggcgcgtcaaacccgcgagcaggcgatctagatcatcacaactgacggcctctttgctgctacaagcttccatgagtatggcatcaacgac

SEQ ID NO: 34007 - DNA, 116 bp, Glycine max
  unsure (1)..(116): unsure at all n locations
  Clone ID: PAT_MRT3847_130711C.1
tctttctattcccatcaccatttatacattataaanactgtttanagcattcatatctatcattaagtccttcaaatattttaaagttactctttatcctggaaacgngttatcac

SEQ ID NO: 34008 - DNA, 247 bp, Glycine max
  unsure (1)..(247): unsure at all n locations
  Clone ID: PAT_MRT3847_130712C.1
gtgttacccaactataagtactaattaccagaaagccggggagaaagcgaanaagaagctcgagagcttcatcgctgagaagaaatacgctcctgtaatactgcggtgagcataacactctactanaacctttgacaagaacacgaaaaccggggaacccttcggaaccatcaagcacggctgcgaactaggtcacagcgctaacaacnatctttacatcgcgtgtgaacttggagaaccactcaag

SEQ ID NO: 34009 - DNA, 453 bp, Glycine max
  Clone ID: PAT_MRT3847_130713C.1
ctctctaacggcagctgttgccctaaaacttaataagctgtcttgacgacaggacatacagtgagtataaacagatcatgagaccttagcagatgccgatgattcagcggtctaagatgcgcagacctgtactactgatggaactgtgcatgcttcgacagtgctctgggatctaactatgtgacagttttatatcgaattatggacctacctatactccgagttttgctaggtactgaaggggatcatttacagctagcatgcgagaacttgcacttctatgaagctctccacgccaactgagacgagagactagagatctataaactcgctattgcgacacatatattggttatgatcactatgaatgatatcgcgagattgtttccgaggtatagagctgaggactaagctgggagacgatggcatgcaatgacataggaagatagagca

SEQ ID NO: 34010 - DNA, 1479 bp, Glycine max
  unsure (1)..(1479): unsure at all n locations
  Clone ID: PAT_MRT3847_130714C.1
actaaggtcaattgaatactgtagaaaatttaactttatgccccgtttttagttcgttcacgatatttagaagtaataaatttgattcctagaggaaagaaaaagaaataataaatttgcaacaaataagccccctcgttcaaaataaagaaaaataagagggagggaaagacaaaagctcgttccttacccacacggagaaagaacattttcagagagaaaaaaaacccagagaaaacaaggttataaatagatgtcacgagtgacctatcagcctagatgaacacaaatcatacaaaagtagacaccatagtccctacagaagttggcgattgcttgtttaaaagttgaatggttgactggaggtatctgtctttggcactcaaacatgacttggcagtttcgaccagtgtaagacaagaagacaataactcattgcttagcatgaaagaagaagcaatgcaattgcaagcttcaagtgccataattcctcgagcagcctgggaaggttcttgttgaacggcactaagcaggttctcaagaacaagtttagacaaagaaacaagctcttggttgtacgatgaatccccgtagtataacatgtcattgcctggaatctgtgaatttgcatgatatggcagtctcttttgtgataaagttgtcaataataatatgatagcagaaaaaatttgtgccctcatttttggttcaaaccaagaccgggagctgatcaatgtaaataagctatttgggaaataggtgactggtaaactaagagtacctcctggaaccataattaagaagccacatagctttctaatagatgaaactagtccttcaacatcagttggagttcggaagccatcaattatgtctaaggtatgcaaacagctgattgctgaatcaatcaatccatctgaatgagaaaccaagccccctaagaatgcaacctacntctgcagtttctagaaaaagatcaaactgcctgtgagcagaaatagaaggtattgtgacttcactaaatgtaacacaggatttgacaaaattcagatgtttcttagcacatttcaaagcttgaattgctaaagaattgctagagtgaacaagagtttccttaagctcatttaatctaccaaaagctcctcggcaatcaaccagaaatgctaaatggtgttccatctctgttccataatctaccatgtgcacaaagcgagctattgaacatgccacttggccatcatcatctttcatgttcataaactctatattattatgtagagccagagaaatttcaaaaagcaactgtatgctcgtcggatcactaatgcgaccattccttgtcgccatattaaggatatgcaaaaagacaacatcctgtgacttgccatacattacatccaagatttcaggaaactgatccagagaaaacacatcttccagatgcttaaaatgagacagaagcttcaccacaagagattc

SEQ ID NO: 34011 - DNA, 281 bp, Glycine max
  unsure (1)..(281): unsure at all n locations
  Clone ID: PAT_MRT3847_130715C.1
tgcgtacgacaacacggtttcgttccgtttcggtggggagcgaacagcacaacggcgagttctgcctgcgttgctgcgtcggtcgcganggcaagtttggtcgcgagttcctggagttcgagttccgcccagacggcgagctccgctgcgccgacgactccgactgcggagacgacgccgtcgtccgcgaggaggtttgcctgacccccgccgttctccgcgagtgccgtcgcgtcgtcgccgacagcgagattgtgaaggaagatgatgacggctggccc

SEQ ID NO: 34012 - DNA, 254 bp, Glycine max
  Clone ID: PAT_MRT3847_130716C.1
actcggctcatgtccctaatgcaccccaatagcaagatttggtttacgggaaatcttcctttgagattaaatctcgccctagaacgggaaaagatttctctacacaaacacaacttggtagtgggaaaaccttcaaatatgatgtaattggtgctccgtcacaatcttcaagggattttcctggaacaggggatcacgaaataccctaaaagatttattccagattgtgtcaaagaataggtcctccattccat

SEQ ID NO: 34013 - DNA, 738 bp, Glycine max
  Clone ID: PAT_MRT3847_130717C.1
acacaccttgcaaaaaccgctattgttgattaatacctatattctccatatattgacactcattcaactatggaaaactcaacaatgggtagtaattgtcttaccacatgttgtacggggaatttcttcaagaaaaagaaatctctccccattgataccatattcaagcttcctgttcctgttgcaaattcttcttggcctcaaggtggtaattttgctagtggaataatcgatctgggtgggctacaagtgtctcaaatatcaacattcaacaaagtatggggcacctatggcggcggaccggacaatcaaggcttcaccatgtttgaagcatcaggaattcctcaaggtttctttatgttaggtagctactgccaacccaacaacaagcctctttttggatgggttcttgtggcaaaagatgtgtctaaaagcacaagcaaccccactttaaagcaaccaatcgattacacgcttgtatggaacagtgcatcaatgaagatcaaccaagatggtcccatctatgtttggctaccaacagcacctgatgggtacaaagctttaggccatgttgtcaccaccacaccaaataagccttcttttgacaaaatcaggtgtgtgaggttagacctcactgaccaatgtgagacaagtttattgatttgggaatcaggcagcttcaatgtttatgacgttagaccaagcaatagggggattcaagctcctggtgttagagta

SEQ ID NO: 34014 - DNA, 223 bp, Glycine max
  Clone ID: PAT_MRT3847_130718C.1
acgaaacatgtaatgacttgatggcatattcgttaattttgtcctggtgttggcaaaacttccgccttaggaagaaacctccgaaaaattttaacaacccaaggggaattaatcaagaattcctcccccaatttaacttctgccgccgttccccttttccaaaaataaaaacaatttaaaatccttggcctaaatggtcctaaaaccaaacaaaccctccaac

SEQ ID NO: 34015 - DNA, 2045 bp, Glycine max
  Clone ID: PAT_MRT3847_130719C.1
atgatgcacagtcttatctgaaaatgaaatgtcggaaacgctatacccatgagtcgtgcccttaaggacaaggatcacgaccacgaccaccataacttttgatccttataaattggcataccctttgctgctgctctttacccatccattcttcaaatggaaaagctccatgcttctgtgctcgcccttgtattccttcttgtcatactatttcaggaaggattggtaacatgtatgaagaatgaagacggatcagaagaatggggatatgtgcaagttagaccaaaagcccacttgttctggtggctttacagaagtccatacagagtggagaatccctccaagccttggccaatcattctctggcttcagggaggaccaggctcttcaggagttgggtttggaaattttggagaggttggtcctttggatgctaatttgaagccacgaaatttcacatggttgagaaaagcagatctcttgtttgtggacaacccagttggaaccgggtacagttacgtggaggattccaatctctatgccaaaacagacgaagaggcaaccacagacttgacaacattgttagttgaattattcaacaatgatgcaagtctccaaaagagtcctctgttcattgtggcagagtcttatggtggcaaatttgctgttgctcttgcattatcggctctcaaagctattcaacacggaacattgaagcttacacttggaggtgtggtattaggagacacctggatctccccagaagattttgtgttttcatggggtcctctgcttaaagacctatctagaattgacgacaatggactgcaaaaagcaaacagtatagctgagaggatcaagcagcaacttgaggcaggtcaatttgttgatgcaacttactcatgggctgatcttgagaatgagattgtcgctagcagcaacaatgtggatttctataattttctacaagattcaaaaagtgattcggacaccttaaacgcaatggagctgggattattcaaagaagtatcaatgatgcgatactccaagtatcttagttcaaagacttcatatcttggcagtgaggatgatgatcttgaaagattactaaatggtgtcataaggaagaagttgaagatcattcctgagaatgttacgtatgcagtgcagtccttggatgctttcgaaagtctagtacctgattttatgaagccaagaattagtgaggttgatgagctgctggctcttggggtcaacgtgactgtgtacagtgggcaagtggatctcatttgtgcaaccaaggggactgaagcttggcttaaaaaactcgagtggacagggcttcaaaatttcttggagaaagacagaacccccctctactgtggaagtgacaaaacgaccaaagggttttttaagtcatacaaaaacctacaattctattggatccttggagcgggtcattttgtacctactgaccagccctgcgtagcactggatatggtgggtgcaattacacaatcaccagcggcttgaggataatatgcaccgaatgaaataaaatataaaattgtacaattaaataaacactaaaataaaatcacccagataatggctatgaggtttatattacgagttttgtcgggtatattcaatttttttttttaatttgggcatatctatgatgttaggtgtagcaatgatgataagtaatgactaaaattaagtttgaacagcatgtttggagtggccttaaaaatacatgtggagtaatattttaacgtccaatcaacattacagtaaactaccgaaataaaagttggcacttagcaataaacaattaataacttttttataaaaaaaaaaaactaaattggatcctacttattcacgttgttcattccaattgttttgacatacagtattggttcaaaacagcgtatatcatcccattgtgtatgggctcaaaatgtatcattcatcccaaatttgtttgttgtgtgaacaatgattacaatatacttgaggtatacatcaatgattaagat

SEQ ID NO: 34016 - DNA, 730 bp, Glycine max
  unsure (1)..(730): unsure at all n locations
  Clone ID: PAT_MRT3847_13071C.1
aaatttggtagagactgttacatgtctgggacataatatactgagagtgagtctgataaatatgggtttcccatgttgtctgatgacatatcttggaaaggtgtccatcgttgcccaataatacactttgttatttgagctacatctggactccacatcacaatttctgcccctttactcaactttgttcctttcaagcaaaactttttttgcattagtcaggcttttagaatttaagaacttattgatatacacacacaaacaagatttaattatttgtagttcctattatggtggttgaatactggtgttaagttttttttccctttgttgctgaggaaaacaattcatgatttttttcttttgaataccagacatagtcaggtgtcttccgtgtttggaaatttggtagagactgttacatgtctggaacaaaatatccttagagtgtgtctgataaatatgggtttcccatgttgtcctataactcttggaaaggtgttcatcgttgcccaataatatatgttattatttgagctacatctggactccacatcgcaaaaccactgcccctcactcagctntgttcttttgaaccaaagcttttctgcattagtcatgaaattagaatttatgaatgtactgatatacacacaatatttaattattgcttgttcctattatggtgggtgagtttgttaagagaaaaacaattgctgacttttttctt

SEQ ID NO: 34017 - DNA, 467 bp, Glycine max
  Clone ID: PAT_MRT3847_130720C.1
aaaacaaaaaacttttaaaatccagcagcattacaatcccaggggtttcacaacagggaagttaaaagccaatagaatgaccttttacccaataacattaacatttgttcataaacaggaaagaagggctactacactaacttcttcataaacataaaggaacacttttttggggaaacaaagggggatttgattttcattttttggcaactttgttgatcaagggcttgggaatgggagggataacaccccccccaggaaggggccctttgatgaggggggaaagcttttcgtctcccctgatagcgagttgcaagggccttggggggatccttttcaccttaaaaattttggtaagattccccgccaggttcaggaccttagaagtgagattttccaaaatggaggccaagaacaccgcagcagtcgcccccacacgtccatttggttgcaccctttggttcaac

SEQ ID NO: 34018 - DNA, 320 bp, Glycine max
  unsure (1)..(320): unsure at all n locations
  Clone ID: PAT_MRT3847_130721C.1
ggaagatgagggttggaaggaagagaggaacccagagagataaagctgttggaaaaagctgaaagtgaggtaaccgaaagaggaaaaaaaaagctttttaatttccttcctctattctattctcttagtcttaggtacccgtatctatcatcatcttctctagcgagctcagagctcatcctgctccttctcttaattctattatcatacaactaagaatgatcgacatgttagtgatccataactcattacctnccacttctgatgccgagaatggtactgctgctactgncactaataaaaggaagagaaggcctgca

SEQ ID NO: 34019 - DNA, 372 bp, Glycine max
  Clone ID: PAT_MRT3847_130722C.1
aaaaaaaaaaaaattttttttcatttttgcatatgaaatgatccaataatccccaacccgaaaaccctggacttgggtttttttgtttatttgaaggggtgaaatgccagaagtattgtttcacaattttttaaatttaatttaccccccttttgggccctacctactaccactatgctccccttggattttactttagggcctcaaggaatataacaactgggggttcatttgggttttatccaatctttaatttactacaatttcctcaaaggtttttgatgaacagcacctttcaagataggggctttaaattttcaaatttcctctttagtttactaaaggttttgcaaaaaaaaggaaaatcctttt

SEQ ID NO: 34020 - DNA, 739 bp, Glycine max
  unsure (1)..(739): unsure at all n locations
  Clone ID: PAT_MRT3847_130723C.1
cggctgggcaaggcgaagattctcgatttctcatttctccacaatcgaaatccaatgatggattcttcttctcacttctcagtaattttcttcagtcggcgaattgcgatctgtaaatcgattctgttttgttggtttgctctgcgaaagcaaagaattagggttcatttctgaatctcaccgctaaaatcttttattcgtcttatttatttatttctgttttaatctgtcaaattgttttttcccaattttgttgctatatccaagacctaagtcatctttacagcgagttaggttgttcatagatgtctttcttgtgtctgagggtgacgatattactttcacatccattgacgccgtgttatgttgctcaaggaatgaaataaacggcacattccttttgcgttaagtgccaatggtacatttcacgcttgtatcttctttgattttgcgttaatgtatctagacttgtacaacgtgcaaataccttttccttttttcataaaatccatttttatgtgctgtgttttgttcagtttattttgaaaacaataattgttcattttaagcgattatttctctaaatttaagtggtatgaaaaattgtttggtggagagaagattgatgctagcacatggttnttgacatattagcattgctatcctncttggctgtattcattagcctcgncgngttcaatagntaaaataatgctcagaataagatttgatggagtta

SEQ ID NO: 34021 - DNA, 338 bp, Glycine max
  unsure (1)..(338): unsure at all n locations
  Clone ID: PAT_MRT3847_130724C.1
ggagattggtacccagcaattaataaaccagctgcagtccttcactggcttaatcatgtaaatattgatgctgaattcatagtgattcttgatgcggatatgatcttgagaggcccaataacaccatgggagttcaaagctgctcgtgggcgtcctgnttcaactccctatnctaccntatcggctgtgataatgactcttgnaaaattgcatactagccatcctgaggttgtgacnagggtggtggtgtaatcatatgcatattgatgacnccggaattcgcaagnnaaggtgnatnaaactgaggaggccgactnnngacccttntcagantatat

SEQ ID NO: 34022 - DNA, 518 bp, Glycine max
  Clone ID: PAT_MRT3847_130725C.1
tcttcacgcgtccggatacaatcatctatgagaaagactaacttatgaacctattgacattatcattagcaacttttctgaagccaacaactacttgtcttatatcctgcctttgctactagcttatcttccatcatcattttaaaaaggatataggaaacgagaggtgaaaagcaggttatgttgggtaatttgcactttttctagtattgtaatattgaaagtaaatagaaaaaagacttgtagcttcaacttcatattttgacctgggattaacaggaagcatttcatctgctgatgggcgtgtcaaaaggtcaacaacttcctctaagatgaaagatgaatcatctggaactaatgaagatggacatgaagaaaactccagggttcgccttcaacgtgttctagataatcgtaaagctatgctttgcaaagaacaagcaatggcctatgcccgtgctttagttgcaggatattacccagaatctgtggatgatctaatatgttttgctgatgca

SEQ ID NO: 34023 - DNA, 406 bp, Glycine max
  unsure (1)..(406): unsure at all n locations
  Clone ID: PAT_MRT3847_130726C.1
cgcccacggcgtcctgtgtgtgccgtggggtttgttctttttcttttttcttatttttctgttacgttgggacctcctcaccagacgcctggctctttgcgcagtgatatgttttttgcgctcgtgacaggacacacaactatggatttttttatgaataggcctcaatgagcttggttgcgagcaggaactgatatcagaaatgacgactggttctctgtactttggggctgtccgtttagctggtccaaaatggggaccatttncttcatagtgctgtgcttggcttgtagaccattgggctcatagctgggatagggactcaggcatttgctggttcacaaacgtcgcagagtataattctgactgtcaactggcactaatgaaggtggagggatacttcgct

SEQ ID NO: 34024 - DNA, 1102 bp, Glycine max
  unsure (1)..(1102): unsure at all n locations
  Clone ID: PAT_MRT3847_130727C.1
gtacgccctggcaggctacccgggtnccggnaatggcccgagtcgacccacgcgcgcgctttctccgagaacaaaaaaaaaaacgtgattcgctcttctcttcgaataaaccacaaaaccaacaaacgagaagaggagtgagagaagatggggttgtcgttcacgaagctgttcagcaggttgtttgcgaagaaggaaatgaggattctgatggtaggtctcgatgctgctggtaagacaaccatcttgtacaagctcaagcttggagaaatcgtcaccaccatccccaccatcggatttaatgttgagactgtggagtacaagaacatcagcttcactgtgtgggatgttggtggtcaggacaagatccgtcctctgtggaggcattatttccagaacactcagggtctcatttttgtggttgatagcaatgatagggatcgagtggttgaggcaagggatgagttgcacaggatgttgaatgaggatgaacttagagatgctgttttgcttgtttttgccaacaagcaagatcttcctaatgcaatgaatgctgcagaaataactgacaagcttggacttcattcactccgtcaacgccactggtatatccaaagcacttgtgcaacttctggagagggtctctatgagggtttggactggctttctaacaacattgccagcaaggcatgagacatttgaaaatttttggtcttgtctggtgatttcctgctgagtatggcggttcttggagaaagatgcttatcctttcttgtcaatgttgtaatagcagaatgcttgctagaagtattctcttcttttgtgtaacttgggtttgtatgattgcttaaattagctaatacttttagctataattggaactcttggaccctcttgtgcgtgccttgtttgtgttcattttgttagtttgatttttggttgaatatttccgtgcgttttgttcttggagtgcttgttggtgatgatagttgaatgaggattagaaaattgcgccagtttttgctcttgggccaagagtcacctgttcaaatattgtctttgcgaaattccagttcagatagacttggtacctgtttgtttt

SEQ ID NO: 34025 - DNA, 355 bp, Glycine max
  Clone ID: PAT_MRT3847_130728C.1
gaacatcagcttcactgtgtgggatgttggtggtcaggacaagatccgtcctctgtggaggcattatttccagaacactcagggtctcatttttgtggttgatagcaatgatagggatcgagtggttgaggcaagggatgagttgcacaggatgttgaatgaggatgaacttagagatgctggtgtgcttgtttttgccaaccagcaagaacttccctatgccatggatgcttgcgaaattaactgaaagcttgggacttcttttcttcggcaaccccccctggttattcaaagcactttttccacattttgggaaaggctctattaagggttgggatggctttgttaccacctt

SEQ ID NO: 34026 - DNA, 366 bp, Glycine max
  Clone ID: PAT_MRT3847_130729C.1
actagttctagatctcgagcggccaccctctttttttttttttttattcaaccaaaaatcaaactaacaaaatgaacacaaacaaggcacgcacaagagggtccaagagttccaattatagctaaaagtattagctaatttaagcaatcatacaaacccaagttacacaaaagaagagaatacttctagcaagcattctgctattacaacattgacaagaaaggataagcatctttcttcaagaaccgccatactcagcaggaaatcaccagacaagaccaaaaattttcaaatgtctcatgccttgctggcaatgttgttagaaagccaatccaaaccctcatagagaccctctccagaagttgc

SEQ ID NO: 34027 - DNA, 479 bp, Glycine max
  unsure (1)..(479): unsure at all n locations
  Clone ID: PAT_MRT3847_13072C.1
gccttccgtccggttgcaaaaagacaacagaaggggtcctggacccaggggggcccgggtttcggtttttaccaaaattaccggggtggtgagtgtgattcctgttagcgaaaagcttattagtacctacaaaaaaagggataagtggatgtctggaactgttttctctgaaatgggggttccaaagccacgttgaaagattcaaatggatctcaggattgaaaacctattcctactagggctagctggaggctcgcaggttatgggttaagttccttaatatatagttgaaatataacattgtctgggtccagaattcaagttgcttctttctcttggaattctaaacaagtgcaaaggttattgggtgtggaagtaataaattcaaatcatttttgtaaccagcctatgtgtaccgggtccaatctttataataacattttttggtcaaattaaaaaaanaaaaaaaaacccaaaaa

SEQ ID NO: 34028 - DNA, 363 bp, Glycine max
  Clone ID: PAT_MRT3847_130730C.1
attgatctaggggggtttgtacttgtttgattatctcatttttttgaaaacatttttatattgtgggggcccaatttcattttctaatgaaaagggtaaaacagaattcttaaacttttcaaacactcttatcaaggcccaaattttgggaattcaacaccaaagttggggccccagggttcacaggaaaagtgaaagaggcccttaatttaaaggctgggtgggaggggatattgacgcggggggtgttatttgaagggctttcatagaggctttccccaggggggggggaaaaaaaaagccccggagaagtggcgtttcctggcaaatttagaaacatggggaggggtggtccagggaaaa

SEQ ID NO: 34029 - DNA, 390 bp, Glycine max
  Clone ID: PAT_MRT3847_130731C.1
cccacgcgtccgcccacgcgtccggatgtttgcgaagaatgaaatgaggattctgatggtaggtgtctatgctggtggttagacaaccatcttgtacaagctcaagcttggagaaatcgtcaccactatccccaccatcagatttaatgttgagactgtggagtacaagaacatcagcttcactgagtaggatgttggtggtcaggacaagatccgtccactgtggaggcattatttccagaacactcagggtctcatttttgtggttgatatcaatgatagagatcgagtgggttaggcaagggatgagctgctcacaaaggttgaatgaggataaactttagagatgctgttttgcttgtttttgccaacaagcaagatctttctaat

SEQ ID NO: 34030 - DNA, 808 bp, Glycine max
  Clone ID: PAT_MRT3847_130732C.1
ctagaacaaaaaaaaaaaaaaaaaaaaatccgcgattcgctcttctcttggaaaagtgaaaaccagaagtacgaacgaaagagaagaggtaagcaaattcaatccctctccgattgaataatccctttcgaattcgatctctctctgttccagtttttattttctttcatttgaattttttaattataatgattgattttggtgtgtgattggaatgaaattgtgatggatctgcgatggatcagcgatttagaagtgagagaagatggggttgtcgttcacgaagctgttcagcaggttgtttgcgaagaaggaaatgaggatactgatggcaggtcacgatgctgctggtaagacaaccatcttgtacaagctcaagcttggagaacatcgcaccactatccccaccatcggatttaatgttgatactgtggagtacaagaacatcatcttcactgtgtgggatgttggtggtcatgacaagatccgtcctctgtggaggcattatttccagaacactcagggtctcatttttgtggttgatatcaatgatagggatcgagtggcttatgctacggatgatttgcacaggatgttgaatgaggatgaacttatagatgctgttttgcttgcttttgccaactagcaagagctttctaatgcattgaatgctgcatatataactgacaagcttgtacttcatactctccgtcaacgccactggtatattcaaagcacttgtgtctcttttggatagggtttctatgatggtatggactggcttttgtacaacattgccagcaaggca

SEQ ID NO: 34031 - DNA, 324 bp, Glycine max
  Clone ID: PAT_MRT3847_130733C.1
atcagggaggaaccgcactcatattttaacattatatataatcacatttccttaaggggaaatctttaggcgtcatattttatcagcctgtaatgaacctcatgccattttaatgacatgtgaacaccaccggaggcctaagtgttatcaacttcaggtcatattcacgatcagttacgttactgaatgtctcaagattcactgtaatttctcggaatccgtgataaacatgtactgcaaacggcacaaggtcagcgtcacagctttgtaatcaagtgttctctccaacctgtcacgaattggagtccagacaatctaatgcac

SEQ ID NO: 34032 - DNA, 598 bp, Glycine max
  Clone ID: PAT_MRT3847_130734C.1
gattcgctcttctcttcgaataaaccacaaaaccaacaaacgagaagaggagtgagagaagatggggttgtcgttcacgaagctgttcagcaggttgtttgcgaagaaggaaatgaggattctgatggtaggtctcgatgctgctggtaagacaaccatcttgtacaagctcaagcttggagaaatcgtcaccaccatccccaccatcggatttaatgttgagactgtggagtacaagaacatcagcttcactgtgtgggatgttggtggtcaggacaagatccgtcctctgtggaggcattatttccagaacactcagggtctcatttttgtggttgatagcaatgatagggatcgagtggttgaggcaagggatgagttgcacaggatgttgaatgaggatgaacttatagatgctgttttgcttgtcattgccaacaagcaagatcttcctaatgcaatgaatgctgctgacataactgacaagcttggacttcattcactccgtcgacgccactggtttattcaaagcacttgtgcaacttctggagagggtctttatgatgtccttgactggcctttctacaacattgcaagc

SEQ ID NO: 34033 - DNA, 1269 bp, Glycine max
  Clone ID: PAT_MRT3847_130735C.1
ctctttctccgagaacaaaaaaaaaaaaaaaaaaaaatccgcgattcgctcttctcttggaaaagtgaaaaccagaagtacgaacgaaagagaagagcgatttagaagtgagagaagatggggttgtcgttcacgaagctgttcagcaggttgtttgcgaagaaggaaatgaggattctgatggtaggtctcgatgctgctggtaagacaaccatcttgtacaagctcaagcttggagaaatcgtcaccactatccccaccatcggatttaatgttgagactgtggagtacaagaacatcagcttcactgtgtgggatgttggtggtcaggacaagatccgtccactgtggaggcattatttccagaacactcagggtctcatttttgtggttgatagcaatgatagagatcgagtggttgaggcaagggatgagctgcacagaatgttgaatgaggatgaacttagagatgctgttttgcttgtttttgccaacaagcaagatcttcctaatgcaatgaatgctgcagaaataactgacaagcttggacttcattcactccgtcaacgccactggtatatccagagcacttgtgcaacttctggagagggtctctatgagggtttggactggctttctaacaacattgccagcaaagcatgagacatttgaaaaattttggtcttgtctggtgatttcatgcgagtctggcggttcttggagaaagatgcttatcttttctagcgaatgttgtaatagcagaatgcttgctagaagtattctcttttgtgtaacttgggtttgtatgattgcttaaattagctaatacttttagctataattggaactcttgcaccctcttgtgcgtgcgtgctgtgttgcttacatcttgtttgtttgatttttgattgaatatatttccatgcgttttgttcttgaaaagttcactaatttttcagtttaaaagatcggttttgtccggttttcccaacatagataaaaaataatataaacaaaatgttggcaactaaagttgtgtctcgtttgcactttttcttttcctcgtgcccctttcctttctttgtgcttgttggtgatgatagttgaatgaggattagaaaattgcgccagtttttgctcttgggccaaaagtcacctgttcaaatattgtctttgcgaaattccagttcaaatagacttgggacctgtttgttttaaagttgagcagacctaattttaatagaattggttaattatttattgtgattc

SEQ ID NO: 34034 - DNA, 488 bp, Glycine max
  Clone ID: PAT_MRT3847_130736C.1
caaaaaaaataattgatctcataggggaaagggaaattactttttgtttgaataagggcatatccccacatatgggggatattttttctttgccattcccggaaataagggtggggggtaaaacaaacaggcggggtcagttttaattatcagtttgaccttttaacaaaggcagacaaagtaatgatttgcccttgtttttaaagataaaattatgggacaatataccatgaggttcctatgaggaagtttccaaatttattattgtatgttaaaacttttgaccaaaatcattaaatttaggggtttggcatttaaaacttaaaatccggggaaaagcactttttgatcaaattatttgggaggttccatgcttctaaaaaagctaataaaataatgtgttaaaaataacataaaaacgctttttgtaggtagggaaccttgggaggaatttggggatcctttgaagcctccttgccaatgcataa

SEQ ID NO: 34035 - DNA, 424 bp, Glycine max
  unsure (1)..(424): unsure at all n locations
  Clone ID: PAT_MRT3847_130737C.1
actactcactancccccctccncccttttttttttttttgggttttttttttatggaataaaaggtaaaaggatttttttacaaaaagaaataaaaaaattcataaattttttaatcccccattaaaactctaaattgatccttataaaaacacccccaaggacaatccttcccattattctcccaataaaaagtctatttaaatactatcttcattaactaacctcgacctcaacttaaaaaaatatttgtttccccccaaaccttttttcttttaattttacaaaggtattaaatcctcccaattttaaaacaccccaaacaggggtggaatttttcttatccttatttaaaataaaaacaaagtgcttacattttcaacccctttttttttgacccttccaaacaaaaaattgaaaagacc

SEQ ID NO: 34036 - DNA, 732 bp, Glycine max
  unsure (1)..(732): unsure at all n locations
  Clone ID: PAT_MRT3847_130738C.1
tcgaagctcggatcggctcgagttcttttcctccatcatgatcgatcatgctacaacttgcacgcattcgttcattcttatcctttatataaacacattacacacttaacaagaacaagaacaagaacaagaacaacactcaggtgcggaatcagtcatcatggcggtgatcaacaaagaaataatcgatgagccctacgaacaagaggagtgcatcgactacgagcagctgaagaaacgcatgtggaaggaccgtgtgcttttgcagaagctgaaggagaagcgcgagaagcaagaacccgacgtggaagcgaaacaagaggcgtcaaggaggaagaagatgtcacgcgcacaagactcggtgctcaagtacatggtgaagatcatggatgactgtaacgcgcctgtcttcttctcccgcttcttcccttntaaattaaaacccctntccacctcctccttcttcctccccgagtggtggaaggaccaaatcccctttgcccccncccccccctgtctttctccctctccttcccttcctctccaccccttcgncctnccctccttcttcccctcctcccctctccctccattccctacccctncctccctctctcttctttctcctccccttccatcttttgcccctccaccacaccgtttcctctgtttagaacccttctccacttcttcccccatggggggctcttttcctctttaaacaagggcctt

SEQ ID NO: 34037 - DNA, 282 bp, Glycine max
  Clone ID: PAT_MRT3847_130739C.1
attcacgagaagaaacttcattcagacctcctttgaatgtggatgatgcaaattaattggctccttccctataacaaaatagtatcaaggctccttcctttttcctacgattatgtcctatttatttttattttagatagagttgatttaataaagtaattctaagtcatgtagcatgattaaatgtatgtctaaattaatctcagtcattcagtcgcaaatatatattaaaatgtgtatttgcgactgaatgactgagattaatttagacatacatttaat

SEQ ID NO: 34038 - DNA, 152 bp, Glycine max
  Clone ID: PAT_MRT3847_13073C.1
ttccgacaaaatctggtgatgttcacaaaaaaattcatgctgccccaccacccagcagctacacagttacaaagatagcagctggctttccaagagatggaggattctgatttaacaaaaaagctagtggtgcagatctagccaaggaatca

SEQ ID NO: 34039 - DNA, 280 bp, Glycine max
  Clone ID: PAT_MRT3847_130740C.1
aaaaaaaaaaaaaaacactgcttatctaaaatttttgtggcccccaaacctcactttaataaaactaaaattaaaaatctttcttcctaaccataacattaccaacaccctaccaatttacaaaactcctgccccttttccacttccaaatttatcaaaatataactctcctaaaaaaaaacccaaacccccattcctacattctttcttttttctctcctactccaaagccaatttattttcacacctccattattgttccgttaataattcttaaatc

SEQ ID NO: 34040 - DNA, 224 bp, Glycine max
  Clone ID: PAT_MRT3847_130741C.1
gggcccttaaatatttgcaaattaaacggggccataacgggacatacgcctacagagggcaaacgactcatctttaagctgggcaataatgggtgggctactacaaaatctacaatggcgacatttgggggtcaaacagccttaagggggaacaaattttttggaaccaaaaacttgggccagctcccaaaattctacctccacccttaaaacccgggcattaa

SEQ ID NO: 34041 - DNA, 284 bp, Glycine max
  Clone ID: PAT_MRT3847_130742C.1
ctcacacttcctccctaatccaactgttttttttccttaaaagggattctccaatgtaacggtcctttattcaaccaaggttttcccttttcatgatctgtagattaagtaacttcattccactagaaatgctagtaatcggactaaacaaatactacttatagtacacctaatctgattatatattattctttttaaatgcaatttccattcacatgttcaatcttgactcacaacttttatgcaacttaattcatttttctaatacatataccattcacata

SEQ ID NO: 34042 - DNA, 809 bp, Glycine max
  Clone ID: PAT_MRT3847_130743C.1
gtcatcctaaacatgatgctcaccatgtttgcgtgcctcaataaaaaagtagaagaaaatctcaaagtcacaaaggcagtgtacagagatgagttaataaccaaaaagaaaccttcaacagtgccaagcaaggcattagtgaagaaaagtgtccgttttgcggactcagaaccttccatttttggagaagataccaatgagaagaagttggtgaaaggaaggtgtagtagtgatggtgatgaatcaggagggattagagtgaagctaaagatgacaaaggaagaagcggcacgtttgctatcaaaatgcaaagaaggaggagttctcgagttcaaggatgttgctcgtgagcttgtggccctcccactgaaccgagttagtgttgtgtctgctttacacgaacgataatgatgcattgctcaaggtcgttttatataaactcctatctcaatatgtttcattaagttgtattagtgaaagattcagaaaactatatatatatatatatatatatatatatatgtagctgtgtactctaggaaattctcaagtttatggctagactacgtactatatatgagagagtcgatgaagtaaattcatgccatgtaattatgtatgatagtgaatttactcatattacataagaaagttttgttagtcctagccttatgtacaggagtgtattagctagagttatacaaattatagatgagattaggaattgaagtcggttatacttgttggctttataaactccatctattggttcttgtaaaataagttttatcatctccatcaatacaatt

SEQ ID NO: 34043 - DNA, 448 bp, Glycine max
  Clone ID: PAT_MRT3847_130744C.1
ggcatcacactcctccatggctctctattgcccatccttggctggcaaggccatgaagctgggcccatcatccccccaattctggagggtcactatgaggaaaaccttcacaaaacacgcctcctccggatgcccatgatacagcccacaccgcgtcaagtacttgggcccattctctggccagcccccgtcctaccttactggcgagttcccagctgactaccgctgggacactgatgggctttcggccgacctagataccttagccagaaaccgagagctccaagtgatccactccatgtgggccatgctcgttgccttgggctgcgtcttccccgaactgtagtctcgcatcggggtcaagtatgcagaagctgtgtggttcaagtacggcttccagatcttcagcgaaggtcgactagactacttgtgcaacccaagcctagtc

SEQ ID NO: 34044 - DNA, 146 bp, Glycine max
  Clone ID: PAT_MRT3847_130745C.1
gatacatcctcagtgtaacaacaagaacgtcgtttaacacatcatcctcaccatttgccaagataaggatgcagagctgtttaccttggcaaatggtgaggatgatgtgttaaacgacgttcttgttgttacactgaggatgtatc

SEQ ID NO: 34045 - DNA, 170 bp, Glycine max
  unsure (1)..(170): unsure at all n locations
  Clone ID: PAT_MRT3847_130746C.1
cgnaattttgataanccgcgancacaggttnccgcaccttaaaaccngaaacnanagcnatcnttacttggtttcaagaagntntcantttctgcctatnnctttgtgtacgagttcttangggaaagaagancacgctcggtgcgggccanagacntcgtgaatcattt

SEQ ID NO: 34046 - DNA, 369 bp, Glycine max
  Clone ID: PAT_MRT3847_130747C.1
cccacgcgtccgcccacgcgtccgtatgttttgatcctctaaagtgcagacagagggtgcagtttgaagtgcaagtgggaaacattgacaagaaattcaagaactggttataacaaatccctagtttgttatccatctgaaacccatttatcaacactactttttactgttgaaagcttaccttgcacttcgaaggatcttgatccataataaatatagccgtgagtgtgggatcaaccgatcaaccgtgtattctgtgatggacttacacagattgatagattactatttgtgactagaatatcgtttattgcgtgtaaactctgattaggtagaagtcaaaaaccttggattatatcaatttattcc

SEQ ID NO: 34047 - DNA, 500 bp, Glycine max
  unsure (1)..(500): unsure at all n locations
  Clone ID: PAT_MRT3847_130748C.1
ccggtcagaaattcccgactcgaccacccacgcgtccggccacgcgtccgacggctgcgagaagacgacagaagggatttgacaaataatatatatatatataaaagtttgctattataaagtcaagaatataaagatatattataatatcaataactaaaatttagacaaatataacttcttttagatgaatttttctttaaaaaaattataaattgatcactatttcacttcacgcaccaatagaatttggagtgattttttctaataaaataaggaaataacaaaacaatatactacactaggtatatagtgatagatagcctcacacatgaagataaaagattaattccaaaagtgaaggccttgaatatgattggagcatttactttctcataaacattttacgcacacaacaaagctaataaattttagagagctagatgcaccacacttatacattagttttgaaaaanaaaaannaaannaannnnnnnnaa

SEQ ID NO: 34048 - DNA, 1684 bp, Glycine max
  Clone ID: PAT_MRT3847_130749C.1
acgacagaagggggtaagtgatgaagtttatccctatgcaatacactagtgtgctcactgaatcaccaatcacgacggctgcgagaagacgacagaaagggttttctctaggagggccacatggattctggagggagacataggcgtggaacgaagccttgaaagaacactacagacagggaaagaagatgaggtactcaaatgtgtcttccaagatcaacaatcattgttgaatcttaaaaaaaagaacagcccaaaacctttcaaaatacacatgctgcaaattgctcacccaatcaccagccatgggagaggttgacccagcattcatccaagacccacaacacaggccaaagctctccaccatccaagctgaaggaattcccataattgatctctctccaataaccaaccacacagtttcagatccatctgccattgaaaacttagtgaaggagatagggagtgcatgcaacgagtggggtttcttccaagtaacaaaccatggggtgcccctcactctaaggcaaaacattgagaaagcctcaagattgttctttgcacagagttcggaggagaagagaaaggttagcagaaatgagagctctccagcgggttattatgacacagaacacaccaaaaacattagggactggaaagaagtctttgattttctagccaaagaacccactttcattcctgtcacttctgatgaacatgatgatcgagtcactcagtggactaatcaatcccctgaataccctctaaactttagggttgtaacacaagagtatattcaagagatggaaaagctgtcctttaagcttttggagcttatagctttgagcttaggccttgaagcaaagaggtttgaagaatttttcatcaaagaccaaactagctttattcgactcaaccactatcctccatgcccttaccctgaccttgctcttggcgtcggtcgacacaaggaccctggtgccttaaccattcttgcacaggatgaggttggaggacttgaagtgaaacgtaaagcagatcaagagtggataagagtgaaacccaccccagatgcttatatcatcaacattggtgacactgttcaggtttggagcaatgatgcatatgagagtgtggatcacagagtggtggtcaactctgagaaggaaaggttttccattcctttcttcttcttccctgcacacgacaccgaagttaagcctttggaggagctgataaatgagcaaaacccttcaaaatataggccatacaagtggggcaagtttcttgtccacagagggaacagcaattttaagaagcaaaatgaggagaacattcaaatttatcattacaagatagcttaaagggtaaattgtgtatgatattatcatgatatgaggcagcgttgatccaagacaacgttactgatatgaataagtccgatcaacttcactgctaaatttcctagtgtgccttatgtattgaacaatcactgaataaaagaactaaattattaccatttaacaaataaatcccaaagtctcagattacactggtcctcgctcttttcctctttgctctcctcgcgtccacttcccatgcttctgtcaatgatttctgtgtagcagacctaaaaggtccagatagcccttcaggctatcagtgcaagccacctaacacagtc

SEQ ID NO: 34049 - DNA, 255 bp, Glycine max
  unsure (1)..(255): unsure at all n locations
  Clone ID: PAT_MRT3847_13074C.1
gccatcattgtnggncttgttcttgtggttttggtgtctggngtcttcttatggnaaaaatatcattccagaaagaaaactgggcaggaagtgttgctaaaaattgttcacgataactccacaactggggttccatctgagatccttgcaaatgctagatttatttctcaaacagtgaagctagggacacaaactacttcaacctgtcgacatttttcgatagaggaattgaaggaagccacaaaaaactttgac

SEQ ID NO: 34050 - DNA, 379 bp, Glycine max
  Clone ID: PAT_MRT3847_130750C.1
tcgcgtcccccgacgcatgcgcacaggcggaaagaccgatgggatagtctttcagttcagcactcagattgctccaatctttttctatagtgcatacatgtatgaacccatctcaataatgtgttaccaagacgaatcattgctgggcataagcatacacaatactattccttaaaaaaaaatgcttggagctgtagcagcttccacatcactatgctttccaccatccaccatcctccaccgcaattgctgttctcagacgcaatctcacattcaacactggcgtcgcacaatggcgactctttcttactcttatcagcgtaaacctatgcattggtcttcgcacaggagcagtaggagacaacccccccttgcttgc

SEQ ID NO: 34051 - DNA, 139 bp, Glycine max
  Clone ID: PAT_MRT3847_130751C.1
atgcttacgccctcgacccaaaactgataggtgaggtacgtatggcctccctgataacgtttcccttgcgtgagtccgtctataggactctgtcaatgacacctacctattgcatcttatatagattgcatcgcatgta

SEQ ID NO: 34052 - DNA, 287 bp, Glycine max
  Clone ID: PAT_MRT3847_130752C.1
ggctcgagctaacattactcagactgcggcgagtgctgcgagaaatgtcaaactatatagcctagagacatcttatatgtcatggcctgtggacagtcacactactgaacaatcactctcagtgcctgagctcgactactgatgacatcctttggcgtagaccgctcgctactaaggaacagcgacacggtgctggctatgcggctaacatagcctggatccatatcaaatgctgtgattcgactttagctgctgagaccgcttgcgctcgaaatggtaaaggaatc

SEQ ID NO: 34053 - DNA, 347 bp, Glycine max
  unsure (1)..(347): unsure at all n locations
  Clone ID: PAT_MRT3847_130753C.1
ggggaaatcaattgttaagaattaggaaccaagctctaaatgggtcactgagaacatgcaccaacaacccaagcacttggtggattacatctaactgaatctgtcagaagcactgagttggcaggtccttattggtggaaggaaccatgctgtgtgctgcttgtctccatcttctttgtcgcgccatgcattttgttatttcatgtctatactttctggcataccatttcatgtattccttatctgagcattcttgtatgattgcttataattaccacctagaatgtaatgaagaggcagcaagatgaataagaaaattnctttcttctctctttctttctttggga

SEQ ID NO: 34054 - DNA, 828 bp, Glycine max
  unsure (1)..(828): unsure at all n locations
  Clone ID: PAT_MRT3847_130754C.1
ccacgcgtccgcggacgcgtgggaaaatttgcctccgcatattggaaggcgcaaggacacctgccaccacaagctctccgctgcccaccgcccgccgcctctgccttggcgtgttcagccgccatcgccgtccctgcccactgcttctgctggaaagcagcaactaagctctccaccgcccttagtcttgttcttttttgaaaataattttgttgttatggactttgacgacttagaagaagcgccgataaaggccacgtctcgagtctccaagttcgcgccaaaatcatcaaagctcaaacctaaaccaaaatcagaacctgccccccccaaacctgaaccccaaccacccatctccaaaccagagcctcaggaattcgttgcagcaactgtcaaaaagaatgaagatgatggcgtcgaaacagtgccaccaactcatacgaaacccgaactcgacgccactgtcaaaatggaggaggccgaagacgaaccagaatcagttcgagacgatcccatagacgaagatatccctgaagaagacacagttgtgcgcgaaattgatgtcttcttctctccttctgtcgatgcccagactcagctatacgtctttcagtatcccttgagaccttcttggcgaccgtacgatttggatgaacaatgcgaagaggtaaggttgaagactaaaacttcagaagtggagattgatttatccattgatcttgactcggaccatattgacaaagagtttgccaccaaatacaacatcacanagcagactttatcaactacgtggaagccatctcatgcaaatggatgtgctgttgggct

SEQ ID NO: 34055 - DNA, 1354 bp, Glycine max
  Clone ID: PAT_MRT3847_130755C.1
attccccgggctcgacccacgccgtccgaacacaattacaagttagaaccccccatgtcaaaggggtagtcttttggagccaaagctttattcatcatcttcccctctaatcaaccaagggagaagttcctcttattcaacttttattagcagcaaaagctctcttctttattctttttttgtttctaataaggagttgagacaattgggggggggtggacttgttgtgggtgttgccatgagggagtttccttcttgttttggagaaaatggtgttcaggttgctgactcatcctcatcaagcaccacaagagcagcacaaaatgtggtcacgtgtgtctatcagtgcaaattaagaggccattcaagcttgattacagtctcgtggacaaaaactctgattggtcaaggcttgagtgtggaaattgatgacttgggaaagcattgcctctgcaaggttgagataaagccatggctcttctcaaagagaaaagggtcaaagaatttggaggtccaatctggtaaagttgacatcttttgggatttgagtagtgccaagtttggttcagggcctgagccaatggaggggttctacttagcggttgtgttcaacaaggagatggtgttgctcctaggggatctgaaaaaggaggcatgcaagaagattgagagtgattgtgcttgcttttctcactctggtgctgtttgcattgcaaagagagagcacatttttggcaagaagttttatggtgcaaaggctcagttttgtgacaaggggcaggtgcatgatgtgagaattgagtgtgacacactagggcttaatgatccatgtcttgtgattagaattgatagcaagacagtgatgcaggtgaagcaactcaagtggaagtttaggggcaatcacaccatcgtggtggatggaatatccgtggaagtgttttgggatgtacataattggctctttggaaatgctatgggaaatgcagtttttatgttccaaacttgcatttcaactgagaagctgtggtcaagccaatctgtttctgatccttctgttcccacatgggcttattctcagcagttcagggattcccagttgcaaggtcttggattctctctcattttgtatgcttggaaaaatgagtagtcggtataggacttataattatatcttattcttgagtgctaaactggtattgccagccacacagttttctacaatcttgttatcagattacttgaaactcataaactaatctctttctttgttttattattttctgtttcgtttaattagttatttggtttctatgtcttacaaattttctatctttacgctttaatcccaaaaaaa

SEQ ID NO: 34056 - DNA, 1694 bp, Glycine max
  unsure (1)..(1694): unsure at all n locations
  Clone ID: PAT_MRT3847_130756C.1
ctctctatcgcttctagctgtagactctccagcgcattccaaacctctctctttctctcatcccctttctcttctctttccctcatctcctttttcattactcttccttgctccactcctcatattctctttttctcatcattcccctaatcctcatattatctcttattgggttgttgcttttttgttgttgttcctttctttttgctgaagtacctcttttgtgcttcagaaacttgtccatcatagcctgttgtctcctctagttgctcctctttaattccttcttatttattcttccctcccctgttgcctcctcccgaaacttgcccgtcatgccctttgaggatggctacacgcccttgtttggtgaccataatttggccatccatagagatggcaaatcggttcacctttcacttgatgaaagaacaggttctggatttgtgtctcatgatctttaccttcacgggtatttcagtgcctatcaagttgcctgccttctgattacacttgcaggagttgtggtgcattacttttatattcatggtgacatgttccagaataaccatgatgaaatcgactttgagtttttggggaacattagaggcaaagactggaggattcagaccaatgtttatggcaatggtagcaccaacattggtcagagaggaaagatatggtctctggtttgaccctgcagatgatttccatcagtacactattgtctggacagactctcagatcatattttatgtggataatgttcctattagagaagttaagagaacagaatctatgggaggagatttcccttcaaagccaatgactttgtatgcaaccatatgggatgcatctgattgggcaaccaatggaggcaaatatagagtaaattacaagtatgcaccctatgttgctgagttctctgacctggtcctgcatggttgtgcagttgatcccattgagcatgtggccaagtgtgacagtgccctaggttctgaagaagttccctctggtgtcacccaagtacaaataaccaaaatgagaaacttcaggttgaggcacatgacatattcttactgctatgacactgttagatacaaagtccctccaccggagtgtgtcatcagccaccaagaagctgaaaggcttagaaaatttgatcccataactttcggcaatggccggcgccaccgtggtaaacgacaccaccatagtagtagaggaagccaagaagagattactgcttcttcattttaatgtatggttccatatgcagaatttgtcataaaggaaatattttcatatatgaatcagtttgatttacctgggttaccaaacaatatgtcttttgatcaatgatgttttcattcactgaaaaatgggtcattttttttgttttagtccctaacttttaaaccataagttctggtctccttcacttgtggttttagaagttagggacttaaaccaaataagacccattttaggcacctaaaacatcattaaacttaatatccttttttcatttatcctttcattntggtgtatagaggggtttggacatagaagtccttaatatgtttagtttatgatatggttcttgctggtgggttntttttatagtctttcatccctttaggttcccgggtatttcctcattgatttcttatgctattgtacaaattgaacct

SEQ ID NO: 34057 - DNA, 1113 bp, Glycine max
  unsure (1)..(1113): unsure at all n locations
  Clone ID: PAT_MRT3847_130757C.1
gcatttttgttgtcactggggatagaacgtttccgagaccaacccagtaaactctctgcgatggaggatcacaaagttgcgatttttttgtgattggatcggatgcgactcagcattgtgggtatcgaagcaatgcatagagcgatctcgtttctcattcaaccgcgatgcctccttctcatagttgttctctcaattttcttgattctcgcattatctggttccaaacgagttgaagagaaagaagaagaacttgaaattacagatagagtattcttggatgttgatattgatggacagcgtctaggtaggattctcattggattatatggcaaagttgtaccaaaaactgtggaaaattttagagctttgtgcacagggggagaaaggaaagattgccagtggtgtaaaacttattacaaaggaataccatttcataggataatatccaggcttcatgattcagggncggtgacattgttcatcatgatggtagaggatatgaatcaatttatggtggcacttttcttgatgagaatttcaagataaaccattctatgctggtgtagtctctatggtgaattcaggtcttgattccaatggctcacagtttcttatgacaacagtgaagacgcttggttagatggagaacatgttgtttttggcaaggttgtccaaggcatggatactgtgtttgcaattgaagggggtgctggaacctacaatgggaaacccagaaagaaggtagttattgcagactctggagagatacccaagagccagtgggatatggaaagatgagcttccttggtgaaacggcaacaaattattcgacaagttcaaaaaattgaattagatctttgttttatagtattaaatttcctctgtaaaaatgcctacgaaatatcgctagtcaatggttcgaaaaaagtcccatgtcaataaaatgtttcacaatagacccattggtatttaatatgtaaaagtgacctaaaagagccaatcatcttttttctttattggtaagatatttttcagattttttaaacgtttttcaaatatagtggtatgtttcccgcgacggtttgtgcaagatatgaagttttggatctg

SEQ ID NO: 34058 - DNA, 751 bp, Glycine max
  Clone ID: PAT_MRT3847_130758C.1
gggcaccggtgttgatcggggtagttctgttcgtgctgctccaaccggggctgcttttctcctttcctgggaacgggaagcagcttgagttcggtagcatgaagaccaacggcaaagccattttcatccacacgctcatattcttcgcgctctactccgtcctcatcctcgccgttaaaatccatatctacaccggatgaaccggttcccgggatctgaggtatcatttcgttattggttactaagcaaagaaaaggaaaaacacaccaccattgctgttactgtaactgcctgttcttctttacttgttctttttgttatctttttatggaaataataataaataacaaaagcaaagatttttcttctttttggaaaaaaaaaaaaaaaaaaaaaaaaaaaaaaaaaaaaaaaaaaaaaaaaaaaaaaaaaaaaaaaaaaaaaaaaaaaaaaaaaaaaaaaaaaaaaaaaaaaaaaaaaaaaaaaaagggggcccccgacccccaattttttttcccttttagggggggaaaatggccccttggggaaaaaaaggaaaaaactttttcctggggaaaaattttttccccctaaaattcccaaaaaaaaaaaagccgaaaaaaaaaagggaaaaacccggggggcctaaggggggggccaaccccaaatatttggggggcgcccactgcccctttttcaaaagaaaaacccgggcgccccatttttttaaaaaaaccccccaccccccggg

SEQ ID NO: 34059 - DNA, 517 bp, Glycine max
  unsure (1)..(517): unsure at all n locations
  Clone ID: PAT_MRT3847_130759C.1
ggcgacgagaacgtaaaatagtaaaacatatcagaactcatacaccctacctaaggaaagttcggttacaccacatgatgaattgcatagaatgttcaatatgagaagggttttatttatttctcaacattagcccgttcgattgggaactgtggtatttcatacataatgaaacgagtctattgaacactaacactctcaattaatatgaagggtgttttagatattacnagcattaaataagatagttagttgaaattttcttatatttgagaccaagaaaaaaatgttttttctctctcttatatttaagaccggagggagggtcattttagaaattgacttgcttagggtttatgctactgacttgtttatttagttaggtccacttgattagtgactattactatggattttgtttggtcctatgaggtctggagttttgcttaagctttgaagtattctgtctatttgcttgattttcatagatccattgttgttttcccactccagtgtc

SEQ ID NO: 34060 - DNA, 220 bp, Glycine max
  Clone ID: PAT_MRT3847_13075C.1
gtttattttttcgtgtttgcattcaccgttccacagaaggtaaaaaatataaattgttcctctctttctgtggtgtgtctcagataaaaatgtcatcatcacgcagtaacaacttttacttaactcttgaaatttgttcagagttggatttgagaggcatgtctgtgaggagtgtggagtctctgggggagaggcaagaagagaggatacacaaacagtg

SEQ ID NO: 34061 - DNA, 313 bp, Glycine max
  Clone ID: PAT_MRT3847_130760C.1
tttttctccttcccctttacccatttcttagtttcttcttatagatgttccttctttcaagcatctgctgctttatgatgttatgttaacttatgggagttgaccccctttagcttgaaagaatgtgagggtgagagcaagtgaagcttattgagctactatgtcttgtctcaaactgtcattcaatattttcttcagggtgcttggaaatattgaaaaccatcaaatcctcatccttattttattttgtttttcacatttgtccccggaaatgttatctcctgatttatttagggctttcttgtgatatcga

SEQ ID NO: 34062 - DNA, 333 bp, Glycine max
  Clone ID: PAT_MRT3847_130761C.1
cggtctccgttttttttttccaatatattgaacaatagctttcgggtgtggatcaaatgcgtttactttatataccccaaaaactgtgatatctcttagtctacgacctctttgaaaacgactgaacatacttgcacatggtgcccagagtgatatttgaaacaagtgtctttcccaacgttaacattatggcagcttacgaacgggtcacataaagataacgagcccaccaacgatcaggggaattgccatccgaggctgaaacaatataatcacatatcccagatggagatattggcttgcgcgttgtcaaaagctcaggaccatctgatt

SEQ ID NO: 34063 - DNA, 264 bp, Glycine max
  Clone ID: PAT_MRT3847_130762C.1
gtaacttggggagatggtcgtgccaagatactcaaacaagggacgatctgtgtgcactcgttatcccttggaggacagcgtactggctacggaggttctcatgtccaaacaacgaggtatctactttgggcaagatctgatgatgctaactcaacgctggtagcccgagaaattgctagcaggacactgatcgaccgacctattcattctgtgcatcaagaagggatcaaatctggcgctcgagattggacttatgaattcttg

SEQ ID NO: 34064 - DNA, 237 bp, Glycine max
  Clone ID: PAT_MRT3847_130763C.1
gggggggggggaaattttggaacacacagcattcatttatttttaaaatatttatatcattcaaatggttgaattggtcagcaaaattaatttccttatttaatggctgggtataggtggaatctcttacgagggttttgccacatttaaaattttgttaatttccaactttgtaatttaccataacagaaatttttattctgcagggcttgggttatatacacattgggggcttgt

SEQ ID NO: 34065 - DNA, 403 bp, Glycine max
  Clone ID: PAT_MRT3847_130764C.1
agagctatactagctactccaacaattaattagatactacgcaaattatatacagcccaaagcattttctcaaataaaaacaagctgcataaaaataaatcctataaaattttcccagataaacgaaaattttcattttctcagaaccatttctcatcacctgctagacaattctccccatggatgctagttccttcaagccactcctctagcttagcttgtttactagctttgaagtcatcaaatttttctcatagggacaataacttatccccaatatcagttggttcaggctgagattcaccttcaacctggcttgataggggtgcttagcagcttgtgaaaatgctacgggacatctgcggcttctcagcattggaccttactgatccaatagaatcaa

SEQ ID NO: 34066 - DNA, 153 bp, Glycine max
  Clone ID: PAT_MRT3847_130765C.1
acgcccacgcgctgcgtgcgggtgacatcaaacaagctggcttggtactccggcgtggtacagtcttgcggtgggggtaacgttacttaccactcatggcccagctccaagcctcttggtttcaaccaatcctcggccacgctgctcgcagac

SEQ ID NO: 34067 - DNA, 244 bp, Glycine max
  Clone ID: PAT_MRT3847_130766C.1
aattcggctcgaggtaagtgtgaagcgactggtacgacagcgagcaagtatgagagactccttaacctacaggtccataagccagtcgtccactatttatgacgcgctacacccaatacgcttttcgatcttgataagcttgcaaacaacgtagcaagtgcgaaagagcgcgcttgacttgcacatgatatgactagcggatacttggctgatatggctgagttcataaagcatgctgcacaga

SEQ ID NO: 34068 - DNA, 572 bp, Glycine max
  Clone ID: PAT_MRT3847_130767C.1
taccgtacaggtggtgcaatttgcagccttcatcaacttaaacttaaacctaatctacttggtgttgttccccatgagttgcttcttagttattatggtgttcagcttagtctttgcctgtttgttaattagcgttgtgaggttaattcagttcttctagatcttgtttgtaaaaatgatctacagctaggactccagcttaaaaacatacggcaatgtaactttcatgccgttaacccggatacttcgtgtccgcttctctagtggccttgggtttaagatcagcagctgaggggcctggataaaaccccgtgtcaaagtcatttgtataatcacttttggaacgtgccgggcctacagctctacaaccttggccttctccttgttaccttgtcttttgtccttgtgaattttggtccgcagctgggtgtgcccttgcacagcgccctttcgtgcattctacattttattatgaccctggattgctaatacttgcagggtcgcaacagcagctagcagagttacacacagttgaagaattgtaatggctaatggcaccattacacaagtag

SEQ ID NO: 34069 - DNA, 520 bp, Glycine max
  Clone ID: PAT_MRT3847_130768C.1
ctcaaattctgacaattccatttgggcctccccaaaccaccattattactccgggagccgcaagtttaacggccccggccaactgtttaatcaacggcccctctaccggtaaattaaaaaacacgatccgttgctttagcttcgccaaggccccataaaagggggcgacgatcccattggcttccccttttttctaaacgacggaaaccaaaaccaggatggtttttttccttttaccccccccttttcgggaggggggggccacaagaaaaacacccaacctggggtggtttccgacgactgaaaaaaacgggaacaaattcgcactccccccccttttttggggggctgaacaaattcaaaaccatccgtgtctgggggaaaaaaaaggcggggggaccccctttataaacccatgggcgccccataaaattttccttcacaggttaaaaaacccagggtgggggaacccccttgggattccacccaatttggggacccgaaactgaaaaaacccctg

SEQ ID NO: 34070 - DNA, 510 bp, Glycine max
  Clone ID: PAT_MRT3847_130769C.1
gcaacaatggtgtttattaatttaagtgtatcatataaatattgatctctctctcttgaaaaacaaataagcatattttaaatttaagtccagaaacatttcctcttctgctaatctttaaaatggctagcaacgcattttgaacctccttatatcaaatttgagacctcaaaaatgaaacacagatattaaaccaaatttcaaaattgataataaaaaggtcataaaaagaaattataataaaaatatataaaattttattgctcgttctctaaatattgttcagagatattaataacacattcaaaattatttaatggcaagactgaaagttgtatagcaagacaaaaatattgacaaaacatccataattattcatcacttgaaaaaaattaaagtatattttttccaatctccttataaacaacaaaaaaggcatattttacatttactaagaaaactaattaacttcgttaactctacacaattaaaggctttaaccttattaaa

SEQ ID NO: 34071 - DNA, 487 bp, Glycine max
  Clone ID: PAT_MRT3847_13076C.1
caagtgaatacaattcaatgttccctgataaaattcaatacagaaatgtgaactaattcaatactgtatatttccaaatagtcattgaaatcaagcttttacaaacataaagcatttaacaagttgctaaagctaaaaccattatttaactcgtgatgttcactcttctgattgcctttgccctagtacaggaatgtcccaacgttattgtgctcccagatcttgtgaactccgtaatccacagcccgctctccgaggaaggcgccggcgatgatgaaggtgacgtagacggagttgcggcgcatgaggaccttgtagaggctttcgaaaacgcctcctcctctgcttcttcgaggcactgaatccattacctctgttagggttaggttagggtttcagatctcttctctttcgcaagtggacggagaatgagtcaacgaggtgagaccggttcacggtggctgctcagaattcaacaaccgcgaat

SEQ ID NO: 34072 - DNA, 554 bp, Glycine max
  unsure (1)..(554): unsure at all n locations
  Clone ID: PAT_MRT3847_130770C.1
tctcccttattctagaaggaaaaaaaaccgtaacaaagggagannnttgtggttgagccaaaccatgatagataaataagtaataaccaaccaaatcatgcttcaggaacttcatgcaaccttttcaagcattttccctcttcctcttcaatgactcttgcttctgcaacaccatttgccttctaaacttcaaaatgaaaagatcagcagcaaggtcaatctcatcctccagcttaaactctttccctgcctcttccttagaattcttcaccaaatcaatcactgaccctcnnngatccaaatcctcagactcaaaaagtgtgtgtgtgagatccgggtacttttcatcatcatcatcacaatcataattgtagtaaccatcnnngccatcatcttggtcttgttcctcctccaccactagggtttcactagggtttggcaaggcttcatatgagtgtgcattgctgttgtacaacactatggccttgcttttttggtgatgatcatcattgctgatgccatcttccaataagcaatgatcttccttttgttgt

SEQ ID NO: 34073 - DNA, 204 bp, Glycine max
  Clone ID: PAT_MRT3847_130771C.1
gccagagtatggagggcaagacgcacaccttgtacatggatacccaatacaatgaatggtaatgatagcattgctgaccactgaaaacgccgataccatcgcacacaatgtggatatggcggacaaactaagtccgtcttacacaagaaggctaaaaccaccaagaagattgctctgaggttgcaatactcatgttgcaagcat

SEQ ID NO: 34074 - DNA, 755 bp, Glycine max
  Clone ID: PAT_MRT3847_130772C.1
ggggactcccattccgactcttagccgccgatctctcagggcttgcatcttctcaggtaaggtatgtgtgctctagacccatttgccccttctatgcattctgcaaatcaattattggaatcattgagtaacagaaggaaagttctcatttttactttttatgttttaattgatttactttttctaagtttttctgttagccaacaaaacgtgttaaccttgaggcggggttgttgttgggggtttgaagacggctattttcatttttattagttggagttagggggatttaatcctttggaaaattggaattatttaaggaatgttcaaatcgaggcttgacccttttctgttctccttaattttgtttagggtttaggggctaggcgctctaacattatgttgtttttgtacagctgtgaagatgtacacatcaaggaagaaaatccacaaggataaggatgctgaaccaactgaatttgaagagtcagttggacaggcattgtttgatctggaaaataccaatcaggagcttaaaagtgatctgaaggatttatacataaactcagctgtgtaagaacgtgccttaatggttgtctgtgtgaagataatgagatttttgcttgtctcttgactatcagttttcatgatctacagccaaattgatgtttctgggaaccgcaaggctgtggttatccatgtcccctacagattaaggaaaggattccggaagattcatgtcaggcttgtgagag

SEQ ID NO: 34075 - DNA, 137 bp, Glycine max
  Clone ID: PAT_MRT3847_130773C.1
tgaaagggacctatttatggattcgggccgggtttgaggaaaaaagctgaggtattccccctcgccgagtcaattggaagcggagaatcctacacggcgcccccgctggaagaaccggcccttttaaatgtgaaaag

SEQ ID NO: 34076 - DNA, 240 bp, Glycine max
  unsure (1)..(240): unsure at all n locations
  Clone ID: PAT_MRT3847_130774C.1
ctccctccgctgcagaagacacagaaggggggcttaaaatcctctgggaacccttattttatctattctctctctttcttttgtgtgctaagcagctagaagcaatggggaggggaanaagccatgcctctttcaccatgtgttgcgatgcgtgtgggggggagctctcanagccttgtgattcctgtggggtccaccactgtggaggatcaaaagaactactacaccccanatccacat

SEQ ID NO: 34077 - DNA, 420 bp, Glycine max
  unsure (1)..(420): unsure at all n locations
  Clone ID: PAT_MRT3847_130775C.1
cgtcctttgtgaagctttttagctttttttctatcacacacttacagctttccaaccacctacctctcaataacaaaatgtcctccttaaacgaaagattgaacaaaccagacatcaactccagcatttatgaaaatattttggagcacattggccgcacaccaatggtcaaacttaaccgtatccctcaaaagtatggtctagagtgcgaattggtcgccaagtgcgaatactttaacgctggtggctccgtcaaggatagaattggtaaacgtatgattcttgatgctgaaaagagcggaagaatcaagcctggtgatacattgattgaaccacatcntgtacactggtatnggtctngctctgactgctgcagtcaggggatacaacatgattatcacttatgcagaaaagatgagt

SEQ ID NO: 34078 - DNA, 1690 bp, Glycine max
  Clone ID: PAT_MRT3847_130776C.1
ctctcctccttctctctccacacctccaaccactctttcaaacttccaaatttcaactcttacaacatatcaaacaaaaattccatcaaataatacacacactttagctgttgttgtgcacttcaaattaattaaacatgctagttcctcatccttcaatgctaattgcacctcaaaacaccgtagaaaatcatgacaacatcatggaaggacagaaactacactttgatggatctttgatgccaaaccaatccaacataccctcccagttcatatggcctgatcatgaaaaaccatgcctaacaccaccagaactccaaattccacccattgacttgaagtgctttctctcagcagatccacaagctttgtcaacagtttgtgctgaattgagtgaggcatgcaagaagcatggcttcttccttgttgtcaaccatggagttgatagcaagctcatagctcaagctcataagctcatagatgatttcttctgcatgcaactctcacagaagcagaaggctcagagaaagattggagaacattgtggctatgctaatagcttcattggaagattctcctccaaacttccttggaaggaaacactttctttccattattctgcagataaatccagaaaaactgtggaggattatttccttaatgtcatgggggaagatttcaagcaatttgggagtgtgttccaagaatactgtgaagccatgagcaaactctctcttgggataatggagcttctggggatgagcctaggagttggcagggaatgtttcagagatttcttcgaaggaaatgagtcggttatgaggttgaattactacccaccatgccaaaaacctgagttagctttaggaactggacctcattgtgaccctacatccctaaccattctccaccaagatcaagtcgagggcctccaagtctttgttgatggaagatggtactctgtcgctcctaaagaagatgctttcgttgtcaatattggcgacacatttatggctctatcgaatgggatgttcaagagttgcttgcatagagcagttgtaaacaacaaaattgtgagaaaatcacttgctttcttcctatgtccaaatagagacaaagtggtcacccctccaaaagatctaatcagctacgaaaattcaagaacatacccagatttcacatggccaagccttcttgaatttacacagaaacactacagatctgacacaaaaacacttgatgctttctcgaggtggctactagaaaaaaacaatccgaacaggggtgcccccacaaatgttccatggccaacaaaatctataaactgagctttaacttgcatctgcttgaatgaggaagatatgacatcatataaagtgaaaaagagggtgcttttggtgggtcgacttgtgaagaaaaagataacagaaacatcaaaaagggaagggctaatcatcagtaattagttgtggtgttagtgttgggagaatcctatatggtgcaaatggaagaagaactgaggccatattctttggaataaagagagttgatttgtgtagtgaagttattcgatgttgtcactacttatgcattattagttgtcttgaactatgttgtagttatgtgatatgcatgtatgtagaacttttaattaattaataataaactgcattgcattttctgtcatcag

SEQ ID NO: 34079 - DNA, 533 bp, Glycine max
  Clone ID: PAT_MRT3847_130777C.1
ctttaaaatactcaattctgttgtaggatggtatgacttggcatgaacaatagtaaatctagaagaatgttagttcattttttagttttcttttatttctagcttgaactgagaggaatgtttttgcaaataagaatagagaggaatatgctatttaaataaaaaaaatcattttaataacaatgtaaaaaagtattctattgtaattttattttttatttgtctaagactgggtgcttgaaagcaatattgggttgtgagtaattttagatgattttggaggacctattaaaggagataaagttcttatagtgcctatctttttcatataaggtagtgtttggcctttttttcttctaacttttcatcgaagaaacagcttaggcatgaagagaacattcatagagcattgcagagtgctttcttccgccttatctccgtccctatgttagtatatatgaatttctctaagtcattttctgaacacaagtacttttgtttgttgctaagttagaaagagactagaatttata

SEQ ID NO: 34080 - DNA, 257 bp, Glycine max
  Clone ID: PAT_MRT3847_130778C.1
ataaattaagagccataattggagtactgaatgatatttacgtttacggcgtgtgatatacagatactagctagaactagaggaggctcccgtttcagttacattcgattcaacgattgaccagaagagagttcaaagaataaatttagatcacccaagattccaatattgctatgaaacaatagtggcatctaacgagtttattacgagtgagtgtatccatatggggtaataataaaagggggaggagagcttga

SEQ ID NO: 34081 - DNA, 441 bp, Glycine max
  Clone ID: PAT_MRT3847_130779C.1
ctcgagccaacattcttctgtagtgctgcggtcttggttgatctcactcttgatgatgcttcctggtgcccattcagaaacttgctgaggcgtggtaatgcgtgactacacaccaacagttcttatgagcttggtgggtgatacgctgctgatatatcatgatggaggtatctatctgatcacggtgcttactgctgaggatctagattctgaaagtggctcagactgtgaaaagcatgcgaagacaatgagtaatctgctgtctctagatgtcatgatgatgattcttgctcatgagcatcactttctattactactttattgaggtgaaacatatctattcagagatctctgactatcatctactgtgatctgaaggtatgcttgtggacttgtattgaacctagaaagctcatagctcaagaccttgatagagatgat

SEQ ID NO: 34082 - DNA, 584 bp, Glycine max
  Clone ID: PAT_MRT3847_13077C.1
gtacgttcatcttcttcctttcaccaaaggcgaagatcgatcggttactattcggttctggttttttgttttcgtgctgtttttgtttcagatctgatggtttttcgtgttttatgttcagattatcaacgatcgtgagactggaagatccaggggttttggatttgtgaccttcgcctcggagcagtccatgaaagacgccatcgaagggatgaacggccaaaaccttgacggccgtaacatcactgttaacgaagctcagtcccgtggtggcggtggcggcggaggcggtggaggtggtggatatggaggaggtagcggaggaggatatggacaatgtgatgctggcttacaacgctcttaaattgttgataatgtttttttaaattgagtcattaatgatatctctgcaggcaaaacataccgaacaagaaccggtacaaggacaacttataggtctgctgaatatgtatatgggagttgcaatggattgcatttctaaatgttacttaagggtcttcttccatcatcttagagttttcaagttaaatgcttgatggctttcactatgtaagagagagcta

SEQ ID NO: 34083 - DNA, 179 bp, Glycine max
  unsure (1)..(179): unsure at all n locations
  Clone ID: PAT_MRT3847_130780C.1
atggccccaaattctcgaagtctggtgatgctgncattgttgacatggtccctggcaagcccatgtgtgtnnaaagcttctcngactaccctccacttggtcgttttgctgnncgtgacatgaggcagacagntgctgtgggtgtcatcaaanccgtggacaagaaggctgcaggagct

SEQ ID NO: 34084 - DNA, 307 bp, Glycine max
  Clone ID: PAT_MRT3847_130781C.1
ggattcctcaatgatctcttacccagctgataccactgacaaccctgcctgagccgagatgactgctccattcactgacctcaatgccttgcatgtcttacccaccataaaaaccaacaatgaacttacctccattgctagcaacccaggaaaactgttatgcatgcaggtgtgtacaccacttgtgaataagaagtttgagactctttcctacctgccagaccttgatgatgccacattcgaagatgaaccagaataccttcttatgaatggatggattccttgcttgtaattccagtagcagcac

SEQ ID NO: 34085 - DNA, 248 bp, Glycine max
  Clone ID: PAT_MRT3847_130782C.1
acgatatgtatcgccaatagcgaagtgtgttgctgcattcgcagctaaaattcttgttggggcatgggtacctgctgtgaatgtttctgaatccactctacaccatgcaaagttctacgaatcacgcctattaccagatatgatcgctgatggagattaccaaagcttatccattggatgcagttcttgacaatctcgatgatgcgcctgatgatataaaagcacacaatcgctatgccatatcatct

SEQ ID NO: 34086 - DNA, 277 bp, Glycine max
  Clone ID: PAT_MRT3847_130783C.1
aactggctcactgaccggggatctgtacccattacagtaacgcacagaaacaacgaccctatcatcgtcttttttcctcatttctactgtacaccctacgctacactctatgccttatctcttctacttctctctctacaaaagtacatgccattgatcatcacttcgatccatactatagtcctacacctattcacacttccaacaactcttacaccaaacacacatccttacttataagctcttcataaatcaacctatggctcaggctctgcac

SEQ ID NO: 34087 - DNA, 306 bp, Glycine max
  unsure (1)..(306): unsure at all n locations
  Clone ID: PAT_MRT3847_130784C.1
ccaccccatcntacacaactcggaanccagatcgcaanactccngcnancaatcacccacaacaacnnnnccaaagacnngaaacacaaaaacancacaaaaccncancncaacnacacaccaaanacncnacaanaacccanncaacanaaccanaanncncacaacacanaactnnccannccacacaccacancagaantnaaatnacnccaatatnaacntnaccnctcgaancacacanccanacaaaccaccgaanaaacaagnccangnacaatncnannaacaaannaacaggatccc

SEQ ID NO: 34088 - DNA, 214 bp, Glycine max
  unsure (1)..(214): unsure at all n locations
  Clone ID: PAT_MRT3847_130785C.1
gaattaagggttacgattcacggagaagggagccatgagaaatcggctatccacattccataggaaggcatgcaggtcgcgtcaaattactccaatctctgacatcggggaggtcagtgacaatanaataatcaatactcgggcttcatgtgagtcatgcgtacattgtaatgaagtacatatcttaaatcccttaactgagtgatccattgga

SEQ ID NO: 34089 - DNA, 1279 bp, Glycine max
  Clone ID: PAT_MRT3847_130786C.1
cccacgcgtccgtacggctgcgagaagacgacagatagggttttggagttgggtagggtgaattgcaatttcaattaattagaattcaacgtttgcaaattgcatattgttcttctcttcctctcttcctctgactccatgtcgtcgataacgggcatccaggggcaacctcttgaggttacggtggtttcgtgctccaagttgaaggacacagaatggatttcaagacaagatccgtacgtttgtgttgagtatggcagcacaaagttccgaaccagaacctgcacagacggcggaaaaaacccggtattccaagagaagttcatctttcccctcattgaaggccttcgggagctcaatgtccttgtttggaacagcaatactctcaccttcgacgattttataggaagcggaaagattcaattgcacaaggttctctctcaaggcttcgatgactctgcttggccacttcagaccaaaactggcagatacgctggtgaagtaaaagtcatattgcattacgcaattgcaaatcaaaggcataaattagtgtcaggccatgctccatcagcacctccgtatgtggcaacagcaactcctcccgtcccttcttcatattctacttcatacccgccacctccttctgctacttcctacccaccaccaccatcacctccctctgcaactccttaccatacaactggatcttattcttacccaccgccgccgccacctcctacagcttaccctccctattcctcacattcatctccctatccaccatcatcataccccccacagccctcctcgtatcctcctcctcctcccccatcatcatatccccctgcttcagcttatccatatccaccacctgcaggctatccttctggaatataccctccaccaccttactgactgagatcttctaccttctcaaccaaggaaccaacatcaacatgccttgtatgccaaaagggccttcagactccctttcaatgcttgttcaaacgccccgtgctttgaccttttgaggtgtcttgcttgtaaagtgtttattttatacacattcagatccaattaaagggcaccattttttttttcgcaattggatgttcactgaccattttccggttttcttttgtctccgtaaggatgaaatatctatgaatcgtttatcaggttgctcaaaaagtagagttgatcagcgttaatcagattactctatgttgaattcaacccccaatgagcttcatgagcaactaaaatcaatgcgtccctt

SEQ ID NO: 34090 - DNA, 2615 bp, Glycine max
  unsure (1)..(2615): unsure at all n locations
  Clone ID: PAT_MRT3847_130787C.1
ccacgcgtccgcgtccgctgcatcgtgtcgttcaccgataagatgtcgtattaaggagataaggtattctcgttctccttctccatacaagcgatacagtaggtctgtgtccaggtctctctcaaggacaagctccagaagccgttcaaggagtttatcaagagatgcagaaaatccaggaaacaatttgtatgtgacaggattgtctcctaggatcaccaagagagaactggagaaacatttttctgctgagggaaaagtgatagatgtccatctggtagttgatccttggacaagggaatcccgtgggtttggctttgtgacaatggagactcttgaggaggcagatcgatgtgtaaagtatctgaatcgctcagtacttgaagggcgtgtcatcacggtggagaaggctaaaagacgacgtggtcgaaccccaacaccagggaagtatctagggctgagaactattcgtgctcaacggcgttctccaagtgactctcctcgtcgctcccctagctattgtccgtatagaagaagctatagccggtctccctattcttcagaccgaagtaggagtcgttatcaagagatgcaganaatcctaggcggccaatgtccatctggtaggggattgtcgcctaggcgtgcccagcggggttcgccgagtgcactttgctcctcgcgcgcagagcgcgcaaactgtcatcttgtcattcaccgagaaagtcgtactgattcctcttcatctttcgttaaagcgagtacttttcgttcttgatctgttggttacgatgtcgtattcaaggagatctaggtattctccttctccttctccttctccatacaagcgatacggtaggtctgtgtccaggtctctctcaatatcaagatccagaagccgttcaaggagtttatcaagagatgcagaaaatccaggaaacaatttgtatgtgacaggattgtctcctaagggacccccgggatctggagtaacacattgctgtcttgaggaggcggatcgatttgtaatggttgtgaatcctcggtcctggaagtcccgttggtttggctgtggaacaatggaggcccttgaggtcgctgtccgatgggtggagtgtctgaatcgcgatatccttttgtgccctgtctcgttctcaaaagcgatacggtagttctgtgtccaggtctctctcaatatcaagatccagaagccgttcaaggagtttatcaagagatgcagaaaatccaggaaacaatttgtatgtgacaggattgtctcctaggattaccaagagagaactggagaaacattttgctgctgaaggaaaagtgatagatgtccatctgatagttgatccttggacaagggaatcccgtgggtttggctttgtgacaatggagactcttgaggaggccgaacgatgtgtaaagtatctgaatcgctctgtacttgaagggcgtgtcatcacggtggagaaggctaaaagccgacgtggtttacccccctcggcagggaggtatcgaggactcagaactattcgtgcttggactgcaggctaaaggacgacgtggtcgaaccccaacgccagggaggtatctaggactgagaactattcgtgctcgacgtcgttctccaagtgactctcctcgtcgctctcctagctattctcccttcagaagaagctatagtcgctctccctattcttcagaccgaagtaggagtcgttcttactctcctgactataggaggaggaagtctaactctccatatcactccaggcggaggtcttactctccatactatagccggtacaggtcctattctcgatatgatcgacacaggtcatattctcgatctcgctctccgtatagcaggtcacctgtcagcatgcatgacagatcatactctccctatgaaatacgatatgactcgccggatgcgcactcctacagaaggcaccgttaccgatctgtttcacgaagtgcctcgcctgatgatccttattatggaaggcaccgttacaggtctgtttctcggagtgcctcacccaggccaaggagaaggtcaaggaggagctactcacggagtgctacacctgtttcaaagagaagcaactcacgaaatgtgtcccccaggtcaaggaggagccattcaagaagctctaagaggagtggcaaatgtgagaaacgctactcaagaagctcgagtgtgaatgcaagttcaagatcagtatcgaggtcaaatactccaaggtctacctctccttcaacttgaaatttgttggtcctatatggcttaacatcttaggcttatagtggataatatattagtgtggtatatgtatgcagttctagatggagttttcgtttggttccgttcaggacttgtctaaaaaccacctgatcttatttcatgtagtatgggattgaaattatgttactcagtatagattatctaatttcgaactttcccttggtttagttccatttttattttgccattatcttcttttagactttgtattttctgtgttgtcttttctgatgttcagatgatatggtctccctaatgtttacattttttataaatagatgattgcccgattacccggtat

SEQ ID NO: 34091 - DNA, 1670 bp, Glycine max
  Clone ID: PAT_MRT3847_130788C.1
gggtcgttcaccgataagatgtcgtattcaaggagatcaaggtattctcgttctccttctccatacaagcgatacagtaggtctgtgtccaggtctctctcaaggacaagctccagaagccgttcaaggagtttatcaagagatgcagaaaatccaggaaacaatttgtatgtgacaggattgtctcctaggatcaccaagagagaactggagaaacatttttctgctgagggaaaagtgatagatgtccatctggtagttgatccttggacaagggaatcccgtgggtttggctttgtgacaatggagactcttgaggaggcagatcgatgtgtaaagtatctgaatcgctcagtacttgaagggcgtgtcatcacggtggagaagaacgcaacaccacagtttctgtggcagcaggttagctgtgtgaagcagctcttcatcaaactctcaaatcacaactaaacaaacaaatcatatacaccaccaagtatcagatcattggggttgctaaaagacgacgtggtcgaaccccaacaccagggaagtatctagggctgagaactattcgtgctcaacggcgttctccaagtgactccctcgtcgctcccctagctattctccttatagaagaagctatagccggtctccctattcttcagaccgaagtaggagtcgcttactctcctgactaaggaggaagtcaaactatccatatcactctaggtcatcctctcgttcaccgataagatgtgcgatttgattacctcagggtatactcgttctccttctccatatatcacatacagcctgtctgtgtcccggtctactacaaccacaagctcgattagccgttatacgattttcacaagccatgctcaagctccaggaaacattatgtatgtgacaggattgtctcctaggatcaccaagagagaactggagaccctccgcccacgcgtccgcccacgcgtccgcccacgcgttcgcccacgcgtttagaaagtcgtactgattcctctttcgttaaagcgagtacttttcgttcttgatctgttggttacgatgtcgtattcaaggagatctaggtattctccttctccttctccttctccatacaagcgatacggtaggtctgtgtccgggtctctctcaatatcaagatccagaagccgttcaaggagtttatcaagagatgcagaaaatccaggaaacaatttgtatgtgacaggattgtctcctaggattaccaagagagaactggagaaacattttgctgctgaaggaaaagtgatagatgtccatctggtagttgatccttggacaagggaatcccgtgggtttggctttgtgacaatggagactcttgaggaggctgaacgatgtgtaaagatctgaatcgctctgtacttgaagggcgtgtcatcacggtggagaagctaaaagacgacgtggtcgaaccccaacgccagggaggtatctaggactgagaactattcgctcgacgtcgctctccaagttactctcctcgtcgctctcctagctatctcccttcaggaagctaagtcgctctccctattcttctcctactctcctgacactacactactctccatttttctgtggcagcaggttagctgtgtgaagcaagtttttatcaaactcttaaa

SEQ ID NO: 34092 - DNA, 311 bp, Glycine max
  Clone ID: PAT_MRT3847_130789C.1
tggcttggaacctttgggctgattgatgtgcttgtttatgtgcttgcatggtcgtgagaagatgatagaaggggacagacagtcttcctaaccagggcgcgggcgactcgtaagtcatgacgggcaagggaatggggagccctggcaagagaaggaataagatttatatttctcgcgcgaggcgcggttgttgtagcccttattcctagaagagctgccgtgttgtgcgtgtcccttttgtcgcgtgtattaggaaacacaatcggagtgcgaaggttaccaggagaaagattattggaatcggaaagacg

SEQ ID NO: 34093 - DNA, 326 bp, Glycine max
  unsure (1)..(326): unsure at all n locations
  Clone ID: PAT_MRT3847_13078C.1
actcaactccacttttctaaccactctaatcctgaacaacctgcatcaagggttcctttcacatccagaggcgccgcaactttanttttnctcctatttttatcacaacatcaaacttcaagctaccacctgatcattccattcctattattatggctcgtcactatacacacctgccacctctcaagggatccttacaggaaagactgtccctcatcgagtatgcctctcaaccttgtcctgcatcactctaatttttatgttgtaatcgaccaatgtattttatttatcgaaatcagctaaataattttatggaacaaagttct

SEQ ID NO: 34094 - DNA, 855 bp, Glycine max
  Clone ID: PAT_MRT3847_130790C.1
gattcccttgtccaaggatcaactaccagatggacatctatggctcgagctgtcatcgtccaggcaaactgtcatcttgtcattcaccgagaaagtcgtactgattcctcttcatctttcgttaaagcgagtacttttcgttcttgatctgttggttacgatgtcgtattcaaggagatctaggtattctccttctccttctccttctccatacaagcgatacggtaggtctgtgtccaggtctctctcaatatcaagatccagaagccgttcaaggagtttatcaagagatgcagaaaatccaggaaacaatttgtatgtgacaggattgtctcctaggattaccaagagagaactggagaaacattttgctgctgaaggaaaagtgatagatgtccatctggtagttgatccttggacaagggaatcccgtgggtttggctttgtgacaatggagactcttgaggaggctgaacgatgtgtaaagtatctgaatcgctctgtacttgaagggcgtgtcatcacggtggagaaggtaaaagacgttaggtataatttacctaggctattcgctcttttattgcatttatatcttattattttgtgcatcgtgaatatgtgatttttaagatactcctctcacaattgcagtgttcagttttttgtttttggattaatatgtaacattttgacttcatattgatgctactattgcttacctacctgtgcatggcaataccctctattcatgctcttatgtgcatcctattgcaggctaaaagacgacgtggtcgaaccccaacaccagggaagtatctagggctgagaactattcgtgctcaacggcgttcttca

SEQ ID NO: 34095 - DNA, 433 bp, Glycine max
  Clone ID: PAT_MRT3847_130791C.1
ctccccccgctaaaggtctgaacatagcgcagagaagagttagtctcttcatttatgattcgacggcggggaagagggaatagctagcaccgacgtctctttcactttgaacgtcaatcaaaggggtcaacaacaggcggcccaaaatgatgatgatggtctcgattctgctcatgctattgaccaagattcgtggcaacaagaaaggctggcgctggtgacaagctaaaatcgcgggtcgatattaagctgttctaaaatggtcatgtggccactgggttggacatggagtatcatatgccttattgttgtgggactgtacactgcctatgcagaccgactctcgtcagcatgtgatttcatccatgaccgtagattcattagatacacagatctcatgggatatgtttacagtaagagtatgtaccacctc

SEQ ID NO: 34096 - DNA, 416 bp, Glycine max
  Clone ID: PAT_MRT3847_130792C.1
gattattatatattaacttcacacattgattaccaacagtagtaaccttaattgggaccattagagttcaaccccaaccaaacctattttcaaagggcattaccgacccattacccattaaatttttttttaaaattttttggaaaattccaccttcgaaccttaaaacaaaattaagttcaggttaaaaccccccaacgagaccccacccccagggccaaagtggcctccttttgaatgtggaagccagcgagggtccttccttcctttacctgttggccagcaaaattaaccctttgttggcccgggggaattccttcctggcccggaatcttcgccttaacatggccaatggggtcggacctctccacctcgagggtaatagtctaacccgtaggggtctggacaaaaatctg

SEQ ID NO: 34097 - DNA, 303 bp, Glycine max
  Clone ID: PAT_MRT3847_130793C.1
acgccctacgcgtgcgggttcacattagagaaatagaagagttctttctaatggttatatctccctgggaaaagagaatttacaggtgaaatattgtgatggagatagagcgttgggaacatctagtgatctcttcattgaggatggactgtgaatagccttgaatggcatcattggcattagcatggaagatgtgtgtcctagaattttagatgggtcagctgaaaacaccttgtaagggaagatatggatgaccacgagaggcttatggatggacacagggaagctgatggatgcactcta

SEQ ID NO: 34098 - DNA, 281 bp, Glycine max
  Clone ID: PAT_MRT3847_130794C.1
ggctcgagctgacaaggctgtaggagcatagttttcgatatcactactacaccaccctccatagggggtgcagctatgatactacctgagcttctttacctacttttgaaacctacattgcacacaaaatggcatatttcatggccatgttatctactcgcattgctcctttttatgacaactatagtatcagagagtctagcggccaggaaggacttggacctgaaccttcgtgggctgggggtaagacttgtgctgtgtttgagccaggtgataggatg

SEQ ID NO: 34099 - DNA, 260 bp, Glycine max
  Clone ID: PAT_MRT3847_130795C.1
aaaaaaaaaaaagctttcaaacatggttctactacaaaataaatctggaaacttatgcgggctttataaaatatccaatcttacacaccccttaattcaacctcacacctcttaaatcaaaacacttaaatcaaattccacaaccaccgatttacaaccctttaactgcgaaaacccacaccttcctctcataaatcacaaactactacattacccattcatcgacttcttcaaaaaacatgaggccttatctctatctc

SEQ ID NO: 34100 - DNA, 446 bp, Glycine max
  Clone ID: PAT_MRT3847_130796C.1
gaaggaaaaaaaggaaccttaattccaaagaaaaaggggcccggaaaaagaacccccacaccccgcccaagggtttggaacataaattggggggaagaaacccaggggtcttacaaaggcaggggctctattctcttcttaaaaacattaaaaacgggttctaggggggggaaaggccccgagggcaaaggggggggggaaaaacccgcccccaaaaactggggggccgggggccaaaatccccttgggggggatggggggttatgacagcgaggccgtttggagaaaaaaagcccttcacaaattcttgggccataggggaaaatccccgcaaaaaaaaggaagcggaggccaatgggctgggggaaaaaccctcccctaccaacttgggggcagggagccggaatcgcctttggggggatgggggcgtatgacacggaggccgg

SEQ ID NO: 34101 - DNA, 249 bp, Glycine max
  Clone ID: PAT_MRT3847_130797C.1
ccacgcgtaagatcgcttgccaaaagaacacgaaagggaagctgggaaattcaatataacggtcggaaaaaaaagttatatcctagtttcccctaattcaaatacaccccatgtcatgaaaattcccaccctcttcaataaggcgtatacatcatgaagaggtgtgctattagcactttgcacacatcttaaattgttgaaacttcccattcctagctagggtcagtctcaaatgtttaaacgtcatgg

SEQ ID NO: 34102 - DNA, 267 bp, Glycine max
  Clone ID: PAT_MRT3847_130798C.1
ctaagacgccaaatatttaagctcacttcttcccagagagaggcagctctgctcaggcctccagcgttggctggccatggccacagccagatggaggagcccatccccaggagactcaggcagtggcctggagaggctttgttctgtaacggtgccttttcttagggtccaggcaggaatgaagccaataatttattgctttccattctgccgtatgatgtgcgtgtgcgtgagtgtgtggcccctgtttattcccctcctgtcaag

SEQ ID NO: 34103 - DNA, 257 bp, Glycine max
  unsure (1)..(257): unsure at all n locations
  Clone ID: PAT_MRT3847_130799C.1
ggannnatggtttcgctnaaactgcagaagcngctccnccgcgagcgtgctcaagtntggcagagganaggtttggcttnaccccantgaagtcaacgaaatctccatggccaattctcgccaaaacataagaagtngttaagggtgggttntcatcaaggatgccccaccaagattnantctngctcaggtgnncgtcgaatnngggnagcccaagangaaaggaggtccatnctggcnangtnagcgtnagggta

SEQ ID NO: 34104 - DNA, 329 bp, Glycine max
  Clone ID: PAT_MRT3847_13079C.1
ctgcttggggggggggggggggggggggggggggggggggggggggagtaaacgaataaaacccaggcagggcaggaataacttaacatttaggaccataaacagcacgggtagtaaggagactaatggaaaatgcataacagggaggaaagatagagagtagaatggataaggccggataaaaccccattaaggagtgggaacagcaccatggctgaactgtggtagtaaggcttggtgttacttagcatgtactagtggttagtaggttaccctgaacttgtattagcaccagctaaaaggtacgggtaggaactgggttagtggta

SEQ ID NO: 34105 - DNA, 509 bp, Glycine max
  Clone ID: PAT_MRT3847_1307C.1
ttaagagaagtcagagagatatttttaagtgggccttttaactcattttttaaattacagattataacttagactcctctgggatagcatttatctcttcttgaggctgagaaaacctcctgaccaagccacagaggcaggactcctggggcctgacagcagtaagcacactgagcagactctggtagacaggagaatatagtcccctttggagctggggcctgagtctcaggtaccagcacagagagcttctgaactggaggaataggtctaagcattaaacactccagctgtagtccatagaatatgcaggagaccatactccagccagccagtacaagggtcaatgtcatcagcaagcaggtataatgtcacggtccagcatcacctggcccaaccgcccactgcggaaggtaccgaggaagtctcgggctgcaatggcataatccggctggataacggtgacattacctgtgcctgtgagaacctttactttccgtggctttccc

SEQ ID NO: 34106 - DNA, 318 bp, Glycine max
  Clone ID: PAT_MRT3847_130800C.1
gttgaccccactttctgagaagcggacctgccgttatagcgagtaagaattgggaaaggaaggaaggttattaatctccctatcctcaatctgaactaacccgaacctgtgttcactgccatccgcatgcgaaaggcgagcacttgactataggcttgttttaccttgctgaccacggcgtggagagatgacttggcaactgcctctggtgagagatagaggttctcctcacttacaccaggagagataatgaaggtggcccaacaggcatttagcagttctactgctgatgatcctactttaggcctccatggtgaa

SEQ ID NO: 34107 - DNA, 151 bp, Glycine max
  Clone ID: PAT_MRT3847_130801C.1
aataatctgaatatttggatgaggtattgtgaacgcaattaccatctagaatatatatagaataacgcgtgacgattatgacttctcgcgtgcttatgaattactactgactgggcaaaacaaaaaaaaaccacatccaaaaaaacagaat

SEQ ID NO: 34108 - DNA, 163 bp, Glycine max
  Clone ID: PAT_MRT3847_130802C.1
caacaactctgttggctgttgggtctccatatttgtattcaatggtgcgtgattgtccagggactacaattccatgtgattttgtcattgttgttaatttacaaccataaaaaatttttgagcataaggcctgaatcctctttttacaggtaaacgcttttta

SEQ ID NO: 34109 - DNA, 1164 bp, Glycine max
  Clone ID: PAT_MRT3847_130803C.1
cgaagtcgggccgcccgtcaaatcaaatagggtcagtaacagtaccacctatgtttgatacaaacaaccctctgcaacattctattccaatttacttgatattgtttgcatatcatcacctttcaattttgcagtaagataaattctcagttgtgattgatggtcgttcaactcttcaacacggcaatcataatggatgaaaaggtggaaactcttaaagctgagttacaacgagtgagagaggagaacaacactctaagactgatgcttgaagttctaaacagcaagtgcacaaagcttgagatccatcttcaagacataaacaaggcacaacacaagggcatgagttcaaatcaaatagggtcagtaacagtaccacctatgtttgatacaaacaagagaccgagactagagcttcccacagcaaaaaagccattacaaatctttgtcagaacacaccccaaggatgatagtttgatagtaaaagccggccatcagtataataataatggtggtagcaacatcagaattgaagaatatgtaagttctctaataaaaaatcctgacttctccatgtcattagctgaagcagttgtccgcaccatcactggccagcaaaagcaacaagatataaaccttaatttggatcttcctgaagagtgaaatcaatcattttttccccaaaagcaataatgcaagtgtaaagatgagttttagttcagtgaattgtaggcctatagcactaaaaaagtgaggaaagcacggttaagaaacatttagttgttttcattttctgtttccactttaattacaaaaatattagtttgtttttactttaggtgctatcaacaacaaaattgcagaattagtactttctctaatcaaggatcccgacttcaccatgtcattagctgaagcagttgcccgcaccatcactggccagcagaagcaacaagatctaaacctcaatttggagcttcctgaagagtgaaatcaatcatttttttcccacaaaagccataatgcaagtgtaaagatgaattttagttcagtgaattgtagtccagtagcactgaaaaagcgaggaaaacttctttagaatggtttactttaagaaaacattataggttgttttcattttccgtttccactttaattgcaaaa

SEQ ID NO: 34110 - DNA, 277 bp, Glycine max
  unsure (1)..(277): unsure at all n locations
  Clone ID: PAT_MRT3847_130804C.1
ccactccggaattcccttctcgttcctcgcgtccgcattatttgccctcatcatacacttngctaacaganggaaccttttatttaacaataggggttgtataaaaaatccaccttctgttgttgcttctagcacactttcatttgggcataaatccaacttgctcctaattactacttcacaagccacccaaaacttcatagatcatcaattggtttagttctggacccaaagagaacatcaactccttcttgtattattcatccaagaattttct

SEQ ID NO: 34111 - DNA, 863 bp, Glycine max
  Clone ID: PAT_MRT3847_130805C.1
gcttactaatcagtcggcgcccttactttttttttttttgatcaacatcgaattaagtgactgcttttctattaaaatattaaatgaactgatttttgccgacataaatataaatattgtttagataattcaaacattatttagaaattacaagtatttaaacaatatatatttgctatactcttcttaggagaccacattatgatataaatacatacattgcataaataactcaaaatagtaaccaccagtacttttaagaacaggcaaggaggattccttttctttgaactcctccactccctagaggagctcatccttactctatgagctcatccttactgcttgcgcaatgatttttcttgatgaacaaaaagatttgggtgaaggttttcctcgtcttcaaatgttgtccaccccattgagttttctgcatcattgtgcatattttcaaattctccaacactgtctttaaattgtttcttcaccacatccaatggcttgggaaagtcactttctaactcggccttgtagtaatctggaagtttggtagaatttgcttgcttctgatccctcgagaagttgagatttgtgtttgtgctcctcatttctgtaggggttctagacagctccttcttatcatccatggaaaaatcagatggtgatagaccagagtgcaacttgttcttcattgaaagctcaccatatggaattgttgaagaaagctgataggaaagcaagtatgccacactatcagacctctcatttagagacaaaggaactgtgtcatcatctgtgtcacttttcttccatttcctcaacccatcaaacccccattgtttattagctgatttctctgctgc

SEQ ID NO: 34112 - DNA, 343 bp, Glycine max
  Clone ID: PAT_MRT3847_130806C.1
tttattttttttatttttcctttcgcaccacgtactttaactttggaccagaggcgaaggatatcttctgtggtgtacatgccagagaacatgtctgataatatctattgggatgaatgaaggtattaaacccccctacaatatcctccgatccccaaccaagatccgttgttcccaatgcctgaaccttgatccggatgctacagcctttcatccccaggcagaaatacttgtgtaccccttgcgatattcttccgatgtataaaaatgactgattgtgctggtaattatgctctcatagaggggcgctcccaccccgtccttaattactggcgatcttatt

SEQ ID NO: 34113 - DNA, 407 bp, Glycine max
  Clone ID: PAT_MRT3847_130807C.1
tgttttggactcagagcgcgtgtggccttggttgggaactgaagagtgtgtggaagcagaccaacaacagaagaaggaatcggcggtgttcgactgactatcgcatctcaaaattgggcacggatcattccttagcttgcacgacaattataacccgctcgcggtttttgggacgcacgttctcagcagcaccgactggttgggagcgctggtttctcgctgctgaaattatatgtgggctgagggcacacttttcatgggaggtgtggaagatgaagaaccattcatgatgcgaatgaacttactctccaacggatgagtgggcttgcctaacggttcttgtaaagaacctgtgagaggcctgaccagtgacttgatggctcatgccctactatccaaagaggact

SEQ ID NO: 34114 - DNA, 182 bp, Glycine max
  Clone ID: PAT_MRT3847_130808C.1
atcttaaaactgtccaattaatataaccacccaaaatagtaaaaaagtagtaatagcagttgacatttgacaaacacatgagcagaatttcacactctagtttagggttcactttgtatttgcagtagcacttcctcgcgcgccactacttcccgacgattctgtcgtcgtcatcagcaatg

SEQ ID NO: 34115 - DNA, 790 bp, Glycine max
  Clone ID: PAT_MRT3847_130809C.1
tggagggatacacttgcattttccttggcacctcatccacccgaagctgaagaatttcctgcagtttataggtttgtgataatagtaatactacttttattattgtcagcacttgcacatgttaggacttaataatggtggataactaatttcttgggacagtatctaatttgtggtgaaatgatatcattacattgaaatttttgttaagggaacatagtatatctgtatctatttttctaaaatatcttccacaactgaaattttttattatgttggagagtctcgcatcatctacttcaatacttcagatgcaacttatatactggatttgttggatttgatcatttggaaaaaaaacaatatgaccttttcaactactaccttcattcaatcatcatcttagatgattctgttttgactttggtttggtagttgtaaacttttggctcactttcattgcacatgttgcttcaaaatgcttgaaaaggaagatcttaagcccccgttgggaacatattttgagtttcagactgaaagttttgaagaatggttcccatttcatttttaaaaaaatttgacacttcattcccaacttttcccgtgcattcttttgtagtaacattaacactttcattgcatgtttctttaattatttgtccctatgtattttgcttcagtcctatgagggaatagcttggagggctaagaggaaatgcaggaaaacttattctcccaagatcagatttagtttaataatatttcaactgttttatatttgtatatctag

SEQ ID NO: 34116 - DNA, 182 bp, Glycine max
  Clone ID: PAT_MRT3847_13080C.1
aaccccagaaatcgacgttaattttttataaaatagtgtgcttttaaaaaaattcgcggacccctaactccagtttgaaatattgaacaaggaacacccgtataaaaaatttttgaccaatttggggttgcctagaattgcccttgaaaatgaaaatatctaaattttttggaccaaactgg

SEQ ID NO: 34117 - DNA, 1554 bp, Glycine max
  Clone ID: PAT_MRT3847_130810C.1
acaagttctctctttttctttccaccgtcaccactcaccatgcaatgcaaataacccaattaagaaaccaaccaaccaacgaggcttgttctgttgtgttgtttgcttagtacgttaatggcaaaccaggtggttcctcgtgaatctcacccttatgcctttcatgtctctggccctcgcaagttcacttcccttaattggagggaccttatcatttccagttggaaggatgcaaattataagagaactgtcattgcctgctttatacaggcagtatacttgcttgaacttgatagacaggagaagagaacacaaggaaatgctcttgccccaaattggtggattcccttcaaatacaagcttaaacaaacactaattgatgaaagagatggatccatttttggcacaattcttgaatgggatagatctgctgcattggctgacttaataccaattagaccaagtggtgcccccagagctgtcttagcactcagaggaacattactcaaaagccctacaatgcgaagagatatcgaagatgacctacgttttgttgcttgggaaagcttgaagggctctgtgaggtttaaagcagctttggaggtactaaaatcgatttgtggtaaatacggaagcaacaacgtatgcattgcagggcattccttgggggctggttttgctcttcaagtgggaaaagaattagcaaaagaagggacttatgtggaggcacatttgtttaatccatcttctgtttcactagccatgagtctcaaaactattggagaaaaggctgagtttgtgtggaataggcttaaatccatgcttccttatagtggtgaggctcaaatcagcaatgatgtagacaaaacttcttcaagtgtaggattgaagagtaggatgcctcaactatctggttctggtttgaaagatgcaagtttgggggtagcaaaatgggttccttatttgtatgttaacaatggtgactatatctgctgctattacaatgatggtgctggcacaagcacaaaggtgaatgtaggaactacaaatggacaagtttcagcaaagttgtttgttgtctctaaggagaaacagaagtttcttgaggctcatggcctggaacaatggtggtcaagtgatgcagaacttcagcaggttatccatagtagcaatctcataagcaggcagcttcgatctttgtacactgctgctccttcccaagtaaacttataagcaggtggtgaaatgtaatttaaaataaaataaaaaaaccaagatttgtattcctacatgttttccctgaaatttgatatttgtagtatgttgtaattcacactattttattttacccccgaagcatcttatttatcaactactagtaatgagtaggttataaaagttgtcaaaattgatgaattgaaaataatgcgctattttgaccgatgtgtaaatccgatcctcccccctagagttaaaaatggaaatggatcaggtcgtctattatggacttttagccttttcccaaaaaaagagaaagaaaaaaataaaaataaa

SEQ ID NO: 34118 - DNA, 294 bp, Glycine max
  Clone ID: PAT_MRT3847_130811C.1
ggctcgagcaccctcatcctccaccaccttctaagaagccatactactatcattctccggcacctccagtccacccccaaccttacccacatcctcaaccggagccacaaacttacccccagtatcatcccactcggacaatttgatgcgagagacgtgcaccaaactgcggctgcagcagtcattaagagctgtcaaaacaatgaccctaacggaccgaatgcgctcaatgctttccacaagaaggtcaaaagaattgtgctggatggcttatcaaggaaacctgtattatta

SEQ ID NO: 34119 - DNA, 764 bp, Glycine max
  unsure (1)..(764): unsure at all n locations
  Clone ID: PAT_MRT3847_130812C.1
gcaaaattttcttttggttggttaaaaaaaaagggggaaaagaaagggtaacttttaacccccaaatttcaaaaatttaattccttttattttttttttttttgcttaattttttttcacccaaacattaatatccattggttattaaaaacccaccaatgacaacatgaccggtggccacagaaataaagcttaagatatatgaataaattggctaagaataatctggaaacagggcaactttttttttaaccctggattttaagaacaggaaacctcggctcgcttataggggggaagggggaaaacaaaaagctaaaggtggaccttggttggcctggaaggtcttttctactttactttcatttccattattaaaaacaacactggcaccaatttgtccaattcccaagttaaggaaacctctatttagtccattaagcaaaacacaagctttacaccatttttgactaaaaatataaccggaacggtcgcatggttcctggtctgggatcttgggactaagaaaaaacctggaaatctcccctgatttgaagaaggccaaaaagggcctaaggctgaatctcttccaaactttgaagaactcgcgagccaaacnttgatatgccttaagagannaaatggctttgnnngaaaangaatcgagctnnntggaataagcatacatgacnatcttcttttcggaannatacctgaaagggttggattggggaaaggggcccttcnnnnnnnnnggtnnnnng

SEQ ID NO: 34120 - DNA, 248 bp, Glycine max
  Clone ID: PAT_MRT3847_130813C.1
cagataataagagtactaaagaatgaagtaaaggaaataaaaggagcaatgatagaggacaacggattctgcctctctgtacatttccggcaggtccaagaaaaggtaacctttaatttctaatttcttacattcttttctttcttggcatttctcttttcctcattgcttgacaatatttaatttagtgagcaatatttattctcctattttttttaaaagtatctctagatttaaaggtaatgaat

SEQ ID NO: 34121 - DNA, 1333 bp, Glycine max
  unsure (1)..(1333): unsure at all n locations
  Clone ID: PAT_MRT3847_130814C.1
ttaaccctcccctttgaaatcctttctcacttctgcgtcagctgaaacgcagatcgaactccgccgtagccatcatcaccgatcgaacttcgcaagacagagatcagattctgattccgacacagtaacagtatgagcgtcatcgacattctaacccgagtcgattccatttgcaagaagtacgacaaatacgacgtcgataagcaccgcgatgctaatgtctctggcgacgatgcctttgccagactctacgcctccgtcgacgccgacatcgaggccctacttcagaaagcagaaagtgcttccaaggagaaaggtaaggcatcagctgtagcgatcaatgcagagattcgtcgtactaaggctcggttgctggaggaggttcccaagttgcagagattagctgtgaaaaaggtaaaggggctttcatcacaagaatttgctgcccgtaatgatttggttcttgcattgccggatagaatccaagcaataccggatggggctcctcctgtgccaaaacaaactggaggctgggcagcttctgcttcacgtcctgaaattaagtttgattcagatgggcgatttgatgatgaatacttccaacaaagtgaacattcaaatcaatttaggcaggaatatgnaatgcgtagatgaaacangaatcaggttttgggatgtgattgctgaaggattggatacattgaaaaatatggcacatgatatgaatgaggaactggatagacagttccactgatggatgagattgacactaaggtggacaaggcatctctgaccttaagaatacaaatgttagacttaaagacactgtgaaccagcttcgatccagtcgaaacttctgtattgatattgttttgttgattataattttgggaattgctgcctacttatacaacgtactaaagaaatgatatgtacaaaggctgatggatgttcgaatggtttgcctttacttgtattttgagaatatcgtctgattttattttttttatctctaccgttgtgaaaatttcctgcgaattgagaggcgtgcccttgtgctttataagcattcctgtgtatgcagtcatgtcagataccattagtatgttaaatagttgctgtgtattttatacacttgttgttttggtgtatattataatgagtttaatgtcaatgtcgtgacagtctatacatgttgggttgtgattagatgattttgtaaaactttttgcactgggttgtgattagatgattctgtaaaactttttgcactgggttgtgattagatgattctgtaaaactttttacactattaatgcatgcataacccttt

SEQ ID NO: 34122 - DNA, 1153 bp, Glycine max
  unsure (1)..(1153): unsure at all n locations
  Clone ID: PAT_MRT3847_130815C.1
ggctcgagaataaatccaacttctccattgtttggtgtctgctatctgcttttactattgtaagtgtaactgtccatcttaaggggtattcttgtttctgtctgtagttctgactgttttaatcctctattgagttattccattcggtgtacttatttccattgaagcttgattttttatttttttaaagtttatcttgcactttgtaacttattagaatgtgaagtttcaaagttaatgaatgattcagtttatccacaggtaaaggggctttcatcacaagaatttgctgcccgtaatgatttggttcttgcattgccggatagaatccaagcaataccggatggggctcctgctgtgccaaaacaaactggaggctgggcagcttctgcttcacgtcctgaaattaagtttgattcacatgggcgatttgatgatgaatactttcaacaaagtgaacaatcaaatcaatttangcacgaatatgaaatgcgttttttgaaacagaataaaacatttataatgattgctatacgacaaatttcaagttcaatgatgtcacattaaattatgctctatctaaaaaatttaatattctatttgctcattaactgaagaatagtagattcttgtcactttctgatggcgctgctgggatttgattttcaatatatcatagcatcagcatgtgtttttttatgaatcttgcatactttatgttttttgagatacctttctgacttaccgtgctcattttgcagcgtactaaaaaaatcatgtgtacaaaggctgatggatgttcgaatggtttgccttgtattttgaggatatcttctgatttttttattttatttctaccattgtgaaaatttcctgcgacttgagaggcgtgcccttgtgctttataagcagtcctgtgtaatgtgtatgcagtcatgtcagataccattagtatgtgtatgttaaatagttgctgcttattttatacccttgttttggtatatgttatagtattataaattgacgctgatgaattaggaaggatgctttgattgaaattaggaattctagctggagttagctagctacaagcacgacgaaaagataagtatggggccccgcttaataattcaaagaaaattatattcgcctt

SEQ ID NO: 34123 - DNA, 344 bp, Glycine max
  unsure (1)..(344): unsure at all n locations
  Clone ID: PAT_MRT3847_130816C.1
catccttttactttaaaacatcagntataatcaatcaattaattttatttacaaataacaattgctcaatttttctatctatatacgagattcgaacctgattctttaatttagaagtcgtcgaaaaaaattgcatgtagattattttgtttatcataattatttacttttaataagtcaaattcataaaacatccttttactttaaatattttctaattttatgaacttaatgaatatatattttgcaagtgggataaaaaaattgataaatnntatgaacttaatgaatatgcatttatnnnnnaaatattattggtacaattttaaatatatttattacat

SEQ ID NO: 34124 - DNA, 1618 bp, Glycine max
  Clone ID: PAT_MRT3847_130817C.1
ggctcgagctcgagccgcttgatacttgatacagctgttaactttcccctttgaaatcctttctgagttctgcgccaactgaatcaagcagatcgaactccgccatagtcttcatcgagacagagatcggaatctgattcccaaacgggcacagtatgagcgtcatcgacattctaacccgagtcgattccatttgcaagtcgaacggttgagacttgccactccaggtcagccaaatgggcttgttttctcctcctggacctccttgcagactctcgattagaaaccttccttcttaggcgcttcacatcaatagcgtttgtgctttgttcacaaggacctgcttcatcatcctcatcagatggctcacgtgaggaaccacttgtagtggtggtggccccttttacttgattatctctcgcgtttggtttattagcagacaatgggcaagtacgacaaatacgacgtcgaaaagcaccgcgatgccaatgtctccggcgacgatgcctttgccagactatacgcctccgtcgacgccgacatcgtggccttgcttcagaaagcagaaagtgcttctaaggagaaaggtaaggcatctgctgttgcgatcaacgcggagattcgtcgtactaaggctcggttgctggaggaggttcccaagttgcagagattggctgtgaaaaaggtaaaagggctttcgtcacaagagtttgctgcccgtaatgatttggttcttgcattgccagatagaatccaagcaatcccagatggggctcctcctgtgccaaaacaaactggaggctgggcagcttctgcctcccgtcctgaaattaagtttgattcagatgggcgatttgatgatgaatacttccaacaaagtgaacaatcaagtcaatttaggcaggaatatgaaatgcgtagaatgaaacaggatcaaggtttggatgtgattgctgaaggattggatacattgaaaaatatggcacatgatatgaatgaggaactggatagacaagttccactgatggatgagattgacactaaggtggacaaggcatcctctgaccttaagaatacaaatgttagacttaaagacacagtgaaccagcttcgatccagtcgaaacttctgtattgatattgttttgttgattataattttgggaattgctgcctacttatacaacgtactaaagaaatgatgtgtacaaaggctgatggatgttcgaatggtttgccttgtattttgaggatatcttctgatttttttattttatttctaccattgtgaaaatttcctgcgacttgagaggcgtgcccttgtgctttataagcagtcctgtgtaatgtgtatgcagtcatgtcagataccattagtatgtgtatgttaaatagttgctgcttattttatacacttgttttggtatatgttatagtattataaattgacgctgatgaattaggaagggagtttaatgtcaatgtcgtgacagtctatacatgttgggttgtgattagatgattttgtaaaactttttgcactgggttgtgattagatgattctgtaaaactttttgcactgggttgtgattagatgattctgtaaaactttttacact

SEQ ID NO: 34125 - DNA, 569 bp, Glycine max
  Clone ID: PAT_MRT3847_130818C.1
atcatttgcatgacaagaacaatgtggacaagagtagtagtgtcttgaattcttggagaatgaggatcaaagtggcgctggatgcttcacgagggattgagtatctccataattatgcagttccatctataattcacagagatatcaagtcttccaacattctcattgatgcgacttggacggcaagagtatccgattttggattgtcattgatgagtccagaatccaaccatgatttccgaccaatgaaggcagcgggaacagttggatacattgatcccgaatattatggtctaaatgtactgacagcaaagagtgatgtctatgggcttggagtggtgctgctagaactattaacaggaaagagggctatattcaagaatgatgaaaatggtggcaccccagtgagtgtggtagactttgcagtgccactaattatggcgggagagttggcaaaagttgtggacccgagggttgaacttccagagatgaatgaaacataagcagtggagctagtgtgatgcacatgcttgcattgagataatctggaggggaatgacagacaacca

SEQ ID NO: 34126 - DNA, 256 bp, Glycine max
  Clone ID: PAT_MRT3847_130819C.1
ttataatgctcgttgtctggaagaactgaagctatctctagagagttctggggcttgtaaggttgcattcaatccaattacattgaatactatgaagaagatactttttagaatatgccaaatggagcattgtgatgtgactgctgagtatgttgatctaattgcaaaaactagtggaggtgacatccggcatgcaattacttctttacagtttttctgcttgaaaccatctacctgctatcgtggagcattaaaa

SEQ ID NO: 34127 - DNA, 347 bp, Glycine max
  Clone ID: PAT_MRT3847_13081C.1
gcaccagtgtgaatcgtatacttttaggaagcagtatttgttgccactgcaagcacttgacggcgatggatggcactttactacatacatctacaatacagttaattacgttttgctggcatctggaatggtttgttgtatccaatataatcacaaaacaaagaggggccataaactgtgtcaagtaaagcaattactgtaggagaggtgaaatttatgagacttccatgtacattattgtaacataccatcagtggaaaaaacaacacttttcccgtggaaaaaaaaaaaaaaaaaaaaaaaaaaaaaataaaaaaaaaaaaaaaaaaaaaaaaaaaaaaaaattg

SEQ ID NO: 34128 - DNA, 323 bp, Glycine max
  unsure (1)..(323): unsure at all n locations
  Clone ID: PAT_MRT3847_130820C.1
attacgcnnncggaagctcggaangcggctcgagngngagtnaggttctgcacgctctgcttccagcnagtntctttcngcgnttcaacacncngaannggcnnnangctggtncgngngctggacaaanngcacaagaaacctntcnagncacatctnaancnnnaaacnaggntcaccccgacaagctgtgcgaccagatctctnatgcagtgctcgatcgngcctngaacaggaccctgacagcaaggttncctgtgagacnngcaccaagaccaacangggcagggtctngggagagancacaaccanggccaacgtag

SEQ ID NO: 34129 - DNA, 530 bp, Glycine max
  Clone ID: PAT_MRT3847_130821C.1
cgcaagctttgatatttcggctcgaggggattcctacttcgcggtttcttaccctacggagaacgagcaggggcctcaggggtgtcaggggcctgggtcggcaattccgtgggctattcaccgaataagcctgggctaaaacgcatgctgtcatagctcatcgtgagcgaggaaagcttcgggctatgtaactatgactagagcttcaactatgaataaaccaaccgacagcagatgccagctatgagatggcgtcaatcagaaaaaagagcgcaaaggcaggtattgcatgattactaatagtgggcgcccgactgctactgagctatccaaccagatagtcaagcacaggcctgatcacacgtacatgacggtcaagggtaacgtgtgcaagaacaaaagaggtccaatggagagcattcataagctccaagcccgaaatggcaagaaagaaaaccttgccccaacaatacgaggccaaacgtgccaagaacaaggccagcataccaagaaaaaatgccccgagggag

SEQ ID NO: 34130 - DNA, 316 bp, Glycine max
  Clone ID: PAT_MRT3847_130822C.1
gcattgaaaacatttgtttatataaacaagttgaagcaagtatggaggggattatgaagccctcacttacttgaatggcccgtgcactctatatgacatactcatcgaaactgtcattgttatagaccaagaacattttggacctttaccattaggaccctcaattgcattcgacctaggtcttttaggccagaaggctatgctgcgcttcggctttatatgaccgttccgggctcccctccagacgtctagagtgagagagagaccaccactttcctggggagagaacccacccatggaacttagacagaaggtt

SEQ ID NO: 34131 - DNA, 450 bp, Glycine max
  Clone ID: PAT_MRT3847_130823C.1
cgcagacaacgctaattgttttacattatttagtccgggggctcaccaaaaccatatgttacgcgccggaaaaacacgagtataccctggtcataacttaattaggggcggaaaaaacctaagcactcatcccaattttaaaaaaaaaaaccttccccatttttattgaaaatgacccaagccaattcccatccaaactgggggtttttggaaaaactgtcgaactttaagcccccaggggcaacaccccccttgaattggaggtccttggcgtgccaagtttgcttcttaattttaacccacaatactttatattttaacactaacacctttgaatttacaaaacttgcccttggaaaccactcctttatggggggacttgttctttaactgaatccactctcttctgaaaactcatggcccacttaaagacgctgtgcaaagcccgtt

SEQ ID NO: 34132 - DNA, 455 bp, Glycine max
  unsure (1)..(455): unsure at all n locations
  Clone ID: PAT_MRT3847_130824C.1
cttcagacgaggtagtttagtgtcataattgtggaatgtagctttactcatctttcatgtgaagacgcttcatatgggtgctgcaacccattgaatagtccccaaatttcgtgggatacatttgctatacccaattaatgcccttcagcctacagccgctaccttcggttgctgcaatccagtgtatagcatttggatgaaaaaagcctctggaatttttccatggagacagagaacggtgacaccaggtccaaaaagatggaagagtattaagtcatagagcaaattggaagaggagcttttggctctggctttctcggtcttcacaagtccagaaaaagaggtatgtgctgaaaaaaattaggttgggcaaacagacagagaagntcaaacgtacagcacaccaagagatgaacctgattgcaaaactgaataacccatatattggggactac

SEQ ID NO: 34133 - DNA, 445 bp, Glycine max
  unsure (1)..(445): unsure at all n locations
  Clone ID: PAT_MRT3847_130825C.1
cggttggttgatnganagagaaacgattgagactgcgaaatcctaaaccaaacacaacgcacaacattcgggaaaaccgccttgtctagacttcttctgtctgcgaatcacggaatctgtctgaatcgaccgattgagacaggaatctgcaacagaggctaaaggtgcagcaacaacaggccctgatgcagaaagctgtgcttcaacagcaccagatgtaccaccctggcatgctcgccgttgctatgtctaaaatggagcctgatacaagaggaaacgtgcctactggttttgatacgtctgcatgccgcagtgcttatgtacgaaatattcatgtaaatgacaccgagaaactttttgcacatgattacagagcgctggcactcttgctggctgcacgtcataagaaaagaaaagtgctggtatggatgtgtggactaccacg

SEQ ID NO: 34134 - DNA, 256 bp, Glycine max
  unsure (1)..(256): unsure at all n locations
  Clone ID: PAT_MRT3847_130826C.1
taacataactataatacatttcggtcctctctttctttttcaactctcacaacacattaacattncttttatctcacatgtccttcttttcaccactttcattcttctctccaccaccctgctttatattactttctccaatccttcatttcaaattcaccactctaacaaacccacctttcactctttcttgtattcataagaaaaaaaaatttacacaaagaaaaataaaattaataaagttaaattttcatat

SEQ ID NO: 34135 - DNA, 232 bp, Glycine max
  unsure (1)..(232): unsure at all n locations
  Clone ID: PAT_MRT3847_130827C.1
agtnacttcaattatgattcaganaatcnnaatccanaatcagaaccaggagcagaagatttcagagcgcatggtaagctggcaatngacatacccacgatnagagnaggttggngcnccaaattatgataaggcatgtntctcacaaccacattccnctnctgnccngtggnnnagnggtatctggagagttgtngncngcctcacctgtanaggctntcaanggcatctc

SEQ ID NO: 34136 - DNA, 224 bp, Glycine max
  Clone ID: PAT_MRT3847_130828C.1
gaaggatgaggatcgtacacctctatgatgatcatgataagcttaatttcaccaccgtcgctatcatgcttaacgcaactaactttatgcgtgagggggaacaataccctggggatcaaaattttacttttaaacctggacattattcaccaaactatttttttaataatttaatttcccttactcttaaactttctgattgtgacacattgacaggaacacac

SEQ ID NO: 34137 - DNA, 795 bp, Glycine max
  unsure (1)..(795): unsure at all n locations
  Clone ID: PAT_MRT3847_130829C.1
ccacgcgtccgtaagcttaaaggtgtttgcttttgacttttggataatggaatttttgtccatctagataactcttttgttgttaaacttgaaagattatccactttaagtgatgttaaatttatcacttttgaagtttctaaagtgatgatgaatttaacaaaacttaagagataactttaaagtttaacaatcaaaaagacttatcgggatggacataaatttcattaaccacaatctaaaaatcaacactttaaaaaattatacagaaacaaccagtacaagtatgttgtcaatatgaatcacacgacataatggaagagttgattaatttagctccttccttttccctgaggtaatcataagcaaaataccaactcattcttatcattcaatagattcattattaaccaaacacaaatgcaatatataacatgtatgtccttatgattgtcacatattacgactttcagttatggataaccacgattgcactaggggttattagacattggccatcaacaatcaccttttctgatcatttttagaagttntattatctatgtttagttgtactaattggctatatgcaataatatagttttgaagattttctctcatctncagttgatagatataatttcatctttaatagtattgaatgcacaacaatgtgaatgcatagatattatctagtaaaggtgtgaatgagtctatccattgtgaattatttgagctaaagntgttaaattcttaatnnattgtttgttaaataaataaattaattagacttga

SEQ ID NO: 34138 - DNA, 504 bp, Glycine max
  Clone ID: PAT_MRT3847_13082C.1
gtgtaggagtgccgcctgcttggggggggggggggggggggggggggggggggggggggggggggggggggggggggggccacccaaaaagccaaggaaaaaaggcaagcccaagtcttaaatgcgagggctcgggactaaggtggcccgccgccatagaaagggtaaaacccaaggcggataagggtaaaagtactgttaaccccttagaaagtagggcccaggcaagcccgaaggaaaaaccttagcgggggccaataagtaagaagcaagtttggaataagtaaggccatttagggagggattaatacttggcgggttaaaccaattaggcgcttgtaaaagggccccctacacattgagcataaaagccttacaaatgggcgagcttcaagcaactgagggttccccgatttaaagggtggaccggcatcttaggccaataaatcgggccataaacgatggaccaagcactttggcgcgcctagtttgggggggttagat

SEQ ID NO: 34139 - DNA, 243 bp, Glycine max
  Clone ID: PAT_MRT3847_130830C.1
atggggcttttcagaaaaggaaaaaccctcaacaacaaagtctcttctttctcaatgatgttctcttctctgaaaacactccacccttctcttctcaaaagtcactccctcctctcgcagcctccatttcctgcaacccaggctctgcatttgatgtgtttatactttatagttttaaatatcctgtcatcccgccaaacacaataccgctatagacagatacgcgccactatccaggattga

SEQ ID NO: 34140 - DNA, 825 bp, Glycine max
  Clone ID: PAT_MRT3847_130831C.1
gtgcaacagatagtaaccaagtgaagattccattcaagatgaaactctttgctcactttttctttatgttgttgttcttggtggccttttccaacatccaagtttgtttgggggactgtgataatcttcaggacacttgtccagcagttccacccaataagcagaccatattcatcaatggtcttcaatgcaaaaacccagttaatgtaacagctcaagatttcaggaccacagaactaagcaaaactggccctagagacatttttggtgcatctttgaaaattgtgagtgctgctgagttcattggcctcaatactcttggcctctccattggaagaattgaccttgatgggaatggcctggtgaacttccactatcatcctagggctactgaaataatctttgttaccaaaggtgtgttgttggcaggttttgttgacaccaaaaaccagtttttccagaagtttcttaaagttggtgatgtctttgtgttccccaaggctttgttccacttctgtctaaatactggttttgaagaatccactgttttctcagtgtacaacagccagaatcctggctttgtgtcccttagtcctacaacttttgacacaacattggaatcattggacaagatcaagaagagactcatgtcactctctgcctctgaagcttaagctcaagctcaagatgtcaatagtttcatctctccagaactggaaaccatttacagttagccatttcaaactatttattgtctatttaacttcctcaacgttagttcaattacacataacctcgtgcattgaataaatggaaatggttttg

SEQ ID NO: 34141 - DNA, 765 bp, Glycine max
  Clone ID: PAT_MRT3847_130832C.1
ggttaccaaaactttaattaactggttgtgagtcttgtcttgtgactgactgctatatcttggcccaactcaattccaccaaatctccagctctcaacttcattttcatataatatttattagaatgaaatcatctaacaaatttttatctttgttatgcttaggtccacccttatgttgcaacagggaataagaactccaaaatttggcataagaaatgagaagctgcaatggtttctagatgctgtgaaggagcatcctaatgagttaaagcttgtaggggcccactgccatcttgggtctacaattcttcaggttgacattttcagggagccggccattattatggtcaactacatcgaccaaatccaagctcagggttttcaagttgattgcttaaatattggtggtggcctggggtttgagcctcaccttcccggggctggccttccttctcccagagatctctgtgtcgcatatcgaactggtttcccctgccccagcagatgctgagatagcaaagtttgatgttcttggtcctgtctgtgagtctgcagatttctttggaaaagatagacaacttccaactccagccaaggtaaaaatatttccttaaatatctgaactaaactatgatgatgacaattcctacttgattttactatctgaactgagtttcactttgcatggtactcttgtctggtcgttcatgatgctggtgcttattgtatgagtatggcatcaacctacaatttaaagatgcgg

SEQ ID NO: 34142 - DNA, 215 bp, Glycine max
  Clone ID: PAT_MRT3847_130833C.1
catccaacacgacatcccgaagacgtgcgccaagtgatgataggcatatcagacaagaggtttggttcaacagccgctgtaggatggactttttccattacttactagacactccggtatcgtcacagacaaatcatccctgtcctcctttcgcatcaggaagtctgtatatcgcctggaagaggccatctttctttggctgtctggcgctatat

SEQ ID NO: 34143 - DNA, 256 bp, Glycine max
  Clone ID: PAT_MRT3847_130834C.1
tctcgagccgaatcggctcgacaacggggactctggagcttctcacgctagtcagacacggatgatctggaagagttcatgaacttgtgtagctagtactagagaatggaagggcctgtagatattactgtgccatattccaaaatgggccagatgaaaatgatgcaatgcaatatatttttgcgacaagtctaaacaagggattgaactgtactccattcttgaaggcaggaaaggtaatcttcaagtacatgat

SEQ ID NO: 34144 - DNA, 1862 bp, Glycine max
  Clone ID: PAT_MRT3847_130835C.1
cccttgcgtccgatttttattggcacaaatagatggaaaatttctcgtctctttgggggaaatttttgaaaatgcgtctaaaggtgttgtgactgaagaaacaaccttcattatccaaagggtgaatgctggcttgggattgtgtttaaccacgcgtccgtacggctgcgagaagacgacagaaggggttgtagaaaagacattggatttcttgttccatgtctctgttttgaagcaccttgatctctgcatacagagtttactcttgaataggaggggtaaaacctttggctggcaacatgaagaagaggattacatgcacttaagcagaatgttatcatctcatttcaggagcagatggttgtctgtaaaggtgaagtctaaatctgtggatggcagtagttcctctggcattaagacctctccaaaggttggtgcttgtttggaaaccatatatgaggattcagcacgcgtccgcccacgagtccgtggacgcgtgggtttaatgatagaatgggctcaccagaaactaccacttccagttcacttttaccttagtccaatctcaacaattttccatagcaagcgggctggtactaaaaaagttgatgatgtactacatgatccatcttatctgattgaagttgccaaatgtggacttttctttgttttaggtgttgaagcaatgtccatttttcatggcactgacattccttctcctgttgaacaagtatcattgacatggaagttacattccttatctgtcaatttccttgttggaatggagatacttgaacaagatcggagcagggttacttttgaagctttgcaggatctttatggtgagcttcttgataatgcaaggttaaaccaaagtaaagaagttatttcagatgataaaaagcatcttgagtttctgaggttccaaactgagattcatgaaagttactcaacttttcttgaagaacttgtggagcagttttctgctgtttcttatggtgatgttatttttggccggcaagtttcactttatctacaccgttgtgttgaaacttccattcgacttgctgcctggaatacactgtccaattctcgtgttcttgagcttttgccacctttagaaaaatgcttctctggtgctgaaggataccttgaacccgctgaggataatgaagcaattttggaggcttatacgaatttgtgggtttctgatgcccttgacagggctgcaattcgaggatcagttgcatatactcttgttgtccatcatctttcctcctttatatttcatgcctgtcccacggataagttattgctgcgaaacagacttgctaggtctctgttgcgagattatgctgggaaacagcaacatgagggtatgttactgaacctcattcaccataacaagccaccaccatctgtcatgggagaggagctgaatggtggtgtactttctgaaaggaattggttagagtccagattaaaagtattggttgaggcttgtgagggaaattcctctcttttgatagtagtagagaagttaaaggctgttgtaaaaaagagttcatagtgaggtaactaatatatcgaatgcttgtaaatatattcgagatatacgatgagtacaactaaggtttatatatagatttttgcaatggggtctcaaatgcattaattggagcatacatggcccctgatattgatattttttgttagaatggagtctgctgattttttaatcgagtcctaaggcatgcaatgtacataatgaaggaatacaagtattttagtcgggttattataaaatacactgtttccctccaaaaaaaaaaaaaaaaaaaaaaaaaaaaaaaaaaaaatat

SEQ ID NO: 34145 - DNA, 534 bp, Glycine max
  Clone ID: PAT_MRT3847_130836C.1
aatttcctaagcccaatgagtcaaacgctgctccctgcacctgcaacctgttcctcctgcacgcgctgcacctgcactcccgtagcctgcaacctgttcctcctgcacgcgcctgcaactgcaaagtcgccagtcaaaccagcggtttgtgaaaccactgcttgaatcgccagtagaggtggcgagatccaccttaggcgaagtgcatgccatagcattgcctaaagcacaaaggaagaagaaagcctcggtttgtggaattgagacatggagagcagcagtgggagagagagcacggggcgtgtgccactgtcaggggtggtcagatgtactgtcatggctatggtgttccctgagatgggaagaatttggctgactaaagtgtcgagggttaggtcttcagtttggaaagttgggggtaaacgtccaggttataatgcaagtgactctgagtctgatgaattggaagaagattcttaaacagactaaatttgatttcatgtccaaaattctcaaaagtgagtttatcctgat

SEQ ID NO: 34146 - DNA, 464 bp, Glycine max
  Clone ID: PAT_MRT3847_130837C.1
acaatacatgaaagtgcgtgatgggtagtcaaagcttgccaacattttacatgcaaatgaacttacaagacgtctcaaggtctaactaaagctatagcaagacttttgcttaaaaatgtccagcagggagcagcaacaacacgctatgtagcactgcacccacaagtgaaggaaattagtggcaagtatttttcagccagtagtgtggccaaaacaacctcacaggggactgatgctgatttggccaaaaaactacgggatttcagcatgaatttgaccaagtaaaaaaactcaagtgttatttgtcaatgtagatgcatcatgcatacttttctgattgttatttgaaaacaatcagttatatgacttcctgtaatatatttatagtgagattctgatttttttttattgacaaatgttagttgttaattgttactattttattagcatgggaattgaacctg

SEQ ID NO: 34147 - DNA, 453 bp, Glycine max
  Clone ID: PAT_MRT3847_130838C.1
gccaaaaaccacacaaagcacaatagaggaggaacaacaatcacaaagggcatgaggaccaatgtaggagatattgttcaagtagaaggagggcacattgttaggtccacaggtagaaaagatcgccacagcaaggtgtacacatcgaaagggccacgcgatcgtcgcgttagactctcggcacacacagccattgagttctatgatgttcaagacaggcttggctatgacaggccaagcaaggctgtggactggctcatcaaaaaggcaaagacttccattgacaagcttgctgagcttcctccttggcatccacctactaatcatgaggaagaagagcagaatgatgctgcaggatcaagtggagtcatagccattgaacaacaacaacagcaacagcagcagcagcagcaacaacaacaacaacaacaacaacaacaacaacatcaacag

SEQ ID NO: 34148 - DNA, 480 bp, Glycine max
  Clone ID: PAT_MRT3847_130839C.1
ggctcgagatcgtttgcagcgtgttatcccttatgtgattgtgatgctttctgattcagcagcaattgtgcgttgtgctgctttggagactttgtgtgacattcttcccttagtgcgggattttcctcccagtgatgcaaaaatatttcctgagtatattcttccaatgctttcaatgcttcctgatgatccagaggaaagtgtgaggatatgctatgccagcaatatagctaagctggcactgactgcttatggattcctgatacactcaatatgcttgagtgaggcaggtgtccttgatgaattgagttcaccacagaagccattgacatcatccactcatagttctggaagattgaagaggataaatggtgatgcccaacttctgcagctgaagaaatccattgcagaggttgttcaagaacttgttatgggtcctaagcaaaccccaaatataaggagagcacttcttcaggatat

SEQ ID NO: 34149 - DNA, 513 bp, Glycine max
  unsure (1)..(513): unsure at all n locations
  Clone ID: PAT_MRT3847_13083C.1
aatttatagatacgctgtnnnaatttggtgctttcgtgtgctggttcgcgggcggccgcccttttttttttttttgggttccttctttaaacgtctaattatgaacttagaataaagggagcaaaacgattaaggaaagaaaccaaaaaataaataaactatgattacataacaaaatcaagatgaagatcccgaagcctggatcgaatcttatccaatgtaccatcaatggctaaatcaacagcatccttcttagttttgagacccggggaactattatgcttcctgtacaagacactcggtatcaactccaaaaccttctccctcattctcctaaccctagttctcggtattcgttgcaacacatccaaaatcctcatccctctgaacaccacctcctccttcgnnataaacacggagaatttctcaaactccgactccggcaaatgccacccatactgnnccttcnnngaaagttcctcatagaaaaccnnnatacaccccgnnnnnatg

SEQ ID NO: 34150 - DNA, 930 bp, Glycine max
  Clone ID: PAT_MRT3847_130840C.1
attcttacgaacctgaaaacatgaaaactgaactcaattttcatatttccctaaaaccctaaaccccaatttttcaccatcaaccttaaaacccagtaacactcactaagtgtttacaatggcgatgcttcccctcacaaaccctactccaattcgccacaatgcattgtcttcctcctctttcgttcaaagaaaatgtgtctctctgatccctagaatcagaacatgcgactccgaaccccagcgacgtcgttttgcgtccgtgacatgctgctccttctcgacactcgacagtgctaagattaaggttgtcggagttggggcggcgggaacaatgctgttaaccgcatgattggttgcggattgcacggtgtagaattttatgctataaatactgatgcccaagcactgttgcattcttctgctgagaaccctatcaaaattggagagcttctgactcgtggattaggtacgggcgggaatccgcttttgggggaacaagctgctgaggaatcaaaagatgctattgctgatgctcttaaaggatcagatttggtgtttataacggctgggatgggtgggggaaccgggtctggtgctgccccagttgtagcccaaatatcaaaagaggcaggttacttgactgtaggtgttgttacctatcccttcagttttgaaggacgtaagagatccttgcaggcaggtgtccttttttctcgttatttgggaatgtggctactgaaagttctactcttaattaatattaccttctttctttattatgttgaaaaatatcacttgtcttcttcttcctttgcagtttattttatcctggttacaagtgtgtttggaaattcattttttgacattgttttgaaatgaatggatttccaaacacactgtataatttggtatttaagttatgtgtca

SEQ ID NO: 34151 - DNA, 1835 bp, Glycine max
  Clone ID: PAT_MRT3847_130841C.1
ccaaaagaccgaaaaaaataaaataaaaaccatcgagagtgagagagaagaaaaaaaaaatggcgatgcttcatcccctcacaaacccaaacgcaaacgagcttctctcactctcatgctcttctatattccaccacaatgcactcacaacctccgtttctctcaaccccagaacaacaaaaattgctcctcaacgcctaagtcgtcgtttcgggtccgtgagatgctcttacgcttacgtagataacgccaaaattaaggttgtcggcatcggtggtggcggcaacaatgccgttaatcgcatgatcggtagtggtttgcagggtgtagacttctatgcaataaataccgatgctcaggcactgttaaattctgctgctgagaaccctattaaaattggagaagttctgactcgtggattaggtacgggcgggaatccacttttgggggaacaagctgcagaggaatcaagagatgctattgctgatgctcttaaaggatcagatttggtgtttataacggctgggatgggtgggggaaccgggtctggtgctgccccagttgtagcccaaatatcaaaagaggcaggttacttgactgtaggtgttgttacctatcccttcagttttgaaggacgtaagagatccttgcaggcctttgaagccatcgaaaggctgcagaaaaatgttgacacacttatagtgattccaaatgaccgtctgcttgacatagctgatgagcagatgcctcttcaggatgctttccgtcttgcagatgacgttctacggcaaggagtacagggaatatcagacattataactgtacctggacttgtcaatgtggattttgcagatgtaaaagcagacatcataccctcaccggggcttgtaaatgtggattttgctgatgtaaaagctgtccgggcagaagaagcagccgcacaggctactttggctcctttaattggatcctcccgtccgtcagctgccgggggagcgtagcttattactggaggaaaggacatacccctgcaggaagtgaacagggtttctcaggttgtgactagtttggctgatccttctgctaatattatatttggggctgtcgttgatgatcgctacactggggagattcacgtgactatcattgcaactggcttctcacagtcttttcagaagaagttgctaacagatccaagggctgcaaagcggcttctcacggtccctccggaccacgctaccaacggagccccggccccctaagttgcttgacagagagcttgggggtcaagaaagcaaggcagtgtctcctcctctcaagtcctcaaactatccatcaacggttgcatctagagcatccccacgaaagttcttcttttagttgcttagttcttttacccttcttggttgtagttaatcgctgtgaatgtgatcttgaagcttagttgagatatcattgtggtgacggtctcttctttcgattgtggatcttgtttttacaaattcttcttccaagagttggctatttgcatgactgtgagtcagattgttagtgtaacaaacagcttgcttgtagatcagtaaacaacatttttgtcgaaggaatggatatatagaagaggtgtccttttttctcgttatttgggaatgtggctactgaaaggtctactcttaattaatattaccttctttctttattatggtgaaaaatatcacttggcttcttcttcctttgcaggttattttatcctgggtacaagggtgtttggaaattcattttttgacattggtttgaaatgaatggatttccaaacacactggataatttggtattta

SEQ ID NO: 34152 - DNA, 281 bp, Glycine max
  Clone ID: PAT_MRT3847_130842C.1
ctttccagatcgatcttcttccatataaacctgcctaggcaaagagagtcatctctgcaggaggcttgagaaaagaaacaaaggtgaagatgagctgcattggtgctccatatgtgagaagtgccaacactggccagcattgctctgaaaaggccctccctacaaaagcctgatatgcacaacaccaaactccaccatgcagcattgaaaacaagccagcttcctatgtatgagccacgccttgatggtgtggtgaagcaatgttgaggcaagaacctttt

SEQ ID NO: 34153 - DNA, 297 bp, Glycine max
  Clone ID: PAT_MRT3847_130843C.1
aattcggcaccagggctgtcctccattacattctttcatacacaagacatcaacacagtattaattttatacttgtgtttcatactattggcccaaaactgattctctgtaggatcattgggttgttgatgtgttttactttgatagaaaatgatttggaattggctgtcttccattactttttttttctctttcttcaaattgatgctgctgctgcaagtataaaattaatactgtcttggtgtcttgagtttgaaagaatctcaaggaagaaagatacaattttttacaaccatg

SEQ ID NO: 34154 - DNA, 363 bp, Glycine max
  unsure (1)..(363): unsure at all n locations
  Clone ID: PAT_MRT3847_130844C.1
aaacnnngtannnnannnnacacagtgacaaacctcaaactgagtaccaattgatcactgtaaccttagtaattttccatcataatcatatcgaagggcccaaattaataaaggagaaaaaaaaattgcaattaatctggccatccctgtggggaaagggtgcattggacatgcatggcagttcatgcaatcctatgagccggtgattccttttgtctttgaattttcgaacaaactaaaaagtaaaataagaaagcttaatatggtaattaaattaaaatatatatataaaaaaagagagtaagtatatataatatagtatctgaaatactgttcctgtgcgtgccacaccacatgattttg

SEQ ID NO: 34155 - DNA, 398 bp, Glycine max
  unsure (1)..(398): unsure at all n locations
  Clone ID: PAT_MRT3847_130845C.1
caaagccaaaactagctcgtccgctggaagcacattcacattcacatgcaaaaggaatagctgctaaatgatgaacgccgcaacagcagctaatagcagtgtttattcacagacacagtgcagactactttcctcggatcttcgaagttcgattcctttcttgaatgaacgcaagtcacggttggtggtaagggctggtggtcgtcctcctcaaaatatgggcaaggacgatgatgagaagcagcagcagcgtgtcacacaacaacaacaacaacaacaacaagaacaacaagcacctncgcccgtgtctcttagcctggacgacgtgaaccccgtaggactgggtcgaagatcgcggcagttgttcgatgagggttggagaaagttctcgggattgg

SEQ ID NO: 34156 - DNA, 462 bp, Glycine max
  Clone ID: PAT_MRT3847_130846C.1
attcggctcggctttagcccacccggtttagttgctgcaagaagcgacgaatgctagggggcgcttttaaagaagacgcagaggatttatgcaacagacactggacccgaggacgagaatgctgagtgtatgcccaaagagaagaaaaagtagatgaaggcgcttgtatgtgatgctttgaagaagcacggtgtgagctataagagtggctatcctcttcacaagggccacgagaagcgtatccacattctctctcagatctgcgatcttcaacgaatatttttggctcctcaagattgctctgaccaggtgtctgccaagaggtcacgtggatccctctaccaagcattgttagaaggatgggatgaattctggaataaaagtgttgctaagaaggtggtccatatgctaaatggctaacaaactaggggctagaagaggagattaatttgactatgacct

SEQ ID NO: 34157 - DNA, 272 bp, Glycine max
  unsure (1)..(272): unsure at all n locations
  Clone ID: PAT_MRT3847_130847C.1
aggacattgtctagtccttacatgtttacccttccttgacacatatactaactgtaatctaatacctcttttaggattcattactcacatcgtgtgagctacgcgcncattctttacaatattccattacatcactaccacctcattccctctccaatactatctaattataaaccgttctttttcccctattttgatcgaccaccaactgctttatctattgtctcctcttaacccgaacttaacatgagtccatattaatttcttcaaca

SEQ ID NO: 34158 - DNA, 403 bp, Glycine max
  Clone ID: PAT_MRT3847_130848C.1
gtttaaacctttcaccttcctccatactttcttcatctgggttttgcttgctataaaaatctagctaaaatttgtcgtttgctttcagcaagagctttagcttaattatcaccaggaatttatttggcagtcatggattattcatcatggatgattaacacttccttggatctcaacattaatccccacaggcttcatgaagaacttcccaaaaaggaggtggaaaacaactttttgtcattgaatttggaggtgaagaaatcttctgtaaaacaagagtctgctggtgccttggcggaggagctgacgcgggtgagtgcagaaaacaagaagttaaccgaaatgctcacagagatgtgtgagaattacaacactttgcgaggcaatttgatggaatacatga

SEQ ID NO: 34159 - DNA, 458 bp, Glycine max
  Clone ID: PAT_MRT3847_130849C.1
tggaattgatgcagggtggcaatactttttcaatagtttggcatctgcaacatctgataccggcaagtccatccttcctaagcatttgtgtcttgttgccaatagtctgtcatgtagtggagagtttgtgggattaaatgctaaaggcatggcactacaaagaaaacatgcgtcagtttcatcaccattcgtgcaagcatgctttgcgaatccaggtagttgctttataaaagctgctaagtctggagtcactgataatctccagggcagtctggatgcgttggcttggggaaactgtctatctatggggacaagtggaatgtttgatatcatatattcagagaaagtagctaagtctgggaatgtgtatgagctgctaaaagccagttttgacaagccgaacaataaagctggtactcatttgcacaaatattcatctgacaaatgcggttctgagt

SEQ ID NO: 34160 - DNA, 145 bp, Glycine max
  Clone ID: PAT_MRT3847_13084C.1
gccgtcgcacaagacattcagaatcaagaataagctggtgacgcccatgaggcttatcaggtccatgccatactgtatccgcatgacgacctgatcctccatcaggttcaacgcgaagcgccgtcactggcgtcacaccaagctc

SEQ ID NO: 34161 - DNA, 603 bp, Glycine max
  Clone ID: PAT_MRT3847_130850C.1
tacggctcgagaagacgacagaagggggaacttcacaaagtttaaacctttcaccttcctccatactttcttcatctgggttttgcttgctataaaaatctagctaaaatttgtcgtttgctttcagcaagagctttagcttaattatcaccaggaatttatttggcagtcatggattattcatcatggatgattaacacttccttggatctcaacattaatccccacaggcttcatgaagaacttcccgtaagtataaacatattgggcggaagatcttctgtgaaatgtttccctcagaataataattctttcttcttttcttcttgtgtgttcatttcagaaaaaggaggtggaaaacaactttttgtcattgaatttggaggtgaagaaatcttctgtaaaacaagagtctgctggtgccttggcggaggagctgaagcgggtgagtgcagaaaacaagaagttaaccgaaatgctcacagagatgtgcgagaattacaacactttgcgaggcaatttgatggaatacatgaggaaagatcccggataaggagcacagctcatcaaagaaaaggaagtctgaaagcaacaacaatagta

SEQ ID NO: 34162 - DNA, 457 bp, Glycine max
  Clone ID: PAT_MRT3847_130851C.1
ctgcgaccgttaaagccacactcagaatctaaaattttgaattttttaatgtcttctcctaagagctcatcatcacagcatgaagcggaatcaatgtcagtttttgaagctattaggaaggctaagcgattaaggttgtttgagccgtctctgggtgttcttgggtttgttgttgtaactgtctttgtgatttgctgcttcttctattcggataacggataccttgcttcaagagttgggttctttgagcaaccacagaggtttgcttggttgcggatagaagggtctactgcgccacccagagttgagtttcttggagaaaagggtggggggtgtgatttgtttgatggggaatggatttgggaatgagagtaccctttgtaccaatcaaaagattgcaggtttttggatgaaagttttcggtgttctgagaatggacgacgtgatttgttttaca

SEQ ID NO: 34163 - DNA, 162 bp, Glycine max
  Clone ID: PAT_MRT3847_130852C.1
cgcattcctgaactagtatgtctaatttgattcacttaaatacagcgcattactatgggcactgagtgtgtatggatataactaaaacaaccacacgctataaacagtatcctgtcaagcgattaaatgaagaacaacaataggctgatcacaaaccatatg

SEQ ID NO: 34164 - DNA, 2447 bp, Glycine max
  Clone ID: PAT_MRT3847_130853C.1
acttcttcttccacgcgtccgttcctcttcttcttcttcctttctttcacctttcgattagggttttcttccgaaccccttttttgttcttcgaacgcaccacaccgaatcaaacctattcttcctcaaggttcatgcaatggacatgtctgatgctgtcattgtcaaatcgagtaggttgaaatctgtggtctggaatgattttgataggattaaaaaaggcgatacctgtgtggctgtttgtaggcattgcaaaaagaaactgagcggatcaagtaccagtggaacatctcatctaaggaaccatttaatcaggtgtcagagaaggtctagccatggcatagcacaattcatttcggcaagagataagagaaaggaaggaactctagcaattgcaaatttcaatattgatcaagattcaaacaaagatgataatactgttagtcttgtgaatattaaatttgagcaggcgcagttgaaagaagactctgtcaacactggaactagtaactgtgatcaaagacggagtcgatttgatcttgctcgtatgattattctacatggatatccattggctatggttgagcatgttggtttcagagctttcataaaaaatctacagccattgtttgaacttgtgtcgttgaataaggttgaggctgattgtattgagatttatgagagagagaggaaaaaggtgaatgagatgttggataaattgcctgggaaaatcagtcttagtgctgatgtgtggaatgctgtggacgatgcagagtatttatgtttgacatcaaattacattgatgaatcttggcagttaagaaggaggatattaaattttataaggattgatccttctcatacagaagacatggtttcagaagctatcatgacttgcctaatggattgggatattgaccgtaaattgttttccatgatactggatagttgttccacctcggataaaattgctgttagaattggtgagagacttctgcaaaacaggtttctttattgcaacggtcaattatttgatatacgctgtgctgcaaatgttattaacaccatggttcagcatgctctgggaactgtaagggaaatagtcaataagattcgtcaaactattggttacattaaaagttcacaaattatactggcaaagttcaatgtgatggctaaagaagttgggatcctgagtcaaaagggcttatttctagataatccgtcacaatggaattccacatactcaatgcttgaagttgccttagaattcaaggatgttttaattctcttgcaagaaaatgacactgcttacaaagtctgtttatctgaggtagagtgggagagagtcacagcagttaccagctacttgaagctttttgttgaggttatcaatgttttcactaagagcaagtatccaactgcaaatatatatttccctgagctctgtgatgttaagttgcatttgattgaatggtccaagaattcagatgagtttatcagttctttggcgtcaagattgagaagcaagtttgatgagtattgggagaaatgtagcttagggttggctgttgctgcaatgttagaccctcgattcaagatgaagttggtagattattattatccgcaaatttttggcagcatgtctgcaaatcgaattgaagaggtctttgatggtgtaaaggctctatacaatgaacattcaatatgctcccctttagcttctcatgatcaaggtctggcctggcaggttggcaatggttcacttctcttgcaaggttctgcgaaggattccagggatcgattgatggggtttgataaatttctccatgaaactacacagggtgaaggcacaaaatcggatctagacaagtacttggaagaacctctctttccacgtaatgttgattttaacatactgaattggtggagagttcacactcccaggtatcctgtcctatccatgatggcacgcaatgttttgggaattccaatgtcaaaagttgcgccagagttggcatttaatcatagtgcaagagtccttgatcgcgattggagctcacttaatcctgctactgtccaagctttggtgtgttcacaagattggattaggagtgaactggaaaattagattgctttttccctgcattctaattgtacatgccaattctccccatagaaatattcccatgtaagttaatatcttctaactccacatttcaattttcctgacctttttatattttggttctatttagccatagccttatgcaacttagcaagtattttatgattcttttacttgttttgctagtctgtggcttcttgagtacttgatttcttatcatgcgtggcaatagaaattcgaaacgtttgtctgcaaaaaaaaaaaaaaaaaaaaaaaaaaaaaaaaaaaaaaaaaaaaaaaagggggggcccttttaaaa

SEQ ID NO: 34165 - DNA, 191 bp, Glycine max
  Clone ID: PAT_MRT3847_130854C.1
agtttttgacagggggaagtcacttgtctctagtgagaatctttagctcatttgtctgatgcagttgacgatactgagtactgggtgtacagcgtgggcgagagaactataccttcttaagttcatatgcgaggagtcgctgaatgctgccctgacacaccagcaccttgcgcaatgtgcaaagttgactg

SEQ ID NO: 34166 - DNA, 314 bp, Glycine max
  Clone ID: PAT_MRT3847_130855C.1
aaaaagaaaggcagcggccgttctttttattgctaatggaaaaaaaaaaaatgatttgatctcgctcacgctatcaaacgtgaacgcgaagacaaagacacttaaaccttttgctttggaactccaacgccatggaccctatccctcccactcccgggagaggcagaccccctttttcttcttttccgcacttggactctaacttgaactgacccgggcgcctgcccccgaacttgcaatcccggacctggacccgtacccgttcccccttttcctagtgggattcgaacttggccttggcctgggcatgggcc

SEQ ID NO: 34167 - DNA, 182 bp, Glycine max
  Clone ID: PAT_MRT3847_130856C.1
gattaatagacgctcactatgaagcgctattaggcgaatgaccattcggccacagtttgacgcccgatggcacgcataggagacgaaagcatcttgcgcctgaacagtctggggaagaaagatgaaaaaaccgagagtttgctacggtgttcattcgagggaaatcgcaacagaaggagcct

SEQ ID NO: 34168 - DNA, 290 bp, Glycine max
  unsure (1)..(290): unsure at all n locations
  Clone ID: PAT_MRT3847_130857C.1
aatgngtgacagggatatgctgcactgataccatatgctgagccagttgggcacgctcaaagtgctcaagtttacattgacttcttccctgcggaggttgatagcgctgacggagacgcccacaacgcggaattgtacgagggggtctacgaggaactggctacaaagactgatgtggtcgacacggccgaggacaggggacgtggggctaccttgcaacaaagatgggcatgattagactacacctgttgagagagaacaagccacgaaacatgctgtagtcaaagaac

SEQ ID NO: 34169 - DNA, 505 bp, Glycine max
  unsure (1)..(505): unsure at all n locations
  Clone ID: PAT_MRT3847_130858C.1
gggaagggtgattcacactcancataaaggtgctgggtcgatgttcaattctcacactcaccaccacaagggtccaacaaagttccacagcctcaacttcaacaagcacaacaactacctcaaaggcatcatcaccaacatcatccacaaccccaatcacaacacccctctcaccaaagtagcattccaccaccccttccactacaagaancaaacaaagctcttcatcaccaccaaagacctctacaccaaacagttcatctactacaacaagaaagccaccctgcataatcacaacatattacccatccaatccatccccaaaagtaccatcatctacaacgtcgagcaccacatgcacgaccacagcattttcaccaaaacctgcgataactatactattattataagccacaaccctaataacgacacctcttaaatcaaacttgccttctattcgaagaaaaatatacccanttagtgcgaaacgatgatgaaccaattg

SEQ ID NO: 34170 - DNA, 353 bp, Glycine max
  Clone ID: PAT_MRT3847_130859C.1
attttcttatatatttttcttcttttttttgttttatattttttttcttaccaatcctatttacacctgtttatgatcaaaaaccgaaaaaattttttttttaataggccccacccatgggggccaaaaatctcttagttttttttttggggatgggccctctcaactcctactgaaatcacaaaaaccatattaattccccttttttttcccgataaaataaaagctcttgaaagcataaagggcccatgacctgaaagacaaaaagaaaatcccccgagccatatcacatatacaacttttaaaaaccttgcttcttttgagaaaaaaaacccataaaatgtgatgttttt

SEQ ID NO: 34171 - DNA, 270 bp, Glycine max
  Clone ID: PAT_MRT3847_13085C.1
tgtatttaagacaagtgaccttcggtactagaggatactactgataatcggcggtatcgcgacgatcgcgttcgtcgcttatagccaggattgggacttagaggcgttgagcgatagtcctaaggacggtaacgttacgcatctggctattcatacgacacgagagaccaaccgagcgaatcaccggtaactcttgaactaggatggattacaattgcgactcgtgcatcaagtcgaggacaataacgtgatacacgacgaggtgatcgc

SEQ ID NO: 34172 - DNA, 222 bp, Glycine max
  Clone ID: PAT_MRT3847_130860C.1
ttccgagggaattagccgtgctacatgtgtagcagtagcacctgcttgggggggggggggggggggggccaatagatcgcaaaggccgaggtgctggcagcacaacgaatgttacgggtgaaatggacaaaaaaggccataaaatgggcaaaccttgactgttggacactactaaatgaggtggggggaggaggaggggcggctatcgtccgctggaagatg

SEQ ID NO: 34173 - DNA, 446 bp, Glycine max
  Clone ID: PAT_MRT3847_130861C.1
cgacacacgcgtgcgcacactttagctaactcttgaacaagtgtttaacgtacatgaaacacatgttggatgagggtgcgtctgtctaacacctagtgctagcattgcattctgataacatatttgcacaacattatcaccaagattcttcttcttagggtgaaaacttttaaggatgctgtacaacctgttcatgtacgataatgactgaccaatcataatccataggatatatatgtatcattgtacaagtatcatgatgacctgactgcacttgctaggcgtgtcaagctacatatcgtcatatgtcgagatgaataaattccgcgctgtatccagatattatacacgagagcaacaaacactgcttctattacagatggacctgatgtgatgaaaactgcattagctgaaagattatctcaacgtatagtgcctgcagatgt

SEQ ID NO: 34174 - DNA, 417 bp, Glycine max
  Clone ID: PAT_MRT3847_130862C.1
cccctcaaacttaaagaggccagcccgcaaacattatcaccctggttttaggggccaaaagtgacgcgggggctaacaggcctttcattatcaggggggggattcttaaattcaccaaaagggccaggtttccagaactaaagaaaccacatacttgacaaaggggcggtttaaaaaaaatgcctgggtctttaacccccagttaaaggcgaaaaattggtcattctttatggacaagggggcaacataaaaataggctccaaaggggaaaaatattcctctcttcataaagctttcacctaataattttataatcaaaaaaggagcatgaaaacactcaatgacccctccagatctgtgggggcaaaaagcccccctccaacaaaaaagagaattgaaactctccggggggcctta

SEQ ID NO: 34175 - DNA, 452 bp, Glycine max
  Clone ID: PAT_MRT3847_130863C.1
acgcgttgtcttttggggaaaatatgataaaccgcgcccacaggatggcgtaccttaaagccggaaacaaatgcgatcgttacttgatttcaagaatgtctaaagttctttctacttatttgcgaacggtttctgaagggaaagaaaaacactctctgagctgggcacagacacagtgaataaatgacttttccgctcttggataatttgctgaacactctccgattggagctaggacttgacgtcaaatttaaacttattctgtctctgtctaagctctctgggtaacatcaaggtcaagctggtgaaatgttgaattagaactcccactctgctatctggtataggatttcgtgggtagactataatatttctttccataatctcactctgttggtctcactgagccgcattgccgatcacagaggtctttatctgaaaaacacttgggc

SEQ ID NO: 34176 - DNA, 994 bp, Glycine max
  Clone ID: PAT_MRT3847_130864C.1
aaaaaaatcaaattgaatatgggagaaggaattaagaaccaggtatttaaggagaaaaaaccatcaagggaaacttttgtttgtggagcatgtggtaaggctgggcacatgcgaacgaataagaactgtccaaaatatggtgaagatctagaaactcaacttgaatctgcagacatggaaaaatcatctggaaaatctagctttgtggatccctctagtctctcccagcataaagctccctccaaaaagtcaatgtctaaaagcgcaacaaaagttgctcctgttgacaattcaacaaaaattccatgcgtccgcaaatgcagctccacagagaaatcttctgataaacctgcagtagaaaccctgcagagttctgacaagccagtcacttctgactcagaaactgcaaagtctgctaaggttaataagataattattcccaagaaagtgaaaccagatgatacgctggctgaatctcgtaagcatgctattgttatacggcctcctactgattcaggtagaggacaggttgattctcataagttcccaattaaaatacgcccgcctacagaaatagatagggagcaaagccacaaaaagattgttataaaagcgtacaaaggaagttattgatctggaactggacagtcctggtggaaacactggacttccacacagaaaaactaaaagaattggtgaattgtcaaattttgagaaacaaaagaaacaagagactgtgtatggaactgaaaggttttaaaaatgggacagttaagaggacagaagatgggcgggaagagcaagcagaaatggggaaatggtgcaaggcttcgggaaaaaaacagagcaagaaagcgtctccaaagaagaaaatcaggatgctccaagagccagaaagggtagtaccagataaaaaagatttgatggaagataatattaagagaaaagggagggaggagaagcggccaaaaagcctatcaaggaataagaagag

SEQ ID NO: 34177 - DNA, 304 bp, Glycine max
  Clone ID: PAT_MRT3847_130865C.1
gaaagcggtcgaaaccgcttaggcagaccacgtgatctcgttggtttcaagcatgtccgcgtgtggagcggtgatagctgcgtcgcaagccatgggtattgtgacgataatcgattgttgtttgacgatagtgtgagcgtctaggcctcacatgaaaactacggctcatcacacgcagacttgggctcggaacacgcaggcctccgattgaaacccaatgcccaccgtttacgatgcactgactcctgttactcccgattacaccctttttattcccgctgacgcttcttctgctaccgtttct

SEQ ID NO: 34178 - DNA, 457 bp, Glycine max
  Clone ID: PAT_MRT3847_130866C.1
gaacggccggtcaatgcagttgcaatgtcacctctacttgatcatgtatgtatctgtgtgttgtaaattagttaaccttgtgttgtgatattcttgtcatttatctatgcaagtaatttttcttctgctttatttgattgaggtctttatccttgaaatcggcatcctataattttgggaacctggttaaatatattttcaacacctttctttcttgctagagatttattccacatagaccacaatcatgattcttgttcattgtcaatgccctaatttataaaataaatgcacatccaaaatatttcatcattgatagtaccctatgaacatctttgaccttatattttttatttggtcatatgttccttgtatgattttctgaattccgcgtcctgtgtgtaggtggtacttggaggtggtcaggatgcatcagctgttactactactgatcatc

SEQ ID NO: 34179 - DNA, 828 bp, Glycine max
  Clone ID: PAT_MRT3847_130867C.1
ggggcataatttgagctgggtatactataatcaatgttgctcaaaaagaattaataagcaatatttacttcaactatgatttcaataatcgttcatggtatctagtacaaactagttcagattcagacggaactatatgtgatacaacctaaactatctactatttcactgtttcagttatcatctttacaaaatatacaaaatgggtgaaaaataataactaaaatgagactgcacaattgtgttgcggggggtagagaatgaattagtcattcccctcaaaaaaattccacgtcaatgttgagtcttctcccaaaaaattgcttgttgacattcaaagacaccaaatatggtggtagtgcaatcaactgccacaggtggtacctaaatttaaacttcgttaacaaaaaaatgagcacagcctattgtcacatgtcaatcatcaatttcttgaacccatgctaaaccttgaagcacagtttccacagctgcattaggaacaagaagcccaacaatacgttgcgtatccacagtagtttcaatgcgtacaacacgtagcctcctgtggcttaggcgggcctgctttgagagagccttttctacggctccccaaacaggaaggatgaggccacccaagacatttacttcctgtagtcttctaccaactgtacaaaagttgccaatcttacaattgggaccatgcatgcactgtttagatgaaacttcatattcttcttcccaaccagactgagccttttctaaagatgaaatttttctatatttactttttaattcagacagaggcatctccctgttcgattcaccaac

SEQ ID NO: 34180 - DNA, 509 bp, Glycine max
  Clone ID: PAT_MRT3847_130868C.1
ggctcaaaatgaattaagcaatacttcaactatgatttcagtaatcgttcatggtatctagtacaaactagttcagattcagacgggactaaatgtgatacaacctaagctacctactatttcactttttcagttaatcatctttacaaatatacaaaatcaaattatatcccaaaatgggtgaaaagtaataactaaaatgagactgcacaattgtgttgcccggcgtagagaatgaatgagtcattctcgtcaaaaaatttccaccaatgttgagtcttctcccaaaaaattgcaagttgacattcatagacacccatattggtggtagtgcaatcaactgccacaggtggtacctaaatttaaacttcgttaacaaaaaattgagcaaagcctattgtcacatgtcaatcatcaatttcttgaacccacgctaaaccttgaagcacagtttccacagcagcattaggaacaagaagcccaacaatacgttgcgtatccacagtagt

SEQ ID NO: 34181 - DNA, 265 bp, Glycine max
  Clone ID: PAT_MRT3847_130869C.1
ttcggctcgttctcgatccgtttcggctcgaaggcatgtgctatcgcactgctcactctatgcaagaatcgactcgccgaacctagtagccctttctctcttctctatccccgcaccatctacttctgcttcttccatctatccctcagtggattcttcagtgcatctcatttgggaagagcctgacacgactacagatgaagccatggaagacgttctggtcacggttccgggtgcgattctgcatctgatagaaaaggattcc

SEQ ID NO: 34182 - DNA, 138 bp, Glycine max
  Clone ID: PAT_MRT3847_13086C.1
cattctttgactatattcaataataatgaataagataactgcaaaagttacatccttaattatgtgaaattaaaatgaagggtgtaacttttgcagttatttgagccattctttgactgtattcaataataatgttat

SEQ ID NO: 34183 - DNA, 270 bp, Glycine max
  Clone ID: PAT_MRT3847_130870C.1
cacaggctgactggacctctctcaactgccctttaccttagccattcactactcatggccggagccatcatgatgtcaaccgggaccataggctctcttatgtcattctactctgagcactactcgatatcatacgtcactatacattgaagatctcgcatgtacattgcatattaactatgaaaaaggctgattgatataacttgatcacattgcataatatggcaactgctgactaattcaatgtctgaatgcataatgcgatgggat

SEQ ID NO: 34184 - DNA, 529 bp, Glycine max
  Clone ID: PAT_MRT3847_130871C.1
ggaaaaaaaaactcttatctagccacaatcttaaattaaaaatattgtgcttaaatttatcttaaataagataagttatagcatacacaaaataatttatttctttatttaaaattaagtttacttatatgggtgaaattattttttaataattctcatttctttcccttcactttcccatataatcaaacaaatgataataagtcacttcatttcattctttcctaatttcaacaatccaaataatacaatttaatccaaaaattactttatttaatattctctcgattttttttttcctctcaagttgacttcatatcaaaataaaatgtaaatgtcaaatgtcatataatttctggaaacttcagcgttgttcttcatatggtgcaattagtaaaagattcctatgtctgggaacttcccatccacatttccaatttgcatttttctaggtgtgcaaaacaaactatctaatgggttattaattaatagagtaaacaaaatttaatagggtaaaagagaaacgcaa

SEQ ID NO: 34185 - DNA, 625 bp, Glycine max
  unsure (1)..(625): unsure at all n locations
  Clone ID: PAT_MRT3847_130872C.1
cccctnangggtgaaanatattnnnnnttatnnnnntnagagaatttgaaattaaaaaaaaaatgaaaaaattgggacaccatgcctaccagacatgatataaaatcatcaaaactagtgtaaattgacttggagtcatccgaaagactatccatgctcacatattaaacctcgcaagagctctctttgagctttccactgctgctacagataatggaacgagagttgtcagacataactattattatcctttcatgcttacttgcattgcaagatagatcagaagaaactaatggcagaagacacctgaataggggaattataaatagattattcaggattgaaggaaatagacaccatgaatcagttgtacaaaattacatccaaagcagagaatatgaaattggaatttattttccatttctgcacaagaggcagcagtttctgagagagaattatacaccatgtttgaacatgtgtctaaagtccaaaaatttaaaattcatgaacaaaagcctncttcatacatctgtcaatggactaaaccttgaataaaaaatatgtcacatcaactangaacacttacacttggactgatgacagatnannntttnnnagatnnaca

SEQ ID NO: 34186 - DNA, 374 bp, Glycine max
  Clone ID: PAT_MRT3847_130873C.1
cctttgggctgatttatgtgcttgcatggtcgtgagaagatgatagacggggggcgaggccaacaaaaccaaaccagcggtgtatgccacgtgtcttagagagcgtgaggtgagagagaacgataacactcgcccctccagccttcctgatgttctagccgcgcaatcatagaactctacggttaacctttatccatttcctctccctcctcctcaagccaatcgccctatcgcgtctcttccttttcttaatactcgccactgaagagggcttcctcttcctattagaaccgattagcggccgcaaggtgcgcggaagagaagaaacggagtaaggacgtaacggcgaaggaaagacctaaggcgggaccgtc

SEQ ID NO: 34187 - DNA, 1558 bp, Glycine max
  Clone ID: PAT_MRT3847_130874C.1
atccctccaaatccaaatctttcccccccaaatctttcccctcggcctgcgctccttccccatcatcttcaaaccttttctctctctatttcctctctcctccggtggcaatggaggacctgtggaagcgcgcgaagaccttcgccgaagaggccgcgaagaaatcccaatccctcaccccttcctcctcccggatcgccgatctcgtctccgaaaccgccaagaaatcgaaggagctcgccgccgaagcctccaagaaggccgacatcctcaaatccgccgcgcttcgccaggccgaccagatcaagtccttctccgacacaatcgccattcctccccaatcgccattccttcccaattccgcgaccaccgccgccactggcgccaccgccaccgccccgccctctgcgacgccgcaggagctcgagaagttcggcgtcaccgacgacctcagatctttcgtcaagggcctcacttccaccaccttccagaactttcctctcagttccgatgaatcggaggtttctgatgtgactactgtgggatccaatgttcggaaggatctaaacgagtttcaggaaaagcatgccactctcgttttaactactgttaaggaaatttcaagattgagatatgaactatgtccacgtgctatgaaagaaagacacttttggaagatatatttcacacttgtcaacactcatgttgctccgtatgagaaagaatatatggaggaggttcagcttagagcggcggcagagcagaatgtggatactaaggtagagcaacctgctgttactggaggaactggaaaggcagaagcaacagggaacaatttgaagggtagaccttctaattcatcctctactgaacaagacttagacacatttcttcttggagatcttgaagacagtgatgaagctccagatgatggtgagggcagttttgatgatgattttgacaagattggcaattcagatgttgaagatgagaagcatgtgaagaaaactgctgcaacagtttaggattctcccaattacttattggttgagagactgaagtaaaaatgaactttgctgcttgcaactatccctgagatatcagtaaagacaaacggttgtagcagcctggaattaaagaatgttgactgtagtactatgtagatttggtgaattggtcagaaaactgaagtaattcgtcattgtttatttgtttaccttaataccctatatagtggcagattaattttggataaaatagtggtgctgagccctgttgccttgtacagttgaccttggtcgttgatatttctttcaatttgtaaactgctttagaactcttcgaacatattgtcgcttcttcttcattcagtgaaaatgtataatcatatttttgtttaatgtcgggatgatcatatctatctatattctatatttatatactatatatataggtaaaggaagcttaaattttcatgagtcgttgaatcaaaattttaattcgtcaataattgttgatttgatatattatatgtaaatgaagtttgatgtttttgttg

SEQ ID NO: 34188 - DNA, 329 bp, Glycine max
  Clone ID: PAT_MRT3847_130875C.1
gccacgcgtgcgctcacacgtcagttttttttttgactatttccctagatacaagagcatatcacttgtgacggatgtaatcaaaatatcattgtatcagataaataatgccaaagtggtgtgtcgaagctgagcttgagcaagagaaagaggtggaagaagcaaaggctggcatggaagaagctgaggagtaccttgactcaatgggggggagggccatggatgaccaaagacactatgcagaggagctagagaggatgtctaatattgagaagcaaagattagttcacactgctgcgtgtgccaaaaaaatggctggtaaaaccgta

SEQ ID NO: 34189 - DNA, 288 bp, Glycine max
  unsure (1)..(288): unsure at all n locations
  Clone ID: PAT_MRT3847_130876C.1
gggggggngataaataaaagtcccgcggtccccccccccaggagaccaaaaggtgcattgacacacccatacatcctacgaattgataaacccagtggatgtagggcgggtccttatactcttgggtaacatgaggtagacccaaccgttggcgccctaggatgctgtttgagcgccaaaaccttctgcaccactttcataaactcgaggaggaccattcaacactgaggttccaaatgcgagccatcctgtctgggcttggtgactctgcgtttcggacatgcttta

SEQ ID NO: 34190 - DNA, 672 bp, Glycine max
  Clone ID: PAT_MRT3847_130877C.1
ccacgcgtccggtcgtatccctcgaaatccaatctttccccttagtccgcgctcttcttcctcctctccttcatcatcaaacctttctctttctttctctcttgtttctctctcctcctgcggcaatggaggacctgtggaagcgcgcgaagaccttcgccgaagaggccgcgaagaaatcccaatccctgaccccttcctcctcccggatcgccgatctcgtctccgaaaccgccaagaaatcgaaggagctcgccgccgaagcctccaagaaggccgacatcctcaaatccgccgcgcttcgccaggcagaccagatcaagtccttctccgacacaatcgcaattcctccccaattcgccgccattgcctccgccgccacttccgccgccacctccccgccctccgccacgccgcaggagctcgagaagttcggcgtcactgatgacctccgatccttcgtcaagggcctcacttccaccaccttccagaactttcctcttagttccgacgaatcggagggctctgatgtgactactgtgggatccaatgttcggaaggatctcaatggagtgttcaggagaagcatgccactctccgtttaactactggcaaggaaattcaagattgagatatgaactatgtccacgtgctatgaaagaaagacacttt

SEQ ID NO: 34191 - DNA, 1666 bp, Glycine max
  Clone ID: PAT_MRT3847_130878C.1
cataaccaaccaaaccgactaactgaaaataaacaaaatggtgtcgacgttcgagaagaagaagaacctgagcaagctcatcatcccttcatcttcttcttccccaaatccatccccatcaagcccacacgtcattttcagtaggtcccactccttcgtgggcccctctcctcgctttgtcccttcctccacccctctcttcttcctcgaagaagaagaagaagaagaagaagaagaagaattaccatttggtcccgaccccccaaaaattggaccttccgatttccatattcttcgtgttgtaggacagggtgcctttgggaaggtctttctcgtcagaaaaaaaggtgattgcttcgacgacgctgatggcgtgttcgccatgaaggtgatgaggaaagacaccatcattaaaaaaaaccacgtcgattacatgaaagccgagagggatattctcaccaaaggccttcaccctttcatcgttcagctccgttactctttccagaccaaatctaagttgtatttggtgttggacttcataaatggagggcatctcttctttcaattgtatcgtcagggtatcttcagtgaggatcaggcaaggctttacactgctgagatagtgtctgctgtttcacaccttcacaaaaacggcatcgtgcatcgagatcttaagcccgaaaacattcttatggatgctgatgggcatgtcatgctaactgattttggactgtcaaaagagattaatgaattggggagatccaactctttttgtgggactgtagaatacatggctccagaaatcctactggctaaaggccataataaggatgcagattggtggagtgttggtattctgttgtatgaaatgctaacagggaaggcaccatttacacacaataacagaaagaaacttcaggagaaaattattaaagagaaagtaaaacttccaccattccttaccagtgaagctcactctttgctcaaaggattgctacaaaaggatccatcgacaaggttaggcaatgggccaaatggagatggccatatcaaaagtcataaatggtttaggtcaatcaattggaaaaaattggaggcaagagaactggaaccgaagttcaaaccagatgtgtctgcgaaagattgtacatctaattttgaccaatgttggacagcaatgcctgctgatgactcgccagcacccacacctacagcaggtgaccatttccagggctatacttatgtagcacctaacccttggctttcatctagatcactagattgaagaaggaaatttgtacatggatgaatgaatcaagatatgacctgaataagacaagtaacccaaatcttctcgcacaaaggtgccttccaatccgttttcagagttaactcttaaatgtaaattgtaatgctcattgcacagaatagagaatgtttagtggctctgatgtggcctttcatgtttgtgcagtttggtttagttcttgtcttaaaaggtaaaagatttgaatttctttgccttccattcaggtcaacattaatatatttgactagccagggcccaaaagaggctgaaggggtatagcatatttgacttactactatttatctagaagagttgcacgcatcaaattgtattgtgtcctattttttgcagcaccac

SEQ ID NO: 34192 - DNA, 424 bp, Glycine max
  Clone ID: PAT_MRT3847_130879C.1
attttagtaagacttgagtttttcttagaagcaaagcatgaacttaaatcaatactactactactgcgtgatagttctttcttttatcctctcaaatatcccaatttcttctctggttcttaaattccttttgcatgaactgattatgaataaattgttcctaatgattctatttagagcactgataaacgttaccccaaatgggtacatagggtgcaaggaagagagatgaaaaaaaaaagtgtgcagataagactaatgtagtccgaataaggcttgagcatttcacaccttcaggcttgttttgtgaggttaagttagactttaactctaaattctaagatggtctaagagtctattctactttctgttattgtgtcaccaatatttgtctatgctctagaagtttattcctaggcgtgag

SEQ ID NO: 34193 - DNA, 265 bp, Glycine max
  Clone ID: PAT_MRT3847_13087C.1
ctcgagccgctcgagccgattttatgtctgatcattttatcatatcatactaattataaacattatgtgtcaataaggtgaattcccatttaatgtgtgtaagaaaagtcttacaccaataccacatattaattaaattctttataaatattatcgtttttggtgtgttaatctatgatgaacttttgtctggttgttgcattggttttgcaacgcagtgaaagcaataaatgtccatctgttgctctcatgtttcaaattggag

SEQ ID NO: 34194 - DNA, 400 bp, Glycine max
  Clone ID: PAT_MRT3847_130880C.1
ttgctctcggagcaggtattgctagctcacttgttacaaagttgaacagaagaagacatcgcaaaacacttagaagacaagttatagttgagactgaaccttctaaagccgccgctttgaaagctaagttggcggaatatagagctcgttcttcatcttcttcaagcagttcttctgatgatgaaggtcgtaagagaaagacagctttccttgctgcagctaccgcagttgccagcaagcttggtcaacagagagttcatcaaagattcccaaatcttactgaacaagaactagcaattaaaaatgctaaagtccataagagacttgctagaagccttagtggctccagcagtgatgaagaagttaaagtagcaggaaagaacaaagctcttcttacaac

SEQ ID NO: 34195 - DNA, 320 bp, Glycine max
  Clone ID: PAT_MRT3847_130882C.1
ctcaaactctctttcatgcgtccattagattactttcacaccatagtcgttcgcgtacgagagcttatatctctgtaagcgcagaacctcgtgctgcgtttggcggctaatgatgccagggaaaggaccgaaggggtagatcacaggctaaacctgcaccaacgacaaagacaaggacgagaagaaacccatctcgcgaggtgctgtgccagaccttagatcccagttggacgcctgcacctgctcttgaagttaacgacaaccgctaatggcatatctggggccacagctactgtctactttgctgctatctagagata

SEQ ID NO: 34196 - DNA, 706 bp, Glycine max
  unsure (1)..(706): unsure at all n locations
  Clone ID: PAT_MRT3847_130883C.1
ccccattcccgtgttggccagtacggattacatgagaactggccgcctatcgctggatacagatgcaccaatgagggttaaaaactttccgagcgaaaagtggaacagaaagaaaagaatctcctagcatttccccaagggttcactctcccgccacacacactctccaaaggaccgctacagatccaactctatgtcagcttcttggctttgctgtagagggagtccactactttactcatgttctgaatagtttccagagcagcttcataagttttatctactgggggttcatcgaaaatgatcaggacaccctccccctggtccaaaatcccatgaaacttcttgtcaagaatcatctgtgataattttctttccacgtcggccttggagagtttgatgaggctagatatgtgttcaatctggactcgggaaaaaggctcgatgacccggatcagattctgttccagtaagttatcgtacagcttggccaaatgtgtgctgatgattgggtcatcccggagctctgccctgtagtctgtcagggccttttcaaaatctgccagtgatctgttcttgctagcttgagccacacatttcaatgcttctgtctgccttcctgcataaccgagtgcaagctttncgctcaccaaagcctgnacatctttctgggtgttgagcatgattttgcacagcaacatgtact

SEQ ID NO: 34197 - DNA, 403 bp, Glycine max
  unsure (1)..(403): unsure at all n locations
  Clone ID: PAT_MRT3847_130884C.1
atggaagatggaggatattgtcatccaaaggaacatggtgtcttctaatggaggctcgaggaaaaaactcaaacaccccctcccacgaatggcgcacccatgcttccttaaaatccaagactccacaaaacacatcttgatggctcataacaatatacatcctttcaccgcgttattaaaaatggcgcacaaactatgcatacatgagtgcagnncggagaatcattgctatgggcaatggaccaactacttcaggaactggtgtaacagcagacgccattcttatggcttcttcatacacaaacatcccccaccattttgttacctcggggactatctggatcctctaccgggatgaaagcgacttcaattgtggctgctccatgcttaatacacctccccc

SEQ ID NO: 34198 - DNA, 716 bp, Glycine max
  Clone ID: PAT_MRT3847_130885C.1
tccggaattaccgcctcgacccatgcgttcgcaaatcaagactcaagcaatgtactacttatacctatgttcattacgcatatcctccaccccttattcttctctccccggttggttggtattcttagaaaactattccgtggaagggtgttgctttgggaatggtctttttcgtgatcttccacagctttcttgaactgtgttgtgaggcttctctccaatgaacgtttataccctatgcaaaagaaattctatgagcacaattcaagatagctgtggaaaatcactgagatgatctggttcatcaattcctctttgaactaaattgttctctatgatacttgtgatgtcaaagtatcatgcatacgcaaaaaagttgttgagggatcgatgaacgtggaagtgcgacactttgtcttctagtgaagaaaacaaaaattgtgacgtacgtagctgcaattgtgacactgccacagattctgaacacatgcaatcaagtttggagtcacttctttctacctagttttttctacttcttttaagtaaaatgacatgcagctaaattatttggaacatatataatttacccttaatatttctttttcatgtttacatataatgactagatataattactattagagcgtgtttagatctaccttgtatttaaaaattgtgccatttccacattaattaacaagccactttctatggtt

SEQ ID NO: 34199 - DNA, 363 bp, Glycine max
  unsure (1)..(363): unsure at all n locations
  Clone ID: PAT_MRT3847_130886C.1
nantnatccgnncgtgnntnnngtcgtnntnnggctcaaggcnnangcngtcnctgncnntgtnattggcncctntgngcnnatngtnnngttgannnnnatnagtcatnnngnanantngggngnggngnattnngtgtntngntntnttggggtcatnncnnggtnnngntngtgggttgggtgtngtgcatctngtggctcnngnagacttgngntggctgnnggncagagtntgngnggctgtgtgcanngntgcnnggnntgtcngttgggtgttgtcgnngccaggtncntgngtntngtntggttgatgtgtngantgngncggtatgnntggattggcnngtgnngtgnnagngc

SEQ ID NO: 34200 - DNA, 363 bp, Glycine max
  Clone ID: PAT_MRT3847_130887C.1
ggaaggaaactttgatgaatgccttaaaaaggaagatattttgatacgtatccccaaatacagatatacaccacattcagatgataaatagttgtacattttaataactaattttgtcaggtcgtttctattgtatttgtatcctattcttttccatgaataaattacaagctcctggagcagtctgcaaaaatagaccagcaattccttggatactaagcgtgaagagttcaaaaacaagcatctggaacattctgcaaacatgcaatagcgactccttggttggtgattgtatagtccaatagaagcagaatatcttcctcaccatgcttcctctttatgaaaaatgattggtccttgaat

SEQ ID NO: 34201 - DNA, 424 bp, Glycine max
  Clone ID: PAT_MRT3847_130888C.1
gttgggacttttttttttttttctcttttttttctggaagcgccaaacattgttcataaatcacacctttcacttttatatttcctccggtttggacattttgacttacagcttcaagaggagcttttaataataatttaaccaagcaaaatttcttccccgccggggccaatataacatttgacaaccgccaggccttttaatcccacctttaaaaaatggattcccttccccctataacacaacccaggaaagaggggaaccccctggacccttcttttaaaacttttataccctcttttctggccccttcctcatcagatatattttgtcacttttaagggagaggggcttggaaaaaccaaactcaggggcctttgacgctaaaaaaaaaagtactgagttgttcccccgggggaattcc

SEQ ID NO: 34202 - DNA, 559 bp, Glycine max
  Clone ID: PAT_MRT3847_130889C.1
ataaaattgttaaacttactttatttgttgtttgttttgtgtgtttaaaaaatgaaagattcgaaacaaacatactaggaaaacaaaaaaaaaaaaaaaaaaaggagagaaaaaacggcctaaaggaaaataaaaaaataaaaaagaaaaaaaaaaaaaaaaaagggaaacaaaaaaaaaaaaaaaaagaaggcaaaatttaaataaattaaattttgaaagggggggccggcctggacttattcgatcaactacctaaattttaaaaaaaatgaaggccctttggggccgggggggaagggggggaaaggaaggaaccaataaagcccctcagggtttcaaaggggctggaggggggggaggcgtggaaaaaactgggggaaaaggggagaaaggggggttttggggggtaccgggggttttataaccggaaagggccacaagggaacctactaaaccggctttacctggaaaagggggctaaagggagggggggtcggttcggaaataatggaaaggatggggccgggcaggaccagcaaccatagaaccaacaatg

SEQ ID NO: 34203 - DNA, 429 bp, Glycine max
  Clone ID: PAT_MRT3847_13088C.1
ggtccataccaaaggcaaaaaaatttctcataaaatataaataaaattacatttttgtttctcgcttgaattcacatgaccaaggtgaactttttggtttttatctccttctcctggaatttcattgcataattaatatatcatattcttttattggataaatgcttttgcttttgcctttatggctttgcagttttaaaatgccaatgatgtttttttttccagagtgtttgttggttagtgatgtttggtttcactaggattagtaaagttacgtgttaatttgtggtttgatttttatgtttttttttcattgattgcattaggggcatggctcttaggtaaaatggtttttcagttgtcaatttgaggggtaatgtgcatgcgtgcatattcaggtaacatcttaatctttattttgtttaactt

SEQ ID NO: 34204 - DNA, 127 bp, Glycine max
  unsure (1)..(127): unsure at all n locations
  Clone ID: PAT_MRT3847_130890C.1
gagagaaaaaaaangccnaaggccatgcgagacttngaattaacaaatattaccttaatgacataacaaagaccattcaaaaggaaacattaaacagattttttagacaacatcgaaaaggagatct

SEQ ID NO: 34205 - DNA, 732 bp, Glycine max
  Clone ID: PAT_MRT3847_130891C.1
ccacgcgtccgctataatgacgataacccattgaacttcaacttctcagactcgcagaaaaggtctttcttttgatcaatggaggaaagaggagaatgctctgcttcagcttcagcttcagccaatccctcagatgaaatctgggccaagcttgttctgtcagatgagagatattcagatgtgcagataagttcagatgaaaaagtaatatcttcagagatatcagctacttctaatgacaaacatagctggtgcaaaatagtaaggaatcctgatctatgttcagccacaatggaaaacaagaggtgaagtcttgataacttaataaattttaagaaattgagtatatcatgctccctattagcaaagataaatatttgtggtttattagaaattattagtttgagaagaacagagagctattacttttaaaactaaaaaatgcaatctctatggccttctcaccccatgtttttcatctattattggacaaatatcattcaaaattgcagttggaggagataaatttcttgatgattgttagttggggcaatcatatcagtaaaatcagttctgctttgtgagggttgaaatccctaaaacttgtttcagcttgatgatggtgaatgaatactgattacttaaataattattttaaaatggtttttacaccccccattctggtttgaagtattagatgtttatgtatcacttcaagaaggtggtatctcc

SEQ ID NO: 34206 - DNA, 394 bp, Glycine max
  Clone ID: PAT_MRT3847_130892C.1
aaactcaaatgcattgatgctgattaatttttccaagatttaaatcagaaaccaggcagaccgattttcacaatctagaggtatctccaatgactcagcaaaataaaagatattttcaaatccgcaacaactatcaaaaaaaacatttctttacgccaatcacaaaacaaactttattataaataacctgggatcccacccctaaagaagaaacatccgttgcagatctcgacagcggttacaagggaatatagcctcttcctttgcaggctcaggggcgctcctctttggggcaatgccaaccctaaggcccctaaggacgctgcgaatacggtggctacacacagccttgatcagctaaacacccactctcacataattgggtcccaaaggt

SEQ ID NO: 34207 - DNA, 215 bp, Glycine max
  Clone ID: PAT_MRT3847_130893C.1
ctgatgctgcttgtggcttatccatggagatttcttctgtcagttacaagtgctgccactggcaaccatctcatcacaaggctcaatttccaaaaagtgccaatgccttaattaaaaaaaacctttaccctcctaaattattgaacccttccccaatttggttgttaattttcctgaagaacccttaattttcccactttgaattccattgggtt

SEQ ID NO: 34208 - DNA, 396 bp, Glycine max
  Clone ID: PAT_MRT3847_130894C.1
aattcggctcgagggagaatgaaaatgatggccattcctattcttctgctgggagtagaactgttaaggaacctagagttgtagttcaaaccacaagtgaaattgacatacttgatgatggatataggtggaggaaatatggacagaaagtagttaaaggaaatccaaacccaaggtatttccatcttttagattttaatagaagagtttaactgtgatgtactattggactagtgtaaaaaaagtcgactgtaaatcaattaaaaatttgtggacttttaagttagttattacaaaaatcaacaaacccaacacgatttgtaattggatgatagtataaaaaagcatttatactattcattcatttcaattaaactcttaatagaatggattagt

SEQ ID NO: 34209 - DNA, 1168 bp, Glycine max
  Clone ID: PAT_MRT3847_130895C.1
gtttatgactgctgtgaagcaaaactacggggaaaaagtccttgtacagtttgaagactttgcaaatcacaatgcttttgagttacttgctaaatatgggacaactcatctcgttttcaatgacgatatacaggggactgcatctgttgttctagctggagttgtagcagccctaaaactcattggtggtacattgcctgagcacacattcctcttccttggtgctggagaagcaggaactggtatagccgagctaatagctcttgagatgtcaaagcaggtgatcaagccaacagttttgattggatcatcaggagtgggaagaacatttacaaaggaagtagttgaggctatgacttcaaacaatgataaacctctcattctggctctctccaatcctacctcacagtctgagtgtacagctgaagaggcttaccagtggagtgagggtcgtgcaatttttgctagtgggagtccatttgatcctgttgaatacaagggcaaagtttatgcttctggccaggccaacaatgcttacattttccctggctttggtttgggtttagtaatctcaggagcaattcgagtacatgacgatatgcttctagcagcttcggaatccttggctaaacaagtgagtgaggagaactacaaaaatggcttgatttacccaccattctctaatatcagaagaatttcggctaatatagctgcaaatgttgctgccaaggcatacgaactgggcttggctacccgtcttcctcgtcctcagaatcttgtgaagtgtgctgagagttgcatgtatactcccgtataccgcaactataggtgaatgaggcggcttctggctctaacaaggatgtgtttcgtgtatggtgtcttattgtgcttttatgcacattcacgaataaacaattttatgcttcaaccagtgtttttctattatgaaatccttatttcatctaatgttacttatgtcgatgacaatggttattaaaatccataatgactcaagtcgtttcatttgccctggctgactttggtttgttttaaccaattgcaccatgtacttgtaataagttagtaatatctcaaatctatctatccgaatagttcataattgttattgtataattaaatttgataaaaaaaaaaaaaaacaaacaag

SEQ ID NO: 34210 - DNA, 1076 bp, Glycine max
  Clone ID: PAT_MRT3847_130896C.1
gttttcaatgacgatatacaggggactgcatcttttgttctagctggagttgtagcagccctaaaactcattggtggtacattgcctgagcacacattcctcttccttggtgctggagaagcaggaactggtatagccgagctaatagctcttgagatgtcaaagcagactaaggcacccatagaagagagtcgcaagaagatatggcttgtagactcaaagggtttaattgttagttcacgaaagaattcacttcaacacttcaagaagccttgggctcatgaacatgagcctgttaacagtctcctagaggcagtcaaggtgatcaagccaacagttttgattggatcatcaggagtgggaagaacatttacaaaggaagtagttgaggctatgacttcaaacaatgataaacctctcattctggctctctccaatcctacctcacagtctgagtgtacagctgaagaggcttaccagtggagtgagggtcgtgcaatttttgctagtgggagtccatttgatcctgttgaatacaagggcaaagtttatgcttctggccaggccaacaatgcttacattttccctggctttggtttgggtttagtaatctcaggagcaattcgagtacatgacgatatgcttctagcagcttcggaatccttggctaaacaagtgagtgaggagaactacaaaaatggcttgatttacccaccattctctaatatcagaagaatttcggctaatatagctgcaaatgttgctgccaaggcatacgaactgggcttggctacccgtcttcctcgtcctcagaatcttgtgaagtgtgctgagagttgcatgtatactcccgtataccgcaactataggtgaatgaggcggcttctggctctaacaaggatgtgtttcgtgtatggtgtcttattgtgcttttatgcacattcacgaataaacaattttatgcttcaaccagtgtttttctattatgaaatccttatttcatctaatgttacttatgtcgatgacaatggttattaaaatccataatgactcaagtcgtttcatttgccctggct

SEQ ID NO: 34211 - DNA, 472 bp, Glycine max
  Clone ID: PAT_MRT3847_130897C.1
caaatgcaaaggatcaacactttttgaaatttctagcggaggaagttacagaagctctggcctaaaaatatagccacctatactacgactcaacccgaaatacataatcactatgacgccaaactaaaacccactccaatccctcactaatgagccttggcctttttcgctggagatcacacgcttttagggaagttcgctaccctttaggggataatttacggcccagtcggggagcccaatatggaggcttagacggtgaccttcttaggtgcggccttagcggactcgagataggacttggaggccagagctgtggccttgcgtgtggcaacagacttcttcttaggtgcaggatctatgggcttgtgagcgggctcggaggcggactgagccgtattctgggtgggcttctagggagcaggttccgttttaacaagagcaaacttaatcggagcgaacttgaaagagt

SEQ ID NO: 34212 - DNA, 1605 bp, Glycine max
  unsure (1)..(1605): unsure at all n locations
  Clone ID: PAT_MRT3847_130898C.1
ccggnngtcgaccccacggccgtccgggnaggagagcacagacagagaacaaaggctaaaaccctgtcccgtggatctacgaaacccacataaaccctctctccctcccaacgaccgaggaagccatcaaaatcatcgcaacgtgaaagtgagagtgagagtgaaagagatctgattgtgttgtgaatctcagacacgacgccatgagaagggtaccttccattctcttcagaacccttgccgcccctcgcgccgccacctctttcgccgtccccaaccgccttcttcaggccgcgctctacggcagcgccgccgccgcctcccgttctcaccgccgccgcttctcctcgctcctcggtcccttcgccgccgcgtccctcggcgtcgccggggctctgatctctcaggaagtcctcgccaaggagcccccgccgcccgaggctctcccgaacgacgtcgttctctaccagttcgaggcttgccctttctgcaacaaagtcaaagcatttttggactactacgatataccttacaaagttgtggaggtcaaccctctcagtaagaaagaaatcaaatggtctgagtatcagaaggtgccaatactgatggtagatggcgagcagctaaatgattcatcagttataattgataagctgggacataagattctgtcaaagataattgtagattcaacttctgaggatgaagagacaaaatggcggcggtgggttgataatcatttggtacatgttctgtcaccaaatatatatcgaaatacatctgaagcacttgaatcctttgagtatattacgagcaatggcaatttcagctatcttgaaaaattttcagtgaagtatgttggagctgcagcaatgtattttgtgtctaagaaactgaagaaaaaatataacattactgatgaacgtgctgctctttatgaggcagcagaaacatgggtagatgctctggatggccgggagttccttggagggtctaagcctaacttagctgacctggctgtcttcggggttttaaagccgatccgctatttgaggtctggcaaggatatggtggagcatacacgtattggcgagtggtatgcaagaatggagagtgctgtgggagagccttccaggattaaagcctaaattgggttctttcttgtcctgacaattgacatttatttttttggcttctactattattatggtcttgcttttgcctccactggtttgatggaaaacatttaggtttctcagataacatatttggctctttagaacaatactacaatgtggtattagtgttatatataggcaaagttttgctgaacaattgattctttagaaaaattattcttctattatagctgctgttattgtaaagattaaagaaatctttgagctgtatcaaagaataaggcaacgtctgctatgcctgtgatacttttaacaccttggttttgattaatttgatgtataaatgacttgatagagttgaatattgagtttgattttgatccctgatgaatcgatgtaaataagttatgagaaactgaatcgatgtaaattaaggatttgtcttctaaattgattggtacatttt

SEQ ID NO: 34213 - DNA, 271 bp, Glycine max
  Clone ID: PAT_MRT3847_130899C.1
atccagcatattcttgatttgttggttttccttctctgttcgcttctttctttgcgcctaggtggggatggtcccaacactaactccgtgccgaaacattcccggtgagaaaaacctctcattgggggggcggcatactttcttagctgtcgcagcaagatgactgctccacgtttattttcattgggggcgtcctccaggcgcaaaagggggagggccggatggatactgcatatcttgtcagaacacgcagcgggcccaggggcaaaca

SEQ ID NO: 34214 - DNA, 399 bp, Glycine max
  Clone ID: PAT_MRT3847_13089C.1
atcgtctagctatctcgatcgaactgtccaaggtcctgtcacatggcggacatagctaaataagccacgccggtttaattataaatgtaaccgcagggacgagtgtttaccgtgccatatctgccgagtatgaggcagcaaactgccgggagacggccgccgccacagaagacaaccccgcgtttgcaaaatttgccgcggacatagcttgaactggcggccgtacgaggcatgcggcgcaaataaaaacaggtctgggtgacgcaccgtggacgcgtgcggtagtaaaaaggcagccacaaaacgagggcggcgtagggccacggagaacccaccgagactaagcacggggcggagcacatttacctaaccagattagctgtttacagggggtaagat

SEQ ID NO: 34215 - DNA, 385 bp, Glycine max
  Clone ID: PAT_MRT3847_1308C.1
ctacaaacactaatccggtggaaaactcccaaaggatatggcactcttgagatctacctctgtgtcacaaaattcctaagtgtttttgactacaactagatgagagaatggcaggcccagaacatgatggatatgaccctttttttggtggaaatcaaaaatatgccactcccatgatgcccctagatgaaaaaataattttctaaggttgcacaagatatggttgaggaactggcttgtatgtgttgataaaggaggaatactctgaggaagtttcttaaagtgagcactcaatagagtctaggggttggactattttggaaagaatatcctcttgccacaatctgagggggctttccctcattggggctgtccacaccaaaaa

SEQ ID NO: 34216 - DNA, 877 bp, Glycine max
  Clone ID: PAT_MRT3847_130900C.1
ggaaaatcgagcttgaaaaagtctaaaacccgcgctctctccgatttttgaaatggaagacgaccaattggaactctgcaacgacgacggcttcgtcttcaagcgcaagcgccgccgcgtcgacgccccaccgccgccgccctccgagcccgaccaagaggcggcggaaaaattccggagagagcgtaagaaacaaaccctactcaagctcaaatccaagtatgagaaagagattcttcaatgggaatcattctcgaacaccttgcgctcaatgcaacaactacacaccactccacaacaacagccccaaccaaacctaagcctatctcttccttccaccgattccgccggtacctccctcctccgcgacctcctattgcaggtggaggcgcaggatgcaataattcgtgatgtgtcaaatttatgcgacatagcggaagcagtgtgcgttaagagagaagaacagcttaaacaaaccttgtttgatcttccaatctgggcttctccgctcgaacttatgcaagggttatatgatggtgttgatgattgaagctgctactgcattacatacactcttggttatgaatgtgaagaagcagaaaagaaaagaaaaaggatggtcttcacactagcaattttattatttgtaagtgtaactctgtagtagtggcacggtgatgtcttgtagattaggcatttgggcaaaatggtaaatatcctccccttgaattgttatcgactatatcgaatgaatgatgagcataaatgatgaatttaaaaggtgggggaggctaagatggaatcctgtggttttgtataaagttcattaatttctagaatctaatgccattatgtaaaaaaaaaaaaaaaacccccc

SEQ ID NO: 34217 - DNA, 246 bp, Glycine max
  Clone ID: PAT_MRT3847_130901C.1
aaaaggggcacaagtgagtttggtgattgaaataactaaaaacaatgttatgaaaatgaaagtccttgttttcatcgttgccacaattttggtaacatggcaatgccaagcctacgataagttccctctccgaattaacactggctatggtgaccgtactccggaagttaaatgcccaagtttgaagcttgctgttgaaacacacaacaaccttggcttttaaaacaatcctgaaaaattccttta

SEQ ID NO: 34218 - DNA, 233 bp, Glycine max
  Clone ID: PAT_MRT3847_130902C.1
agggcaatgagggcatatctctagccagactttaacttaaccccaaatcgtatcagcggagggcgttatggcaataatgctactggctggcaagaatgtctgactaaagattgtatatagccgcttaactgcgcaatctgttttaatatccgtaaggtgcttctgtaaatttgaaactttaataacgttacgacagaaatatactgaatttattttcattgtcaaaagctaac

SEQ ID NO: 34219 - DNA, 984 bp, Glycine max
  Clone ID: PAT_MRT3847_130903C.1
gtcaaggttggtcatatttgggtatgcaacttacacacagtttgatcgatgatggaaacgttggccacatcttcttctgcaactcttccatcttcttcttctcccttttctatattcccttcaagaagaacttccctttctcctcccaagactctccaatttcgtttaccctcctccaagcgtgatgatgctcgcgattcagactctaaccaaaacaatcttcctattctcagtgatcgctgcctctccctttcccctctttccaaagatgctgcgatggggctggtgctgagtgctgcaacgggcagaggatggaccacgggttcagggatggaaggcccctctgttcctgcagttggtagggatagcgaatctgggacggggaacatctccactttcccatggtctctcttcacaaaatcccctaggagaaggatgctggtggcttttacttgtaccatctgtggccagcgaactacaagggctattaatccccatgcttacactgatggcactgtttttgtgcagtgctgtggatgcaatgcatatcataagctcgtggatcacttgaacctgtttcaggagacaaattgctatttgaattcaagttttaattataaaggagaaggatgggatgatcttaagttcaggtatatggatgataacgatgatgatgacatattccccattgcataagtgaactgcctgcatatggagcatatactctctgcctaatcatgtggaagttcagtttagatgtcttgtatattctttaggttttcatgctttatagtgaaatttgtcagagacttgtatagtaacatgtttatatatagctttgaactcatttttatgatcatgaatttcataatgtacaagacattacacaaatatttcctttgcttctctacattctgtgaaattgctagcttttttttttcctctgataaattataaaaataaaaatattaataattaaaataa

SEQ ID NO: 34220 - DNA, 1336 bp, Glycine max
  Clone ID: PAT_MRT3847_130904C.1
gcggggcggggccttgttcctagcggggaacggagttggtggggcggggggcgcaaagcgacacaccgcgtccgtccttggcttaactcaattcaactcagctattctctcttctctataagttcctctcctccattgtttttccctcccattcttccatttctgttttctcccatccctctcgcgcgctctctctcccatggaatcctccgctgccattcgatcttttcactatcccataggcactatgtcccatgtgcgagcctcccttgagaagcaggctgtagttcccattcataatgccggatggaactctaaaagtaggcttttcatccagcatttggcatatggtcagaagcacattaattcccacacgaaggggaaaaacacactaatttcatgtggaaaaacagctgaagctatcaacgcatccaaatctgatgcttcttcagataacactccacaaggctcattggagaaaaagcctttgcaaactgctacttttcctaatggatttgaggctttggtattagaggtctgtgatgagactgaaattgctgaactgaaagtaaaggttggagattttgaaatgcatattaagcgaaacattggagcaacaaaggttcctttgtctaacatttcaccaactacaccaccacctattccaagtaaacctatggatgaatcagcacccggtagcctgccaccttcaccaccaaaatcatctccagaaaagaacaacccatttgcaaatgtttccaaagagaaatcaccaagattggcagcattggaggcttctggtaccaatacctatgtcttagtatcatctcccacggttggcttattccgaagaggtagaacagtgaaagggaagaagcaacctcctatctgtaaagagggtgatgtaatcaaagaagggcaagtcatagggtatttggatcaatttggcactggacttcctattaagtctgatgtggctggagaagtgttgaaactacttgttgaggatggagagcctgttggttatggagaccctcttattgctgtgttgccatcttttcatgacatcaagtgagatagccttttcctgttaatgattaatcatgcggcattttttttattaggggagctattcgcgtattcgcaaaagtttttaataggttacaaataaatgtgactaaatatttggtacggaggttccttattgaaaatcatactttgtataccaattgcttaaattgtaccggataagctattctgagaccgcctcattatgtatcttacttgctggagtttgattactagcttgtccttttattttatttattttctcgct

SEQ ID NO: 34221 - DNA, 414 bp, Glycine max
  Clone ID: PAT_MRT3847_130905C.1
ccacgcgttcgtggattcactgagtgtgtcttatgttggagcatgactgcacatactcttcagaaactaaaggaagcaatctagatgcttaatctaccggggaggcctgagcatacctttattgtaaaaagacgcatgacatgtcatgcgttattttacaagaaaagaaagcttatggcggcacggtgaagaaagcattaaaattgcttgctctatttactgaaaagcaacgtgcctgcattgcatctactttatacacgctatggattgacgaagacgcgtgggggcacccggtatttacgaaccgggatctggtagccttccatgttaccctatagcgtgtctatttagagctcgaagtaaaaatggctgtacgtggtttctgagcgaaatggctgtgaaatcacatgttgc

SEQ ID NO: 34222 - DNA, 700 bp, Glycine max
  unsure (1)..(700): unsure at all n locations
  Clone ID: PAT_MRT3847_130906C.1
ggctgctgctatcgaatactcggataaggagggtaagggcggtgaagtgcagtacttcaatccccttttctctcttctccttttatttcatcactcacacatgcccagttctctccaccagatggattgccttatgatgaattcttttcacaaagatctgagtctctcttgaaggttcttaggtcaggtgccaggataaagaaggaagcctttcaggctgcttccattcctgttgttttggtcgagaacagtgggagatgcaacaaaaatgacagtgatgaaaaggttcttccaaatgggactgcttggattcctaatctagtccaaacaatcacagatattgcattgaaccaaagtgagtctattcacgttgacaagaatttgattgaagggccaaatccgaatcagagaggaaaattatggactcctcttgtgtttgctatccaatacttccttatcatgaagccaataaaaggactgatcgagaaggacattgcaaatgagagaaagccaacatgggangagacgtgatgccgctttccggaagagagatttatattnagctgtgcaccttctgtgcccatgaaattccatggatgcttagcttcctttgctagcacattcgtttacttttgtctgttctacgaatgaacttggnagggtttttcttatactgtaattgcttggtagtctgcggcat

SEQ ID NO: 34223 - DNA, 1547 bp, Glycine max
  Clone ID: PAT_MRT3847_130907C.1
ctcgagccgaatcggctcgagtaggctgcgagaagacgacagaagggggaagatacggacgcctgctatcgaatactcggataaggagggtaagggcggtgaaggccttgcagtgcttcaatcccctttttctcttctccttttctttcatcactctcttcgttcttttcttcttctccaaattttcaattttcacacttttagaaacatcttttaatggcgtcccaaatccgtgagtggtctggaatcaatacattcgcacctgctacccagactaagttgcttgaactcttgggaaatcttaaacaagagaatgtgaactccttaactatacttgtgatgggaaaaggtggtgttggaaaatcttcaactgtgaactccatcattggggaaagagtggtttcgattaatcctttccagtcggaagggccaagacccgtgatggtgtcacgatcaagggctggttttacattgaacatcattgacactcctggtctcatttgaagggggatacatcaatgatatggcacgtcatttgatataataaaacgttttgaacaagaccatagatgtgctgctttacgtggatcgcttggatgtgtacagagtggacaacttggataagttagtcgccaaagctataacagatagttttggcaaaggaatatggaacaagaccattctaacactcacacatgcccagttctctccaccagatggattgccctatgatgaattcttttcacaaagatctgagtctctcttgaaggttcttaggtcaggtgccaggataaagaaagaagcctttcaggctgcttcaattcctgttgttttggtcgagaacagtgggagatgcaacaaaaatgacagtgatgaaaaggttcttccaaatgggactgcttggattcctaatctagtccaaacaatcacagatattgcattgaaccaaagtgagtctattcacgttgacaagaatttgattgaagggccaaatccgaatcagagaggaaaattatggactcctcttgtgtttgctatccaatacttccttatcatgaagccaataaaaggactgatcgagaaggacattgcaaatgagagaaagccaacatgggagagacgcgatgctgcttttcggaagagagatttatattagttgtgcatttctgtgcccatgaaattccattgatgttttagcttcctttgctgacacattttagtttttgtctgttctatgagtgaaacttggatgattttccttatactgtaattgctagtagtctgccataggaatttgtttgtgcctgagaggattgcatgtatgctggtaagtttttggcttttgcatgattcagtttgttaatgttagtctttaaatgtcttgtaaacatagctctagatgtggctaccatcgttaatagcttgatattctaataaaattagcccgaagtatcgatattaatgttctatagaattggttttaataattactgcagggcccaacagggattacgtgatttatgttgagttatttattgattaaaaaa

SEQ ID NO: 34224 - DNA, 278 bp, Glycine max
  Clone ID: PAT_MRT3847_130908C.1
acggctgcgagaagacgacagaaggggactggattagttttaaagaagcttcacaactacaatactacatcgcattgttggtcttgactcatgagctaatctttagtcgtggatgtatttgtttgctccacaaaacaatgacttgaaatttaatagggaaagtatatttatttgttgtaacttgtaacattctactgggcaggaaatgaaatgcatttggggtgctttatgctttcggatgtctttgaacactagccagctctaaaaagggatactca

SEQ ID NO: 34225 - DNA, 945 bp, Glycine max
  Clone ID: PAT_MRT3847_130909C.1
ccacgcgtccacttcccaaaaaatatacagcactatggaacaccaaaaagaggagcaactagaaccagtgagtcctgtgggacaatacttcaacagctctgtgctatgcatatacatcattggagttttagaattcgaagttccaatagatgacttgcaaacatatgctcttcttaaagatgttttccttcccatcaatccacgcttctcctccatcatggtccaagataaagatggagagaaaagatggaagcaagttgatgtaaacttgacggaccatgtcaacatccccacattccccgaaggaaaaacagcggaatcttatgataaatattttcatgattatttatcaagcatagcaatggagcaattaccacaaagcagaccattatgggatattcacataatcaattaccttacaagtgatgcatccagcactataatatttaagcttcaccatgcacttggagatggctattctctcatgggtgctcttctttcttgtcttcaacgagccgatgacccttctcttcccttgtcctttccttctctcaaacaatctaaacaagaaccttcttccactaaaagcttttgcagaaaattttcttggatgtgttcctctgccttcaacactgtctcagattttggatggagtgtattgaagagtagcatcattagtgatgataaaacaccgataaggtttggagacgaaggagccgactatcaaccaatttccatatcaagcatgacattctccattgaccacatcagggacatcaaatcaaggctcggagtgacaataaatgatgtggtcactggaattgtcttctatggaactagattatatatgcaagatatggactccaaatcaaagaccgcacactccacagcattggtattactgaatacgagaaacgttgaaggttaccaatcgatcaatgatat

SEQ ID NO: 34226 - DNA, 290 bp, Glycine max
  Clone ID: PAT_MRT3847_13090C.1
ctaccgccttggtgaaaggaacctttgaaaaaggtctttgggaccttaaagaaaaaccctggtagcgctaaattcccaccactggagaactcatttaatccttccgctatattatcttgaacacatttgcagctccatacgctgctgataattttggacaatatccttatggcggcttaatcctgaaccgtacatctctacccagaaggtttatcccatctgaagcaaccccatattatgattagatggtgaataatcctcaagattcttatctgagaacaatcacaccc

SEQ ID NO: 34227 - DNA, 429 bp, Glycine max
  Clone ID: PAT_MRT3847_130910C.1
cgacgacgccaaaggctgcactgattaacttggtccatatatatcttggcttaggaaatcatccgatgcaatccgaggcttttcagcacagctttgctgattccctatgtaccgtccctgtcattttattgacaggtttacctccattcgactagtgatggaaaatagtatgctctgtaggcgtcaagatctcacaggtacaaacattagttggcccaggcatataccagagcctaacgatgctagatttgtactctgccggatgccaactagactgtcttatatgagagggaaggatcaccaccggtgaaattccggcttgacgaacgctgaattacactttcgcgtgggcgaacagctagagagatattccactatctgcacataaaaaaaaaaagggcaagcagcgtctaatatgctcgtgtgccc

SEQ ID NO: 34228 - DNA, 1086 bp, Glycine max
  Clone ID: PAT_MRT3847_130911C.1
cgtcgatatctcggaatggctcgaggtcgcggatggtggcagtgttgagaacgttcaggctggaaagaaggattcagagatagagggtgatgcgaagattgttgataatgttcaggttaggaagaaggatttggagatagaggaagatgagacgggtgttgctgcttctgaatctaaaactgatgttgatgataagtcggagaatgtggcatctaatgttcctgagaatgtaagtatcagtggggataagttggatgttaaatatgaagagaaagaggcatcagaagggaagacagataacgataacaatggttcgtgcaaagacagtgatatttcagttgtttcaagccagccttcaatgcctggggaagaagacattggctgggatgaaattgaagatattgaaagcaatgatgagagtaaaggggccacaagtaggattgatttgcggaagagattgagtgtggcagacgaagatgaggatctgagttgggatattgaagatgatgatgaggctgccaaataatgagcagattgtgggttcatatcattgatgctttaattattaaacacaaattgcttattaagtgtataattctttcttataaattaacaatgtaaataaattgttttttacgtcttatacaagcttaagtctgaaggtggacaccagttgaaagtttaatttgtaagttcttgtggattcttcatcctctttgaggaaggttcttgcactccatattcggtgtacctttttacaggaaggcatgttcagttatttgcaactgctattttaaaaaggatttgtataatcatgtcatatggagccaccttattactgatatgtcagctgcacttcagtatgaatttatttagtagtattaagctggcagcatcttgtaattgtctgcatttatattaacatggtagacgggtatgcaataggctaagccttttctctccctaaacattgcatacttaaacattaaacagccagacagagctggacataggaaccttttattcagtcttgtaattaaatgaatgtcatcattgttgtattatttgtcacagtagacatttcaa

SEQ ID NO: 34229 - DNA, 342 bp, Glycine max
  Clone ID: PAT_MRT3847_130912C.1
agttatccggggggggttttttaattatttggggggatacatgatctcaaaagaaaaaattggttatgaaagaagggtccagaagagatgaataagtttgtacaaaaaaaatgttaccctttggactctattttaccaattttccccacaagagcaagaaccccaagcgagaagatggaccctaataaccagggtaataccgccctaaaagccccttatgttagaaaccccagggttggcaacaaggactgaattggaaaccggaaacaaattggaaactttccaggcaagttccggaggagattttaaatgggcaaaggaaataggccaggttttttttta

SEQ ID NO: 34230 - DNA, 1251 bp, Glycine max
  Clone ID: PAT_MRT3847_130913C.1
ccacgcgtccgaattttataagaatccatgaaaacttttaaaagtgcccttggaccatttttgagcttttatctgatcaaggctcctagtggagctaccagcctgtctaaaggtcatctgtcataggggagcacctgcagggttccatgatgatcctctaaagagacccacccaagttggttatggttctcttataatcatgctggtagcctgttggtgtgacccatgaaatgtaaatatggtataccataggtgtatgtgttggggagatcttaatgggatgataacttgattttactcctctcctctactttatagggtgctttgggagcatggcctctgtggtttggttgtgccagtctgagcttctatataatttgtagagggacccattaaaatgggtattctgtaggcaaaagcactggaaagaccctaatgggctgataacctgactatggtcccctcctctgtttccattaagtgttttaaatattatgtttgagagctcagcctataaattttcatgctggtgaaattgaaattacctatgatttatgaatctccacttatgtgtatggtccattctatccttgtggagtggttaagtattccattaaactttgaagtaaattactgatcgttctgtgattgtggtttgtgataaatgatgtaagaagttgtggtccaggcaaattgataatccatctggctattgagttcttggtatatgttcttgaattttttgtgccaatgctcattgtggccactgagcacaccatgagctgtgaggcaggagggacatgtattattgatcaattagaccggaaaagtgaattttgaatcattaaattactattgttgtttatagattgactttgttaaagaattatcttctgactttttttttcttttttaaccttccagcaagattctttaaaaggtgcaaagtggagcaacagagctgagatgactgaggaagaagcattggctgaacagcaaaggatgtttgcagaggcacgtgcaagaatgaatggaggagccattcaatccaaggagccagaggctgaccaaagtttagagagctaactttataggacacttttattttcttttgaagcataggcaagcagcatctcttactctttcttatgcgttggtaatttagctcgattttgcacatacccccattcactagtttgctgccctacgtggaatgtactcgccattttgggttctttttagtaatccata

SEQ ID NO: 34231 - DNA, 465 bp, Glycine max
  Clone ID: PAT_MRT3847_130914C.1
gacattttggcagaattaacagatccaatgccctcttgttctgaaaaagaaaaagaaaacggttacacccaaaaaaaagtacatgcttacccatctgggcatgttataaaaacttgattttttacatcagtgcatcatcaaaaacctcttttcttaaggagaaaaaaaatagtgaatgaaaaaactaggaatttttctcccttggctgcttcccatcctctgagagaattcccagcaaccctaaaaagggaagtaccattacgacccatcaatcaaaaccccatttgttttccttcttgaaaacaaacaaaatgaaaaaaaaaaaactgaataggggcaaaaaaaaagttctccttgatactgtgctaatagtttttcttcctgagagtttctatgtacccaactagaggaggaacagcatcattacactccataaacccaaatcacatcttctctgggggaaaa

SEQ ID NO: 34232 - DNA, 238 bp, Glycine max
  Clone ID: PAT_MRT3847_130915C.1
agcacacgtcaagaatcccaggcgaggagacagatggagcggaaggagcaggatgtgtcgttgggagcgaacaagttccccgagatacagccaattgggacggcggcgcagagtccagacgacggcaaggactaccaggagccggcgacggctgcgctggttgacccgacggagtttacgtcatggtcgttttacagcgcagggatagcagcagtttgtggccacttttctgtttctc

SEQ ID NO: 34233 - DNA, 374 bp, Glycine max
  Clone ID: PAT_MRT3847_130916C.1
tgggaagaacaccaaattggaaaggcaacactgaagtttggttcaaaaaataaaaaacaagtctctgatgattatcagtatgtgtttgaggaccagattgattttatcaaggcatcagtaatggagggagataagtttgattatgaagagatggaagattcacatgaaaaatccaaagcgaagtcagctttcgaggcacttcaggaggagaggaaaaagttacctatgttcccttatcgggatgaattgctcgaagctgttcataatcaccaggtacttgtaattgttggagaaactggttccggaaagacaacacagatcccccaatatcttcatgaagctggctacacaaagcgtggaatgattgcatgtac

SEQ ID NO: 34234 - DNA, 339 bp, Glycine max
  Clone ID: PAT_MRT3847_130917C.1
cttgggggtctaaatgcttaaaaacactttttacaaaccggtttatccaaacgagataaaagaatcaatattccgtgggtttattacttgcaccatgtcaatacatggggtctttgggggtaaattatattgtgaaacatgtgcactgagacacatacacgggtctttttattaaacatacgtccccatacatttgctgcagaagaagacccttgagacgaaaacgcccaacatttttaatggaagggctgtccatgggaacatttatagcgccacgggcggggcccctaggggaaaaattttctgcactttaaaaaaattgtgaaaagccttggaaga

SEQ ID NO: 34235 - DNA, 341 bp, Glycine max
  Clone ID: PAT_MRT3847_130918C.1
gaggtgacctaaaacaaagggaatgaattgctcaatgatgttctccccagctgttccgaccgggtaccatgccagtgccgggctggctacttcattcacctgcctcaaatccatggctgtcttgcccactactaagaccaacaattacactacctgcatggttggcatcggtggacagatccaatgcatgcatgtgtcgacaccaattgagaggaagaaatccgcgactgtttactactttccagacctatatgatgcccacttggcaacagatgaccaacaccctctcttgtatggctggatcccttgcttgcaatccaaggtcacacacgggttcagtg

SEQ ID NO: 34236 - DNA, 205 bp, Glycine max
  Clone ID: PAT_MRT3847_130919C.1
tgttacggctatgaaaccacatatatacacagtacatagttagttattgcgcctgctccacaactctctaccaacatatgtatctccagatattctatacacaatatgcctaccactaatagcaataataatgcctttatcaaatatctacattctgatctttctctccatccttctaacactaatctttcattcaacaatacat

SEQ ID NO: 34237 - DNA, 343 bp, Glycine max
  Clone ID: PAT_MRT3847_13091C.1
aaaaaaaaaaacaaaaacaacatactttcggggaaacgagttcaaaacatcatttaaaaacaaaaaaaacagcggcccttaaaccaaaaatgcaaagcccaagttcaggggaaaccctgaccaaacagataagacataggaaaacccttcaaaaaggggatcccccttagcaccccccccgaaggggaaggacaagaggcaaaggggatcccttcggaatatgggaatcggccaagggacaaccatcttccaatggcttttaaccaaaaaaaataaccctcgggggggcgggggggaaaccccccttatctggaatctgggctttcacatgggctaggggatc

SEQ ID NO: 34238 - DNA, 371 bp, Glycine max
  Clone ID: PAT_MRT3847_130920C.1
ggggaacaaaaaaaagaaaccttttttttcctttggcatttcattatcagaaaaccttttgttttttgtttaaaagcccccttttctggttaaatggagggcggctccaatgggtgtttttttcctaaactttaaaaacctttgttttttttttaatgaaacacatttttgactttttttccggggaaacacaacacaggttccccaaaatttcaggtaaaagggtggatttccaccccatttttttaaccccggggttccttttgatccacctgggctttcttttaaggctttttattaaacacagccgggggggccttttaaataaaatctccattcccataataagcatccttaaagaagacccccca

SEQ ID NO: 34239 - DNA, 359 bp, Glycine max
  Clone ID: PAT_MRT3847_130921C.1
gcgatactaacagggaggaagatgttaattgaagcaagaggagactgacaatctggggatacggctgctctagaatgacatctatgcaaaccgctgagacgctagtgctgcaggagccgcggagaacacatgagacactggagctacttgctagaagaaacagtgcagttccagggctacataatgaccacaggacgacaactgatggcaattcaagtcgagatactatctggctatgacggaccagcctactagatggggcaaagttcaggcattgtcatgaaccgccatgccgacagcatcagacatctggggcatgaagatcaaagaggtctagaaggcatgaacgctagaattat

SEQ ID NO: 34240 - DNA, 286 bp, Glycine max
  Clone ID: PAT_MRT3847_130922C.1
cggaattcccgggtcgacccacgcgtccgtagaacgccgcgatctccgcgccggccgggtccttatcttgggatcgggtggctggggcggggggaggggggcccaggcagagagcgcggaaagcgataaatactcggaaccttctccgcctcccgcaggccccgttatctgcctaccgctccgacaccccgatgatctgagccagtagggctacgagagccatgggcccggacccagcccgattccttccctgctacgaccgggccctgacgtcatagctaaaccc

SEQ ID NO: 34241 - DNA, 362 bp, Glycine max
  Clone ID: PAT_MRT3847_130923C.1
cccacgcgtccgcgccgccgcagcagcacactccgaggttgcagggtgccaatggcggccttcgaccactttgggaacatgtacgacgttgcattcaaaccccgcttgcttcaaaccctcatcagagaccacctcccggacgagaaacgccctttttcgaacccttcagaactctccaaggtcgtttcgttgatcaaaacgcactctcttctctgcgagtctttcgcagattccacgcgccccaaactcatcgaagcatggaaatccgcactcgcttgctggctcaacctcatttactccctcctttctaccaccatgccagataaatgctgggcgggtatctccctgtcggggctacttgt

SEQ ID NO: 34242 - DNA, 613 bp, Glycine max
  Clone ID: PAT_MRT3847_130924C.1
tttttttttttttttttttttttttttttttttttttttttttttttttttttttttttttttttttttttttttttttttttttttttttttttaaaagacaaaacggacctattcacataataaaaagaaaaccgggccccaaggggggggccgggaccccatgaaaaaaatttttttgcccccaatctaaaaattcacagggcttccaaaaaaaggggggctaaaaaacaaaaacttttttaaaaagtcaaagggaagggaaaccaccagggcacatttgtttccatggggaacacaaaacaggcggagggggcaaaacaatttctttaaaccacagccaaaaagcccccatatgggcatcatcaagggcaaccggatcaaaaaaaccggggggaatctaaaattcggccccaaaagcctcaacaagacccccaaaagttccccgcctatggaaaaaaaaaacatgattccccaaccggacggccaagttgttagaaacggattcaccagtcccaaaaaaaaaccgcccttttgctctcccaggggaccgggggggatccattggcccgggcttaattttttcaggccttccccccttgccccgcataac

SEQ ID NO: 34243 - DNA, 507 bp, Glycine max
  Clone ID: PAT_MRT3847_130925C.1
ggctcgagtagtatttgcgttgacggtgtcatatagtatttgagttttgatattttaatttaatttgaattagttgagaacattcttgtggaatgatgaatagatcctttttgagcttcctgttattactgttttttgtttctgtgtaagattccattgtgtggactgtggagtaatatgtatgtcatttgtcatgttattctttcctcgttcagtgattaattcatattctcataattgttctcttcttggtacaaatatagatattctcatatttgcttgttaattgaatatcttgtcatttttaggagtcaagtttgttaatttgctggactcaatctataatcatatccataaaaatatgaagtcacaacaatgaagatcttcgtaaacattttccaattaataatgaactatgttgataaatagttgcttgttaataactttttaatatattaactagttaagttgtcatagttttcaaattgaaatttgaggtatttaagt

SEQ ID NO: 34244 - DNA, 119 bp, Glycine max
  unsure (1)..(119): unsure at all n locations
  Clone ID: PAT_MRT3847_130926C.1
aatcntgaaatccttgagatacccattcacttgatggttttgaagacgncaatnaaacnacaatttaaangaaactaangntanncngtttccaattcccttaatggggnttggnnnaa

SEQ ID NO: 34245 - DNA, 334 bp, Glycine max
  Clone ID: PAT_MRT3847_130927C.1
aaaaggaaccaacttccaaggtccaataccacccctcaagggggggcaataaaattcaacctggggtttccctgatttaaaaaaagccggaaaggggccacctacaaaatggccagtttgagcaccatcaaaaaacgccgagatggttaaagaaaccatggggcccgcacaaaaccttaaaccccaacaaaacatttaccgtaaaaaaccatgttttctgggcgccccgaaaaatgcccacggggggcccctaaaaggcttataaccgcttaccttggccaaaggtgcctgaaattttccaatggaagccttccccaaaaacaagcgcttgggc

SEQ ID NO: 34246 - DNA, 242 bp, Glycine max
  unsure (1)..(242): unsure at all n locations
  Clone ID: PAT_MRT3847_130928C.1
tgnnaacacagaatcgcgtttgtaactnaggaatgagtttctnncnggggataattgnttccttcaactccatcntcacanatganaacaacaacaattatcanaacaccaannnnnnnnnnnnnnnnnnnnnaacgnancgaatgncaagcttctcctcctccttcggtttcgaacgagcgcgttgcatacaagntcaaaggctanttcganttagcngcgnnanagatcgcgaagggcgt

SEQ ID NO: 34247 - DNA, 361 bp, Glycine max
  Clone ID: PAT_MRT3847_130929C.1
agctggggaggtttttaacagggtttcaactggcgttgccaatgaaaatcatcacgtgagtgatgaccaggacggtctacttaatcttattcatgtgcttcttgaagggaaggatgaaaaagccaatcgccacatcagaggggtactttcgaagatgctgagctgagaattcttctcgatactgatcttactgcaacagtcattgtacttggcatgtgactattgcctgcagttacttcggccccctttcctgccagctgggacttcggacatgccggatctgactcacattgcttcgcgaccagatactttgcgttggattttggatattttagttgacacacagatctgccgaggattt

SEQ ID NO: 34248 - DNA, 284 bp, Glycine max
  Clone ID: PAT_MRT3847_13092C.1
acgctccagaaaaaatggcggtgcctctactctcgaagaagatcgtgaagaagaggctgagggagtagcaagaggcctcaaagtgacaggaagattgctgtgaagacaaactggtgaagaccaaggagtagggagaaagagtaagaagagaaagttcaagggatgcactctgatgccgaacattggttatgctttagacaagaagacccgccactatctaccgagtggagtcaagaaatttgttgttcacaatgtgaacgatttggaactgctcatgaagcaca

SEQ ID NO: 34249 - DNA, 3524 bp, Glycine max
  Clone ID: PAT_MRT3847_130930C.1
caatggggtccgtctccgccgccttgccttgccatggcctcaaactccatggctggcttgatcaccggttcgaattctcacttctcgcgtgactccgatgagcatcagactcctcctacccgacaggcttcatcgaaaactacttgtcgagtttgtggcgatgagattggatacaaggaaaatggggagctgtttgtggcttgtcatgtgtgtggatttcctgtttgccgaccgtgttatgagtatgagaggagtgaagggaaccagagctgtcctcaatgcaacactcgctataagcgccacaaaggttgtcctagagtagctggagatgaagaggacaactttgatgcagatgattttgatgatgagtttccggttaagaatcatcgtgaagatctagatcggaaccatgatgttaatcatgtggaaaatggggactacaatccagagaagttgcatcccaatggtcaagcattctcttcagctgggagcgttgctggcaaggatttcgaaggggacaaagaattctacagcaatgcagaatggcaagaaagagtagagaaatggaaagtcaggcaagaaaagagaggtcttctaaacaaagaagacggaaaagaagatcaaggtgaagaagatgattaccttttaggctgaagctagaccaccattgatgcgcaagtttcgagagatattctaagcttgaatcaatccatatcgcatagttatcttgctgaggctggttcgcctttgtgtcttcttccgattccgtatcttgactccagcaaatgatgcatatcccttgtggttaatctatgtgatatgtgagaatatggatagcactgtcatggattcttgatcagttccccaagtggttccccatcacacgtgaaacttacttggaccgtttgtccttgaggtttgagcgcgaaggggagacaaacgaactagctccagttgatttctttgtgagtacagtggaccctttgaaggaacctcccattataacagccaacactgtcctttcaatcctctctgtggactatcctgttgacaaagtcagctgctatgtctcagatgatggtgcatctatgcttctgtttgattccttggcagaaactgctgaatttgcaagaagatgggttcccttttgcaagaagtataacattgagccaagggctcctgagttttacttttctcagaaaattgattacttgaaggataaggtgcagcctacatttgtgaaggaaagaagggccatgaagagagaatatgaagaatttaaggtgaaaattaattctttagtggcaaaggctcagaagaaacccgaggaggggtgggtgatgcaggatggaactccatggccagggaacaacactcgcgatcatccaggaatgattcaggtatatttaggaagtgccggtgcgctagacgtggaaggcaaggaacttcctaaacttgtgtatatttcacgtgaaaaacgtcccggctatccacaccacaagaaagcaggtgccatgaatgctttggttcgagtttctgctgttcttacaaatgcaccattcatgttgaatctggattgtgatcactacgtcaataatagcaaggcagtcagagaggccatgtgctttttaatggaccccaaccttgggaagaagctgtgctatgtccaatttccacaaagatttgatggtattgatcgccacgatagatatgctaaccgaaacacggtgttctttgatatcaatatgaaagggcttgatgggattcaaggtccagtatatgttggtactggaactgtgttcaacaggcaggcattgtatggctacgatccaccagtatctgagaaaaggccaaagatgacatgtgactgctggccatcatggtgttgctgttgctgtggtggttcaaggaagtccaagtcaaaaaagaaatcaggaaaaggtctcttcagtgtgttctccaagaacaagaacaagaagaaaatgatggggaaagactatgttagaaaagggtcagggtccatgtttgatcttgaagagattgaagaagggcttgaagggtatgaggatctagagaaatcatccctcatgtcccagaaaagttttgagaagcgattcgggcagtcaccagtgttcattgcttccaccttgatggaaaatggaggacttcctgaaggcacaaatagccaatcattggttaaggaggccatccatgttataagctgtggctatgaagagaagactgaatggggcaaagagattgggtggatttacggctcggtcacagaagatattttgactggattcaagatgcactgcagagggtggaaatcagtatattgcatgccaaagcgaccagcattcaagggatctgccccaataaatctatcagatagattgcaccaagttctgaggtgggctcttggctctgttgaaatttttcttagtcgtcattgcccgttgtggtatggctatggaggaaaacttaagtacctacagaggatggcttacaccaacaccattgtttatccatggacttccatccctctgcttgcatactgcacaattccagctgtgtgtctcctgactggaaagttcatcatccccacactaaacaaccttgctagcatttggtttatggctctatttatctccatcattttaactagcgtgctggagctccgatggagtggtgttaccatcgaagccctttggcgtaacgagcaattttgggtcattggaggtgtttctgctcaccttttcgccgtgttccaaggcctcctcaaagttcttggtggagtagacaccaacttcactgtgacagcaaaagcagcagaggacactgaattcggagagctctatctcttcaagtggaccactcttctcatccctccaactactctcataatcttgaacatcgttggagtcgtggccggagtctctgatgccatcaacaatggatatggttcatggggacctttgtttgggaagctgttctttgccttctgggtcattgttcacttgtaccctttcctcaaaggtctcatgggaaagcaaaacaggactcctaccattgtagtgttgtggtcaatccttctagcatctattttctcattgatttgggtcaggattgatcccttcttgcccaagcaaactggtccagtgctcaaacaatgtggggtggaatgctaataagactctgtggagaggccatgttgatgtcccaatgataagagttaattgcacttgtgtgcatgcttttattttcttactgctattgagtggtttgccttaattagaagagttatctgtgtacatagtcttaaaagaggaaagttgggtctgattggaatgtattcatttgatgatacaacaaaaccatatattgtagtatagccattgtcattgtttgggaaaacatgttctgtgttttggtgctactagatgatttttcatctattgagaataagaatatatatttttgccaacttcaaaaaaaaaaaaacgaaaaaaggggggaagggt

SEQ ID NO: 34250 - DNA, 350 bp, Glycine max
  Clone ID: PAT_MRT3847_130931C.1
tttttaaacatgttacaacatttaattaaatatatttaaattttgaattgttaaaattatgacgcctggccactgtagaattaaaaagaaaagtgaccacatgcagtgacacttcttttgaaaacttattgagttaatatttctttccattttaaacaaataaaaatattaataaaagacattaaagtaccttgcggccttcccataaacaattgatgctactactaggcatattcaattcctcaagatcaaaggccgcaaaacatgatggcaaagaagtaaaaggattatcatgccacaaaagatatcgcagctgggtggggagaaaatcgaggctttctggaaaaatt

SEQ ID NO: 34251 - DNA, 729 bp, Glycine max
  Clone ID: PAT_MRT3847_130932C.1
gttcattttctcatggttttacttattctggacaccctgcagcctgtgcagttgcaattgaagcactcaagatctataaggaaagaaatattgttgaccaagtgaacaagatcgccccaaggtttcaagatggcataaaagctttttctgacagtcccatcattggagagatacggggaactggcttgattttgggcactgagttcacagacaacaagtcacctaatgatccatttcctcctgaatggggaataggtgcctattttggagcccaaacgacaaagcatgggatgttagttcgtgttgcgggagataacatcatgatgtctccaccatatattatatctcctggagaagttgaagagttaatcagcatttatgggaaagctttgaaagaaacggaaaagaaggtacaggagctcaagtctcagcgcaagtagcttaggcctcatgatggaataataaactctgctgcgcccacttccgggggaaaaggaaatattgtagtaacttgataagactttgttccaaccttttcgttattgtaaatgtcaataaattggtttcctagttgcttcctaattatatgttgtagttatacatatgcttagaataatgctcgttacacatctccacattgcatgtagcgtagcctctcattaatgacgtggcagcatcaatagtgcaagtgtagaaattttagtaagccaaactgtaataaggtgatgg

SEQ ID NO: 34252 - DNA, 163 bp, Glycine max
  unsure (1)..(163): unsure at all n locations
  Clone ID: PAT_MRT3847_130933C.1
tcctacaactattactactattaagaaccctacttctaagattatctatgatgagcacaaccatgaaagatttcccccagataacccaaacaataaatcatttgcctactggnggcttacaagtaatagattgactgatgcctcttttatcgcgctccttgtg

SEQ ID NO: 34253 - DNA, 137 bp, Glycine max
  Clone ID: PAT_MRT3847_130934C.1
gatctatactgtcgcgtgggaactgtttgatttgtctgaccggtaactgcccgcgcacaacttgtgccgattgggagagggataagagctggaaaaaacatggtcatgtctgagaccagagcgaaaatgttatagtg

SEQ ID NO: 34254 - DNA, 329 bp, Glycine max
  Clone ID: PAT_MRT3847_130935C.1
tttggtggttccgtcttttttttttatttcctcttcttttttttttaatagagctgaattgtaagggggagactctatttaataaaactggttttcttttgaaaaacgggaacaatattaaattccaagcttgtttttttagaaaagagactaaaacggggggggtggagggtgcgatatctaaaaacatatggttaacgtggcacccgtggtcactactaaatggttaagggctcccacggttttataagaaaagagcacccccatttggtccgggggcatagcccctcccaaaagttcgcattggatttattgacacggactggggt

SEQ ID NO: 34255 - DNA, 1495 bp, Glycine max
  Clone ID: PAT_MRT3847_130936C.1
ttggagagttgggttaccttttgttatttgcgtcattgatttctggttcgattgtatgtttgtggccctttactcatacgtttctcatttgatgtgtatattgaactacttcttttcaatatgtctcagtattgttaggtatgcgtcttgacggcactcttttatattttattttatagcatcaatggcatctttgttgtcatgctcatcgagcatacaaactaggtctagtccaattgatggtgacgttttgtggatgcaactcaagcatgttttagaacatatctggaatgtgcaacaagacagaaaattacacatcagacgagcagtcctaacatgtatcaaggtcaagaacaaatatcagaggaaattgttcctctacttcggcaatttggtttttattggatcatcaagatgggctacctaaagataaatgcgcccttaattactgtgttcattgaaagatggaggcccgaaacccacacgtttcacatgagatgcggagaggctaccattactctccaagatgtgtcaattttattaggtctgcgtactgacggggcaccatcaattggttcgacaaatcttgattgggccgatttgtgtgagggccccccaggagtcagaccactggaaggcgaaattgaggggagtgtggttaaattaagttggctggctttttctttttctcacataaatattgatgagggttttgttgttcaattacaaaggtttacccgtgcatggatcattcgattcataagaggtgtcctctttgttaacaaaagcagtagcagagtttccttaaggtacctataatttttacgtgactttggaccgtgcaggacgtatgcatggggacatttcgtgcttgttttgtatataaagagatgtgcatcgccaccgattacaaaactaaatcaatcgaaggtatgtgcatcttaatccaaatgtggatatgagaacgatgcacgactttggctccaaagaggactcctctcgtaatagaaaataaatcactcggacacaggtggttgcgacgtgaaaatcaacatattgacaatgatgatctgatagtttttcgtcacaaattggatatcatgaaacgatataaggtaagaagatcataatgtatttgttaaataataaataatatgtcatgtctcagtgaaaattagcaactgtgttgttgtatacagtttctgtggaagccttacacagcaactgttatgtcactgttgccttcaatttgtttggttggaagtgtagcgtggtggcggtggtaccactcatttgttttcatgttgagtgacaccaatccgatagagtgttgcgacaatttggaatgcaacaatttattcctgagggtcctccgcaaccactgaatatccatggcataatgctaaaaggcaaaccagatgaaaattggggacaactgttggccccactgatcaatcaatggaacaatcgagctgagttcagggtcgacgtttat

SEQ ID NO: 34256 - DNA, 499 bp, Glycine max
  Clone ID: PAT_MRT3847_130937C.1
cccggtaatttctggaccggttcctgtaggtgttccattttttcccaaaaaagaggccggggggagcccgcccgaaaaagggggacgggtgccccctgggggaacatgttttcccataagaaggccaaaaaaaatacgggccgaaagcagaaaaaggaaaccccggggggaaaaaggagggagctaacaaacaaaaaaaaaaatgcgcccacgggccgctttacaaacggaagggcggcccaaccaggggcctaaaacaaatggccaagggggggggagaggcggttttccaatggggaaccacgggggccccccttttaaaaaaaagacggccaacagcgggggggggggccccgcctggcccccccaaagggggatttttctttccccgcggggggggcccaacaggggaaaaccctgcccgcgggggcgcaaaagagggaaaaaacaggggcccccttgggtttccccccaagccaaaaccccgatatggggggca

SEQ ID NO: 34257 - DNA, 909 bp, Glycine max
  Clone ID: PAT_MRT3847_130938C.1
caataacatgactctttatttataatgcaggagctattatagatgcacgagtcagaagtgcggtgtaaagaaaagggtggagaggtcattccaggacccaacaattgtgatcacaacatacgaagggcaacacaaccatcactgtccagcaactctgaggggcagtgctgcaagcatgttgtcatcaccttccttttttggttcctcttatatggcgtcaagcttaccccaagattttcttgctcagttggttccaagttatagccaaattaatgatcaccaaagtccaatgtttcaccaaaacctttcccataatctccatccacagcctcaacagcagcaccagttccaactctctcatgaccatggtttgttgcaagacctactaccatcattccctggcaaacacgagccatgaactcactaaaaacctagtgcatgttttgatttatttattttaggaaaaataatggttttatatttcatcactactagaaaaattaaaattagtaacggaataatctatgtaggttttttaaaaaatccgttactaaaatttggtgatctgatctcaaattaattagtgaaggaaaattaattttctatcactaattttgatcaccaatttattgatttttagaagtatttctaggagtttttaaaagaaaaaacaattgctttttcaagataaaccagaatcaaacatgcacttaacccatttctattagcgtatggtggagcttgcagtgtattgcacactgtctatatataagtatgtgtagtaattaagtagtagtagattccctcttggttaattacctcctctctttaagtcacatgtatgtacctagatttgtatggaaatgaaaaacattgattattcttaaatgagtatttagaattacttca

SEQ ID NO: 34258 - DNA, 330 bp, Glycine max
  Clone ID: PAT_MRT3847_130939C.1
ctgccgaggcgggtgccttatggctttactaattgttataagggtatagggccttgatagatcatctctaaaggttgacagctacggatgcgaccttaatgccaattcccgaggctctatacagtgctgcacactagactgcctatcaaaagaacctctggctcatcattcttgatatactaagggaaaatactagctgctttgcaagcatgcttaacctgacatgcactgaaccttctgggtgcatagaacgtatgcaacatcacacttaaattgcaacgccaaaggtcattaatcttaccaacaccgtgcaggacaatttttacaaaa

SEQ ID NO: 34259 - DNA, 946 bp, Glycine max
  unsure (1)..(946): unsure at all n locations
  Clone ID: PAT_MRT3847_13093C.1
attgaattgaagaagaaaggacccaccaatcaacgtttttgtcgttttccattgatgctccggcaccacagtaaatgctccctctgtctcaatactcatcgctacaacatgcacttctacacgctcgcccgcccaccctcttaagccaaacttttcctctcctcttttcttcattcatattcttcgctacgttatcgaaaacagaattaatcatgcggatccagtggtggctaaacacatgctcctcggccaactgcgccaccgccacccaccattcaacaatctcactccccaaacaaaaagaacatgcatgtgatgattccatcagctactcctccatttccgaagcacctgcatcttccacaacctccaacaacagcacttcctctctcgaaagcaacctctccatacaaaccctcccatccgttccatctctccaaagcctctctccacaaaacttcaccttctccgtctcccaccattgcgtcaccaccctcgagccacacctttctcgccccgtcacctccctcgctgtcaacaacaacctcctctacgccgcaaccgaccacgaaatcaacgtctacgaccgccacacctgcaccaccatccacgccttcaacacccagcccacctccacctgcaactccaccaaaaccatcgccttctccaacaacaacaccgtcatcaccacccaccaagactgcaagatccgcgtgtggcaaaaccacaagaatattcaccaccgcatgttagccactctccccaccgtcaacgaccgtctncaccgtttcctccttccgaagaactacgtcgcaattccgtcgtcacgagaaacggctctggattgagcatgcggacgccgttacgggactcgccgttagttacggtgcctttttactccgttcgggggacaggactctcaagattggcgggttttctgattttc

SEQ ID NO: 34260 - DNA, 1016 bp, Glycine max
  Clone ID: PAT_MRT3847_130940C.1
gataattgcattgaagaaagaggaagctttggtctctagctattaatattagtattaatattaggcacggtttgactacaaataaaaggaaccatcgattcgtgtcagcccgtgaggcagccaagtttcagatggagacgagccagctttttaatgttcttgccatttttcttctctcggacccttttgctgttgtgaatgcaaactctgaaggtgatgctctgttcgcgttcagaagagctgtgaaagacccaaataacgttctagagagctgggatccaactttggtggatccttgtacatggttccatattacctgtgatgatgataagcgagttacccgactagacctcggacacgcaaaactgtctggccatttggttccagagctagggaggctccagcgccttcagttcctagaactgtacaagaatgatttgatgggtccaataccaaaggaacttggagaactcaagaacctgcttagcttgggtctctaccagaataacctcactggctccatccccgccaccctctccaacctctccaacatcaaattcttgcgactcaacagcaacaagctcactggaagaataccgagggaactcactaagttgggaaacctcaagatcttagacctatcaaacaatgatctatgtggtactttcccgacatacggctccttttccaagttctcccaagaaagtttcaagaataacccaagacttaaaggaccagaattaatgggattcgtcagatatgatactggagaaagctgcaaatgaaagatcctggattagggagcgcttcataggaaatgtctgttttccttgcatccgtttctaaattactttcttataacaaattaccagtattatgcactgttttcgtttcaaagccagtacggatggtttgggatgtctatttgtaacatatagatagatagataataataataatagaagccaattaaaaatgggtacaaaccaaacgccaaaaaaaaaaaacaaatccca

SEQ ID NO: 34261 - DNA, 1368 bp, Glycine max
  Clone ID: PAT_MRT3847_130941C.1
gctcctttatatattgtttccgtgtttttctctctttgtgattttgtgaggcccaaactaactttataagcatttacgtgtttgaaattaatattttgtgagctagctagcttcttcatcatggcaaagtcttctactgaaaagaatggactgaagaagggtccatggactccagaggaagatcagaaactcatcgattacattcagaaacatggacatgggaagtggagaacccttcccaaaaatgcaggactaaaaagatgtggaaagagttgtcggcttcgctgggctaactacttgaggcccgatataaagagagggagattctcattcgaagaagaagaagccatcattcagttacacagtgttttgggaaacaagtggtctacaattgctgctaacttgccaggaagaacagataatgagatcaagaattattggaacactcacatcaagaaaaagctattgaagatggggattgatccagtgactcacacacctcgccttgatgttattcaacttgcctccattctcaacacatctttatacaattcagcaccccaattcaactacccttctctttctggaattggaagatcagtgataaacccaagccatatgctaggtttgctcactaccctgctatcatgtcaaaacagaaattacaaccctgatgtattgaataataaccaacttagtggtggtagcactctactgcaaaatcaacaccaatgttcccgaatgcaacttgattctacacaagccttccaaccaaaccaaccacaagtctcactacaagaaaaccacattgctaagtctaattctaatccattgaatatggaaccccaagttatgaaaactacattagagaatcaaatcactccaattgctaccccttttagccaacaaaacacactaccaaatttgtggcactataatactgaaggtcacatatctgatctaccaacaatggctcaatcatcatcagctatgcaatgtttctcttctcccaagttcaattctatatacaacaatctcttggaaaatcagaatttgtgtaacaacaacgaggggatgccaaatttcaatctaagttcactgttatcgtccacaccctcatcttctagcccaattagtactttgaattcgtcatcttccacaacatttgtcaacggaaccactgaagatgaaagggacacttacggcagcagcatgttgatgtataacatttcaaatggcttgaatgactctggacttttgtgattgtacaagttgtgctgctacgtgatttagtttttcttttttctttttttgagatcagtgacatttaatgtcattaaaacagaaataatattatataattattat

SEQ ID NO: 34262 - DNA, 338 bp, Glycine max
  Clone ID: PAT_MRT3847_130942C.1
atcaacaagcgttcgatgtcgagaaatcgcgtcttacccctgtttgtgcactaagtgtatgtggatataccatgacggacaatgtctactcagctgtgccaagagtgcaggtgctggtttctttagaatctactatgttgcgagtagtgatgcacttaaacgtgcatcccttgatctgctattatcctgcatgttaatgatagtaagtaattaagtattattacttttttgatcgtagctattacgatggatgctaactatgtctgtggcataacttctcttgaaacataactgtattcttctctaggtacttccttaccctctatctactctttttc

SEQ ID NO: 34263 - DNA, 546 bp, Glycine max
  Clone ID: PAT_MRT3847_130943C.1
tagatcctctagagcggccgcccttaggttttcttttttttgttcttccaattctttgagccaagcaaaaacatcttcaaaacacttaatttatgattcggacggatactgatcaacttgtaaatacaggtcttctatacacaaatgcttgctgaggttacaaacagaaatacagacttgacgatttgcgaatagacatttcaagcttaaacaatacaagttaggtgtcaaatgaaaatcgacacacaattttcgtcatcttcttcgctcaaactgctccctcaagaatggatgcctaagcgccttttgggctgttagacgggtagctggatcataccttaacaaaccttgcaaaaggtcaatgaactcgcccccagaatgatccacattttgcatcaccagattctgaagacgtggcagcttcataacagctttcatgctatcccgtgacgcacaacctttaggccagtttaaacgggcttttctgacatatttctcagaatgacgggctgcccttttgagcatgtgatatggcaaaggaccaaa

SEQ ID NO: 34264 - DNA, 512 bp, Glycine max
  Clone ID: PAT_MRT3847_130944C.1
ggtttatgcaaatctggaggaatcttggatgcatggaagcttgttgatgaaatgcattactgttgtcaaccacctccagatgtaaccacttacaatatcttgttagagtctctatgtagaattgagtgtgttgaaaaggcaattgcattttttaaacacctcatctttgaaagaagttttgcacctaatgtttggagttacaacatcttgattagtggttgttgcaagaatagaagattggatgaagccattaatctttttaatcatatgtgtttcaagaatttggttccagatattgtaacctacaatatcttgttagatgctttattcaatgggcagcaacttgacaaggcaattgcattattagtccaaattgttgatcaaggtattagtccaaatttgcgaacatacaatatacttattaatgggttgcacaaagggggaggccaaagactgcacagaagatttccctgtatctttccattagaggttaccatccagatgtcaaaaca

SEQ ID NO: 34265 - DNA, 780 bp, Glycine max
  unsure (1)..(780): unsure at all n locations
  Clone ID: PAT_MRT3847_130945C.1
acgtaagnctcggnaattcggcttcgagaaaaaacaaacaatcagaaaaaatctcgtgtacatgtataaattgagaactcccatatgggaagcaacacaacctagagtttgttgttgtcttgttgagaagtgcaatacaaggatggcaggcactctctttcgtttattcgtgattcttctagggctttctcatcttgtgtgcttgaaagcagtcccagttacaagaactgaaaaccttatgcaaggtcaagttcaccttactctggagaacaaccacaaggttatcacggagagaaacttgcactgggaggaaccaaccattaccgagaggatggaattggaactccacgactattccccatcagggcctaatggtcgtcacactccaagagcaccatagtgtgtgaaatggtgtggtgaatgatagtttctctaggtagctgttaggcatatcctttatgcaatacatcttatttgtgtaggcataatcagtgaattccagagggaattatgtatgatgagagaatggactaagtagagttgtatccccagtactgttcactatgattgtatgagaactcaagacactcatgtttgttaagaataaattatacatgccactaagtataaaagtcttttacattattatttaattataaatcacaagtttgatgacttttacaataattatgtaaaaagtcacgataaagatgattnttgattaatcgatagtgtaaaaacttttacaccggaagtgcatgtctattagactcatttgtt

SEQ ID NO: 34266 - DNA, 235 bp, Glycine max
  Clone ID: PAT_MRT3847_130946C.1
acggctgcgcaagacgagagacggggaatatcaagcgaagcatagaaacatatggatcagacagctagccaagatcatctagaggtgtctctctaccagtgaagtcacgggctgtaaatctaagtagcattgtagaactctcgagtgagacaccatcaaatcgaagcacggatcagaggtcgagttccacgacacggggacgaagcacaacttgatctcctagtagtctaaggat

SEQ ID NO: 34267 - DNA, 409 bp, Glycine max
  Clone ID: PAT_MRT3847_130947C.1
gcgcccacgcgtccttccacgcgtccgaagtactccctcaaaagtgctggcaggtccctatcactattcgctaccccccctttttaattattggcttaattggttctcttctgtctttgtgatcgaggtaatcacccaccatgaaccaatcatggatcgggttgatctgttttatggttgttggatttttgccgtatctgcttattctcaaatgatctaatacaaagatcaaccttcggttagcgcttaatcaaacttaaactttctcgtgcttgtccagaaatctactgcgtgaaaattgaatacagttctcccccatccatctagtgagtatacattaattggcattcggtgcagcgctctaactctgcgactggaacaatatggatatattcatcgtctatacgat

SEQ ID NO: 34268 - DNA, 738 bp, Glycine max
  Clone ID: PAT_MRT3847_130948C.1
cccgcgtccgattctctgttgcttccttctccgctaaacatcatcacactcctcctctcaagctcttagcattatccgaacctcatcttcctcttccttcaccaccatgcctcttcttctctcacgcaccccaccatcttcttttcctctaacccctcttagaaacgcacgcgcgcctctaatcacaccctcccagaagcgcttcactctcgccgcaacgcgaatcgttctcttcacttcccgccgccgcattctagcatcccctcctcctcctcccaagtgcgcctccatcaacggaatctctggcccgaacaacccagaagcttccggagaacaacaaggctatagtgctggcgggcttctcgaccggattcggaaatgggtcgggtttttaccgtcgattcttcccggcggacggtggtgggagttctccggcgacgtcgacgttcaggtggtggcgcagccggtgaccgtgtggcgcgcgctcgggaaaatgtgggaccttgtcgcgcgtgacagatgggtcatcttcgctgcattctctgctctcattggtgctgcaggttcggagatttcgataccgcatttcttgacagcatccatcttctcagcacagagtgcggaccttgctgtttttcaccggaatgtgcggttgttggttctgttgtgcgtggcttcgggaatatgcagggcaaaacccttgggatacgagggtgcttttttggcatcgcaaacatg

SEQ ID NO: 34269 - DNA, 340 bp, Glycine max
  Clone ID: PAT_MRT3847_130949C.1
acacccttccgaaggcaagtatgagttatcaaaacattcattttcccaaacacaatgatcacgggagcggtggtgttattcctagggggtttgggagaccatccaccttgctacgcggaattaattgttcaagcaaaaagaaggtttggaaacataaggggatgagatttggcctcctgacaattctatggtgcccgaattcattttgaaggtccattatccgtggatccagcttttatggcactttgcccacacctcttacctgattggggcctgttaaaagtgtttgtgggcggcctttaaatttccggggcattaaaaacatcgatttgacttggtt

SEQ ID NO: 34270 - DNA, 340 bp, Glycine max
  unsure (1)..(340): unsure at all n locations
  Clone ID: PAT_MRT3847_13094C.1
ctaacattggggtcgctcggtaccaaaggtataagaggctccaaacatggaccaaacgcgtggtggaaacattctccattttacttttttatcttctgtcctgttctgctatgcccctctcttcctcccaaaaactactaacttttnttcncncnccnctcctctgttcccnatagttcngttccttctctcttttccgcttcccactncccaatttgttatttatctccttcccntcatnntactctctttcccccttctctcttctcctctcttcttcctcctntcctcccttcctctggtccggcgggggtttttccctttttttatctttttcttt

SEQ ID NO: 34271 - DNA, 269 bp, Glycine max
  Clone ID: PAT_MRT3847_130950C.1
ttttgaaccggccgttttttttttttttttttttttttttttttggcgagatatcatcagatacatgagttttatttcataactcctgtggcatttttatacattacatgcgcacccaaaatgtgtgctgataaccaccacctgttcatgacgaaggcggcgttttttacatcaagttgcaagaaaacatcattgaaaaataaaatcaatggctgtgtttaacaacattcgttaattgatcacccgcgataacagacatgacactcatt

SEQ ID NO: 34272 - DNA, 642 bp, Glycine max
  Clone ID: PAT_MRT3847_130951C.1
gggagtccaagggtgcagttgtatcagccatgtcaatagagctttgatgttgtatcggaaccttatctatgaagcacttttggattggatgttcagaatctgcaaatggtgggtctgtgctcgatgctggagactttttctttgtcgttagtgttccactatattgggcctgcttgtggtgagatatcttcctcataacaagcacctttatttctttatataccccttcttttttactagccgtattatccctggagaggcccgtatcatttaacggcccaattggtatgtctagtgagtcacgtccagtacttggcagcaaagggggcccaatagccttccacatttgaattggtttgactgtgggttgtgatggttaacccacctcatgtgctggctttatcttctttatttggatgttgcgtgtcatcatggaatcagttttatttccattcacagcttcaaggacgtcgctctcgtatcctcggtttgacccaacgtccatttcctcttcagcactctctgtccctgacatcttccttctgctcccttctacttccttctttggaggatcttctgacatctttgcagatgggtgttaggggttttttagagtcgcgtgcatttgctgggggcctcggg

SEQ ID NO: 34273 - DNA, 365 bp, Glycine max
  Clone ID: PAT_MRT3847_130952C.1
ctgtgtttgggtttatacttttcattttctcacgcaaatgcttatggctgatcaatgcctaaggcctaattcagagcattggattcttttatttttacctttcaaaacacaaaagggcattttttttgacccagaaagggaaagaccattttgcggaagtgtaccatttccacctcctgaggaggatgagaaaaccctttggtccagagaactactcttgtaaggaagctgctggaccacccccaagggaccgggggccctggcctttattgttgaaaaacaattttcattccttattctggccaaaaagcccccccccggggaccccctatatgaacatttgcatgtggggccattgcgccccc

SEQ ID NO: 34274 - DNA, 385 bp, Glycine max
  Clone ID: PAT_MRT3847_130953C.1
ggctcgaggatccaagctgcacactatatttctatctgtgaaggaaccgacctcatggtgtaagaagcctgccccagcactgaagcactactgatgaacccatgatggcactatcacaggttacacatgaggttgagctcatgtgtcaacatatcgccaatatcgaaaggcttaatccagatatgtactagccagggtgaacatattataacggattggctactaagcctacctgaattggccgttgtaggaatgatcataaagctattagaaccattatggatttatactaattcagactatcaaatagaaggatgagaatatgggcttaagtcaaggaataggggattacatcactattgacacatacgaggacgccatccag

SEQ ID NO: 34275 - DNA, 414 bp, Glycine max
  unsure (1)..(414): unsure at all n locations
  Clone ID: PAT_MRT3847_130954C.1
tttgggaccgttgggagattccaagaatcatcatcatcatggcagtgtgaatagccgtgacagtagcagcagcagcatagttcaagaatcagcatcatcatcatcacaaccaccaccatcatcaaatgtcgagcattaatgcggactcagcagctgccatgcagctttttctcatgaaccctcaaaccaccagatcctcttctccccctccanctcctcctccttcttcttctactctccacatgctgcttcctaatactttccctcctggctcaagagggtctttcggtcaattcacgtggctccccgacaccactcaagaaggnggacgagtacagtcgtggaaaggcctgggcaaggtcacggtcaaaggctttctctgtccctgtcctcctccatagaagccgcaaaagc

SEQ ID NO: 34276 - DNA, 380 bp, Glycine max
  Clone ID: PAT_MRT3847_130955C.1
accctccatccgtgcaggcccgacaggcatatttgggacgatgggtgacgatcacgcggaactgcgccgggacgacgtcgagccgccgtgaggtctcctcaccgatcacatgcagaggcgtgcggcagcacggacagttggtatcctccggggcaatcgtgacgtcgatatgcggcagatgggccggaagcgcaccatggctggcgcggcgccgttcagcacgctggcgtgcgcctgccgtgtccttcctgtcctggaccgcttcatcgccggcaatggcctgctcgatgccctcgatcgccagttgcaactgctcagggtcgagcttctccgagcggcgaccgaactgcgcgcgttgcagctggcgcaagagatgaagg

SEQ ID NO: 34277 - DNA, 762 bp, Glycine max
  Clone ID: PAT_MRT3847_130956C.1
ttggtacctctgcattgtttcgcccccgaccaaatgaaaggcctatgtctgccctcaatgttcctttcatccgcagaaaccccaacgtcagaaccgtcgatggcatgcccccctatgtattggaaaaaccaccttatcttgcaatttcagaaaccaggggaaatggaggctcagatggctcaagttggcacagagtatgttctcaaaaacatccttacaattcgcaaacctggacctccaatctttcccaaggagaatttggaacaggattaaatccgaataggtatcaagatatctattttgattttttatgagtccattatctgcagacaacctcatccatccaaccttgatgcttttgtgtaataatacattcgtacctacccgttaaaacttcagaaaataaaatttcgatcttgccatgcaatcattaattagttatagcatatttccatcaataaattgttttgaaatatctgtattcagcttcaaatacgtgggtatgctttggatataaaaaaaaaaaaaaaaaaaaaaaaaaaaaaaaaaaaaaaaaaaaaaaaaaaaaaaaaaaaaaaaaaaaaaaaaaaaaaaaaaaaaaaaaaaaaaaaaaaaaaaaaaaaaaaaaaaaaaaaaaataaaaaaaaggggggggcccgtttaaaagaaccaaattttaattccccggtttgggaagataatattttttttttggggcccctaaattaaattccgggggcgggtttttaaaacccgtgggtg

SEQ ID NO: 34278 - DNA, 1086 bp, Glycine max
  Clone ID: PAT_MRT3847_130957C.1
ggctgcgagagacgacagaagggggtgacagtgaagagatggaaggcatagtacacaggacagttgaagtgaatggcataaaaatgcatgttgctgagaaaggtgaaggtcccgtggtcttgttcctccacggcttcccggagctctggtactcctggcgccaccagattctggctctcagcaacctcggctaccgcgccgtggctccagatctccgcggctacggagacaccgaggcaccagcttcaatcagcagctacaccatcctgcacttagtttctgatctcgttgcgcttattgattctcttggtgcagagcaagtgttccttgtggcccatgactggggagccatcataggttggtacctctgcatgtttcgccctgacaaagtgaaggcctatgtctgcctcagtgttcctttcatccgcagaaaccccaacgtcagaaccgtcgatggcatgcgcgctatgtatggagaagactactatatctgcagatttcagaaaccaggggaaatggaggctcagatggctcaagttggcacagaaaattgggagctgacggcaccatggactggagtgcaaatccaagtggcggtaaaatacataacaggtgagttggacatggtatacacctcgctaggcatgaaggagtatatccacggcggagggttcaagcaagatgtgccaaatttagaacaagtgattgtgcagaaaggagtggctcccttcaataatcaagaagcagcagaggaaatcgataattacatatacgattttatcaacaagttctgatcttgtccaaaaacgaattcaaccagatataaagtcgcagctgaagtgaaagggtgttataattgcgcttttgttttgatatttaaggtatcgagatcttttttatgggcaggattcatcaactgcaaaaaacctccccagccacaaccttcctatgcttgtttgtattaattaactgataataatcctgtatggtttggtacttgctaaataaacttagtcttgtcatgcaaatggtatatcttaaaaaatgttttgaagtaaaaaaaaaaaaaaaaaaaaaaaacccaaa

SEQ ID NO: 34279 - DNA, 682 bp, Glycine max
  unsure (1)..(682): unsure at all n locations
  Clone ID: PAT_MRT3847_130958C.1
accaaattcattccaccaaattcattccaaacaggagagaaaaacaaagctcctcctgttgtatttcttggtggttggaggaggttcagaggaaaaagaagaagaggaattaggagaaatcaattaactcttcaatttcttcaattttggagtccaattgatccatccatggtaggggaatcaagaaagtgggtgatacttttggcatcaatatgggtgcaggcattcacagggacaaactttgacttctcatcatactcatctgagctcaaatctgtgcttaacataactcagcttcagctcaattacctctctgtggcctcagacatgggaaaggcctttgggtggtgttctggggtctcactcatgtacctccccttgtgggtggttatgttcatggctgcttttatgggactttttggctttggcttccaatggcttgtcattcatagactcatcactttgccttatgttgtggnctttcttctatgcctgattgctggctgcagcatctgctggttcaacaccatctgctatgtcttatgcatcaaacattttcctgcaaaccgttcccttgcattatccttgagcattagtttcaacggtgggagtgcagctttgtacactctcattgccaatgcaataaactcaaaagatgctaccctctatctattactcaatg

SEQ ID NO: 34280 - DNA, 1372 bp, Glycine max
  Clone ID: PAT_MRT3847_130959C.1
ccacgcgtccggccttgtgtcaaggcaactaaagcttctctcgctttgcaagagagggaggagtgagtgagatggaaggagtgatacacagaacagtggaagtgaatggcataaaaatgcacatagcagagaaaggagagggtccagtggtgttgttcctccacggcttccctgagctctggtactcatggcgccaccagattctctctctcagctccctcggctaccgcgccgtcgctcccgatctccgtggctacggtgacaccgaggcaccaccttcaatagacagctacacttgctttcacatagtgggtgatctcgttgcgcttatagactctctgggtgtccaacaagtgttccttgtggctcatgactggggagccctcatgggttggtatctgtgcatgtttcgccctgagaaggtgaaggcctacgtctgcctcagtgtccctttcatcgccagaaaccccaacgtcagaaccgtagatggcatgcgtgctatgtatggagaagactactatatctgcagatttcagaaaccaggggaaatggaggctcagatggctcaagttggcactgagtatgttctcaaaaacatccttacaattcgcaaacctggtccttcaatctttcccaaaggagagtttggaacaggattaaatccgaatatgtctgatgataccttaccctcttggctcacagacgatgatcttgcctattatgtttccaaatatgagaaatcgggcttcactggacccttgaactattaccgaaatatgaacttaaattgggagctgacggcaccatggactggagtgcaaatccaagtggcggtaaaatacataacaggtgagttggacatggtatacacctcgctaggcatgaaggagtatgtccacagtggaggtttcaaacaagatgtgcccaatttacaagtggttgtgcagaaaggagtagctcacttcaataatctagaagctgccgaggaaatcaacaatcacatatacgatttcatcaacaagttttgatgatctgagattcaggaacacggtcacaggggtcgtgtaaattagttgaagttgcgctttaaggtatcaagatatctattttgatttttgatgagtccattatctgcagacaacctcatccatccaaccttgatgcttttgtgtaataatacattcgtacctacccgttaaaacttcagaaaataaaatttcgatcttgccatgcaatcattaattagttatagcatatttccatcaataaattgttttgaaatatctgtattcagcttcaaatacgtgggtatgcttttggatataattaaccacattggttaaattaatttttaaaaaaacaattttttttt

SEQ ID NO: 34281 - DNA, 252 bp, Glycine max
  Clone ID: PAT_MRT3847_13095C.1
agcgcggaactcggcgcgcgcataaagtgcgagagcggggaagcgtctagctagcgagtcgtccctactatctaatactacgggccatcgctgtagccatggggtctatcagagttgcgagggttatgacccaaactctgaactcgatgttcaagtttcttcagagtaaagagcgcatgcagattcggatttctaagcacacggatttgaggagtgacggcgtacgcatcgatgctgacgaatacatgaacg

SEQ ID NO: 34282 - DNA, 493 bp, Glycine max
  Clone ID: PAT_MRT3847_130960C.1
agcaaggagtaaccaccaaattcattccaaacaggagagaaaaagcaaagctcctcctgttatttcttggtggttggaggaggttcagaggaagaagaagatgagttaggagaaattaatattaactcttcaattttgtagtccaattgatccatccatggtgggggaatcaagaaagtgggtgatacttttggcatcaatatgggtgcaggcattcacagggacaaactttgacttctcatcatactcatctgagctcaaatctgtgcttgacataactcagcttcagctcaattacctctctgtggcctcagacatgggaaaggcctttgggtggtgctctggggtctcactcatgtacttccccttgtgggtggtatgtttatggctgcttttatgggactttttggctatggcttccaatggcttgtcattcatagactcatcactttgccttatgttgtggtcttttttctgtgcctgattgccggct

SEQ ID NO: 34283 - DNA, 247 bp, Glycine max
  Clone ID: PAT_MRT3847_130961C.1
tccgatcaacaccagccttatctcctatcatttttttacaaaatcaccatcattataactcatgcaacttttacatataagggcggttaccccttacaaggttcacaaccaatttgagcagcaccaccaaaatggttattccaaatggtggtgtctgtcttagagcttaactcaactcatcacttgtcatatgcctcaacactgggctctcccttttcttgatgaggttcgcgttctttaactttca

SEQ ID NO: 34284 - DNA, 783 bp, Glycine max
  Clone ID: PAT_MRT3847_130962C.1
cgggtcagccaccgcgtccgacaagagacaggaaagatagagtgagctgttagtcatgggttcttctgggttttcatcatcttccactgcagaggaagttactcaaggaatcgatgggagtggcctcactgcaattgtcacaggaacaacccatggtattggcactgagacggcaagagttcttgttttgcgtggtgtacatgtgattatggcagccagagatgtgattgcagcaaaaactatcaaagaggtaatacttgaagagattcccacagccaaagttgatgccatggagttagatcttagctcaatggcatccgttaggaagtttgcatcggagttcatttcatttggtcttccattgaacatcttgataaacaatgcaggaataagcgcattccctttcacgctgtccaaagacaacatcgaactactatttgctacaaatcacttaggtcatttttttttaacaaatcttttgttggatactatgaagaaaactgcaagtgaaagcaagaaagaaggaagaattattaatgtttcctctgatggtcaccaatatacatatcctgaaggaatcctttttgataaaattaatgacgaatcaagttaccagaagtggcgtgcatatgggcaatcaaagcttgctaacattttacatgccaacgaacttgcaagacttcttaaagaagatgggatagatattactgcaaattctcttcatccaggagctattatcaccaatatttataaaccagagcttagtggcccagtgccaactga

SEQ ID NO: 34285 - DNA, 792 bp, Glycine max
  Clone ID: PAT_MRT3847_130963C.1
gcaaatacaaatagaattgttggaactatgggatatatggcacctgagtatgcaatgcatggacaattttcaatgaaatcagatgtctttagttttggtgtactggttcttgagatcataagcggccataaaaacagtggcattcgtcatggggagaatgtagaggatcgactgcgagaagacgggagacagtggagggaggggacagctgtgaaaattgtagatccgtcattaaacaacaattcacgaaatgaaatgttgagatgtatccatatcggtttgctttgtgttcaagaaaatttagctgacagaccaaccatgacgaccattatgctcatgcttaatagctactctctcagtcttccaattccttctaaacctgcattttatgtgagcagtagaactggaagcatttcagccacgcagtcatgggggtatagttcaggggaatcaagatcaagagaattaacaattaaatcagctcaagaagcagaaaatgagtttactgatccataccctcgctagattttgctcatggaattgatattcattcaccatcgatgtcctggagttcatgtaatttgttcatgtaatgtctttttgtttgaataatccaaactatctctttgtttaatcttgagactgaaaaatgtcatatgacctccagctggtcttgaagtgtatactatcatatcactaacgtatttctttagcaatgatgttaaaaatctagtttcccggctggcaaaaaaaaaaaaaaaaaaaaaaaagcggccgcgcccgcgcaaccga

SEQ ID NO: 34286 - DNA, 445 bp, Glycine max
  Clone ID: PAT_MRT3847_130964C.1
ttgccgggtgcacgcgctcactagccgggggtcgccctcgagttcttgcattttcagaggggggggagggaacaatataatattgagcgaaacatgggactgtttgaaccgcaactcatgagaggaggtgcatatccggagatgaggctatgccaatatgcccgtgtcagaggctacgacgaggacaaagggattgggttctacagagccggaactggtgggttaggcacttgatcgatgcctaggatataagaggcccttgacataggggctcgccactcgtgtaggtgtttgagatcaactggctgtccccttgatacgagactagattcggaagattctcattccttacacgagagcctgctgtacactatgtgtggtactacctgatcggccgatgcactcgtgttcttcacctgattgatcattctctcacacaagagct

SEQ ID NO: 34287 - DNA, 220 bp, Glycine max
  Clone ID: PAT_MRT3847_130965C.1
atcgaacacgcgtccggtacgcttgaactcacgcctagcagctagaccatctcgcagagctttaccaccaccaaacattaccatgagcgagggcaatagttatggacccagtctgtcaccttctcccacgcgcaaactctccccaagagtgccagttgggtattcggctactaccaccacacctactacttattgtataccccggaggtgtcagacagac

SEQ ID NO: 34288 - DNA, 307 bp, Glycine max
  Clone ID: PAT_MRT3847_130966C.1
aacatcatctggatccacaagaatcaggtaacttgaactagtagcagctcatcgggctttgggagaatgctaaacacaaatgctgctttcactagttaccaactgttggactatcatagatatgctgactggtttactacactaacatttaccacatgttacacatgatagacttacttatcatcttgaatatcagctgactagatacaaactatccgaaacttgtaatccgttctgacaactacgcttgtacatgaatgctgattaggaaccagaagaacatgaaacgcctcagaatactacctga

SEQ ID NO: 34289 - DNA, 254 bp, Glycine max
  Clone ID: PAT_MRT3847_130967C.1
aacatcacgtggttcacaacaatatcgtgcattaactgtaccagaacttacacaacaaattttcgatgctaagaacatgatgtgtgcatctgatcctcgtcatgggcgttatcttacagctgcagctatgttccgtggtcgtatgtccacaaaggaagtggatgaacaaatgctcaacgtacaaaacaaaaactcctcctacttcgtagaatggattccaaacaacatcagactctccgtacgtgatatcccac

SEQ ID NO: 34290 - DNA, 339 bp, Glycine max
  Clone ID: PAT_MRT3847_130968C.1
ccacgcgtccgctccgcctagacgctctggaaggctcttttgttccctctttcgtccgagaatttaagcggtaacggatccgggtacgggtctggatacaccaacctgtttgataaatggtgcatgcgggtgatttttccatgaatgcattatgtttttctggccgtgcggatcttgctctcggaaacgggttgacccaacggaggcgacgtgtaccagattggagccaatattttcaatgctgccacttactaccgccccttcagaactaaggttagtaggaagaccatagcgtggtggcggcggcttgaccgggctcggcgcctccgcctgtcttat

SEQ ID NO: 34291 - DNA, 204 bp, Glycine max
  unsure (1)..(204): unsure at all n locations
  Clone ID: PAT_MRT3847_130969C.1
cttttccatttcttcagagggaaactcagatgtccaaactacattttaacaaacgcattaagaggnttatttgggtacatggcccgcagtggcttttgccccagaaaggggaaaggaacacgcgggtagatgatttctagcaggcaggaagtcctgtgcggtgtcaccatgagcactccagtgtactagtgccattngaatant

SEQ ID NO: 34292 - DNA, 214 bp, Glycine max
  Clone ID: PAT_MRT3847_13096C.1
gaacacataagtttgatgcactgaactttgactataattttcataattcagattgtccttctcttctgcattgcgacattgggggtttaattttctgacaaagcgtacgataggttcacgcccctcttttatagtgctgctttgcctcgtaatcgagacgttcaatacccaagttgaaagcttgctctgtgaacacacatgaaccttggtcttt

SEQ ID NO: 34293 - DNA, 362 bp, Glycine max
  unsure (1)..(362): unsure at all n locations
  Clone ID: PAT_MRT3847_130970C.1
tnttttttttttaatctccgaaaggaccgaaaccaggccacatttatttcattcattcatttagttcagatccaccttcaagcagccacctaaatgagcaagatacaaaatacttgtggggtggggtggggtgggggatcccaaaaaatgcaaaccttgggtagtaggtccctaaaaaaagcgttaccattactaactaccaacaccgaggggaggggtgtacaaaaatggccccacccaaatccggggtccgaccgaatcttaaacacggttgggatataaaagaaatatcctaaccccgacccgtttaaaaatcccccaggaaccagtcctgaattccaccccatccaagtttttttttc

SEQ ID NO: 34294 - DNA, 232 bp, Glycine max
  Clone ID: PAT_MRT3847_130971C.1
tctcgagcttattgtgattgatgaagttaggagtggagagtagcgcaaaatatgtaatagtgagtaggtcattagcggaaaggaggatgctgcaataaaatatggaggtggtgactagaccattggaaaggagatgggagaactttttttgtatcggatcagaaaggttgatgacaactgcactggtttcccaggtggtcgggtttgtaatgctaggggagggggtattggg

SEQ ID NO: 34295 - DNA, 329 bp, Glycine max
  Clone ID: PAT_MRT3847_130972C.1
ctcgagccgatagcctatggcgtggccagtgctgcaataagagaacgatctgagctgatgcctgcacaaccggaaggagcttactctgacgatagtgatggacaccctcctccgagcgctagtgagggaaagaactaaacctctatagatgagtctccttgacacaccttgtgtgcctcagcacatcaatgaccacgaacccatgccttgaacctctcagagctggataatttactcttgcccaacgcgacatggattgctaaaatttctgatcggactacatgatgtgcagacatgaatgattgagagacagcccaaacgtctttccc

SEQ ID NO: 34296 - DNA, 334 bp, Glycine max
  Clone ID: PAT_MRT3847_130973C.1
aacgtgctcacgatgatacagctgttcagacttttgcttatggccacttgaaatatcatgtcgctctatgttcctactctgccaggaagaagatgccgataattgacctttccaccgagccgaaagcatcttacgatcttcccaccaattatgctgctcacgatgccatcaatctgggctccagcccctaagatgctgattatgattcatctactgaacattctgtagaacaagccataactgttgcacttacgcagggtctaatttcttccatagatctactttctattactaccactgcttctcacaatgatgacgatgcgcatactatgct

SEQ ID NO: 34297 - DNA, 417 bp, Glycine max
  Clone ID: PAT_MRT3847_130974C.1
tacggctgcgagaagacgacagaaggatccggctgcgagaacaccacagaggggcgattcttagaatactattcttcgggattcacacggctcgttcctagcacaccgatcttaaatgcacaagaggataggttactatgcatcacttgccccagagctgacgttgtgttacccctcctgtggcggaaaacccccctgtgtcaactgtgccgctctgttcatgagattaagattaccatagaattgccggtctttgaacccaacctcttgcctttcagatgctggatcgtgaaattggttaggacttcttgactgatctgtctatccagagccgcgccgagcttgcattataagaggctccttatgcgtaccttgatgatctctgtgatgacactaacctgggtgccattcacgccc

SEQ ID NO: 34298 - DNA, 325 bp, Glycine max
  Clone ID: PAT_MRT3847_130975C.1
aatcgtaaattttttttgttatattgataatttatatatttatagtattgggaaatttataagttgtaattgaattaataatttggtaattttttttttatcctttaaagattaatttttttggtagtttaaacaaatagttggaatttatgttataaatttggtggattaattataggtgtatggtacatttgttatagttgttgacaatgacatagaatttgaattttacgaatgttgttgttgttgttgtgaaattttaattttattgaaatatttacaaacaggtttttttaaatttatggttaaaaaattgtagtttaag

SEQ ID NO: 34299 - DNA, 317 bp, Glycine max
  Clone ID: PAT_MRT3847_130976C.1
ttgtaaaaaaacaacgaagggggaaccccaaccttcccaatgaaaaaaaaaaaagagaaagggaaaagccggcgcttttaaagatccaaacttaacttcccctgcattccaacgcataagtttttttttggtgtacccaaattcaaattaactgcccgcactttaaaaacgcgttacctggaaaaccccggcggtacccaaactaattggcttggaagacattcccctttcggccagttgcgtaattaccaaaaaggcccgaacaattcccctttccaaccatttgccaaccttaattgccaaagggaaccccccct

SEQ ID NO: 34300 - DNA, 348 bp, Glycine max
  Clone ID: PAT_MRT3847_130977C.1
ttccacgcgtccgggcttcacttatatctactaaagtttatacgaggagggactgatgatccttgtgatcatacactacattgtaggtaacgccaacaacaacaactttgatacataggaataccatattagacatatgttgtagtcccagttctcgcacatctttaaagtggcatgaactctctatcatctgaattaattttcctctgaccaaacattgttttagcttcactgatactgtgaatcgcccttacaactttgattatcgttactactatccatgtcaacacaactttggatttaactataaatatgttgatttcacgaagactatctaagatatatttt

SEQ ID NO: 34301 - DNA, 644 bp, Glycine max
  unsure (1)..(644): unsure at all n locations
  Clone ID: PAT_MRT3847_130978C.1
cttgttacaagcaatccctgacagaggaataaaaatcactcattaaacgcaaaaatcaaaagcgtgggtaaaaccaaggttttattttctccctcctcctctgcaaaaaaagaaaaaagaaaagaaaatccaataaccccgtcttcttcttcttcttctttcccttttattcctcattctctgtcggtacttcagagtctcaacttcgatcttctcctcaaaatggctcatactcttttgttttagggtttccacggtttctgggtcaccttcaagttcgtccctttcggtgttttccgcccccattctgcagtgcttgctaggtcttgaacccgctagcgctggagttagtttcaagtgggggcgtggaaaagggaaaaaaggggtcgtcgcattgtgtttgtcaaaagagagggtttttatcttcttcttattattactttgtgtgtttttatgtttttgtggggcttctctgtgaacagtggttgctttttgggaagcttattttggaagcaatttaccccccccccccnncnnnnccttttgaacgnganntggtttaatgctctcatgggctctcacattggtcccttttggtcttatcaataggggggggtggggagtgttttttgttgttaggttag

SEQ ID NO: 34302 - DNA, 265 bp, Glycine max
  Clone ID: PAT_MRT3847_130979C.1
ggattggaacattattttcttgcatacttagaatgtgtcattaaatggtccattggtgcacacccctttagagcgttgcatggagcttgagcgagagggatgcttcaaaaggacatggcacacaggggcgggataagacgaagatgaaagctgatggacatacgaggtggagatagaaggaaggtatcaatcaggtaaaaggcgaactattggtgttaaagggggaacgtttttaacgcttgatccaaatcttaaaacattatta

SEQ ID NO: 34303 - DNA, 342 bp, Glycine max
  Clone ID: PAT_MRT3847_13097C.1
tgccacacaaccacacttggctaacaccaccaacttggcagaacatttggctgcatctctgcatggaaatgcaacaaagctagcgccaccaagtcaggtttcctttcaacaacacagctgcactagtactcctacactatctacccctttcatttttccacaaaaatagatgaaaatgtacatgaagggaaaattaattagagtggtatgcatgtatgaaaattagattacagatgttaattaattaaagaagagtgtaaagttcgttagtttactcttttcaaaaagatggtacatattttctttctgataatagaatatatcagctttagaatctgaaaa

SEQ ID NO: 34304 - DNA, 825 bp, Glycine max
  Clone ID: PAT_MRT3847_130980C.1
ggctcgagtcgaaattacaaataggaaaaaaatgaaagtaacagttgtgtgttgtgtattggttgtgcttggtgcactaccattctcttcggatgcacaactagacccctccttttatagggacacatgtcccaaagtgcattctattgtacgtgaagttgttagaaacgtttcaaaatcagaccctcgaatgcttgctagtctcataaggctccactttcatgactgctttgttcaaggctgtgatgcatcaattttgttgaacaacacagccacaatagaaagtgagcaacaagctttcccaaacaacaactcaataagaggtttggatgttgtgaaccagatcaagactgcggtggaaaatgcttgtcctggtgtagtttcttgtgctgatattcttgcccttgcagctgagatatcttctgttctgggtcatggtcctgattggaaagttccattgggtagaagagacagtttaacagcaaacagaacacttgcaaatcaaaaccttcctgctcctttcttcaacctcactcaacttaaagctgcctttgctgttcaaggtcttgacactactgatctagttgcactctcaggtaagaaaatcttcccaattaaattcatcctatatatgttgcaaaatttaaaaaataacaatgataaataggaaaattcttgaaattcacggtaaggtaagatattggattcaaagggatatattattaatgaaaccattgacattactctaaaaaagagagtccgtgatggattagtatatgatttttacatgattctgagatataaagtgagttgaatggttaagag

SEQ ID NO: 34305 - DNA, 386 bp, Glycine max
  Clone ID: PAT_MRT3847_130981C.1
cgatagatgtgatgatcctcaagagacataacattccctcccttgtctccaatgttgattagccttagccacagaacaatgttttgcccaggagacatgcctcttacatcctgaatcttttctgcctacgcctacatgacagcctccataatgctcctaccttacatggccaacgacctagttccacagccaatccgtggctacctttacaggacgttccggtacctaataaagcctcactccccaaccctaaccctgatgatagaagagtccaccggcatatcccgaaaccaagtctactacgctggacactcgtacctactcacccatgtctgtcctgaaaacgagtggctcacaatcagtaagagcgcaaaggagaagaaatt

SEQ ID NO: 34306 - DNA, 169 bp, Glycine max
  Clone ID: PAT_MRT3847_130982C.1
gtcggactcccaggaggatgaccggtggcaagaggttctgcggcgggcgggtgccgacggggacgcggtgttcttatcgtggtcttccgccgccatcgtcacctccctcctcgctggcgcctccatcgttcacaacatctacaatcctgacatgaccattccacctgtg

SEQ ID NO: 34307 - DNA, 539 bp, Glycine max
  Clone ID: PAT_MRT3847_130983C.1
gaaaaacaaaagggggcttttttttttaaaaaccctgaaaaaaaaaaaacccgggtacaaaaatttaattttcgagggggaggggggcaaacaaataaaaagaaaacggacccccaaaatttttttttaatttggggaaactagcgcggggaaagcctttttaaatttaaaaaaagggggtgtggtttttttattaccccaaaaaaaataagggggagagggtgcccaaaacattttaataggggcccttctggaaccaaaatatttgccttgaaagttgaacaacctataaaggggaaattgttttggggggaaagtttgctcaaaaaatccccaaactttcaagaggaaccacccctggctttaaaaaaaattggagcgttttaaaaagagggcgaaaaaatatggggggggagacaaaaacacgggtgggagaatgggaagttttcccccccccattaaaaagagaccccccccggatttgtgaaatttttcaaaaaaaaaaatttctccaagaagaaaaaaatttttggggaaaa

SEQ ID NO: 34308 - DNA, 351 bp, Glycine max
  Clone ID: PAT_MRT3847_130984C.1
ctcgaaggcgaccgcgctgtcggcgtcaaagtggttcctacaaagcacctggccaatggcgagactccatcgcgtattatcagagcacgcaagcaaatcatcgtgtctggcggaacactgagctccccactcattcttcagcgctctggtatcggtgacccagagaagctccgcaaggctggtgtcaagccgctcgtcgacttgcccggtgttggtctcaacttccaggaccactacctcaccttcgctacctaccgtgcaaagccacatgtcgagtctttcgacgacttcgcgcgcggtgaccctgcgactcaggaacgtgtcttccagcaatggaatattaacggcact

SEQ ID NO: 34309 - DNA, 1433 bp, Glycine max
  Clone ID: PAT_MRT3847_130985C.1
aattcgagctcgttacccggggatcctctagagtcgacctgcagcgtctgaaagttgaagtgacgctggtgccttgttctgccttgcattttaaacccagacgcttctcttgttcttcttctctgaacgagaagcgcaagtgaggagaacatggtcaacaccaacaacaccgtgacaatccattcgggcaagcttcttccttggccgagtttggttcaatcgttctctccaccactgatcctctcttttcaagtcccagctttctcacatggcttactccatatggcgctgccacaacctcccccttggtttcccctaaggaaattcctgctcccaaggactcaggtttgcctctgaatgcttatatgcttcataatccagcacacgtggagctcaatgcaattgatttggcctgggatactgttgtccgattctctccctttattgaaattcttggggaggggttctttgctgactttgctcatgtttctgatgatgagagccgccacttctcttggtgtgcacagaggcttgctgaactgggttttaaatatggtgatatgccagcccacaatttgctatggagggaatgtgagaaatatcagacaatgttgctgcacgtttggctgtgatcccactagtccaggacgctagaggacttgatgcagggccacgcctggtaaaaaaattagttggctttggagataataggacatctaagattgtggctagaattgctgatgaggaagttgcacatgttgcagttggtgtctactggtttgcttctgtctgtgaaaaactgattgtgctccagatccactttttaagacttactaaaggaatacaacctggaactaaaggtccctccaactccaactgcaacaccaacaacaccgtgacaatccattcgggcaagcttcttccttggccgagtttggttcaatcgttctctccaccactgatcctctcttttcaagtcccagctttctcacatggcttactccatatggcgctgccacaacctcccccttggttcgcttctcctttcttattgcaaattatatcatctaaaatccaattacctcaattcattaatattttacaagcctctgatttcactctatccttaaagctatactaaattgtaggcaactgtactaatgttattttgtcacattctgacatgagttgggaaaaatatgtatttttgtcgtcttcattgtggggaaaatatattatgcattctgatatgggtgaggaaacatatgtgattggttttttgttattgccataagtagtttttctgtttgtttggtatattgcgatcagcatttagaaatgataatgtatttacactgtattgggatcttgaattttcaagaatttccccgtatccatgttgtattaagtatctgggcttatacttttttttt

SEQ ID NO: 34310 - DNA, 694 bp, Glycine max
  Clone ID: PAT_MRT3847_130986C.1
aaaacacgtatgcttgaagaattcaagctttgccaaattctgatttctcacaaatgaaatcgagtgtcagaatctcaggtgagtacagataatatttacaatgtattcctatatttttgtcccaaaacagttgtttatacaagatatctaatcattactgaggcataagaatgaagctctcagatatttcagcacatatagtgaaggaatcgataaactttttggttcagatttaaccacgaaacttctggcttcgtcatcagtaacttcactgctcaaggatgcaacccttgcaaagcacaactaaacattccagtgctttaggatagttatctcctttgtgggagtcctccaccaggtcaaatattttggttttcatttcattaattgctttcacgacctaatctggactatctctgcgtgaaatcaaagcttcaaaatcttgaactggagtcagatccccaattgtctcgactttaacagatgattttccgacaagattggctgtttgagcagtaattttcctttaacctcttcatcatttgaaaggaatctctttcctcccaataaatgccttgacaagcgctacagcgagatattttgaatgtaatcacaattggttgttgtactttgtacaaaaggagcaagcaaacatcactcttgccaaggatttccctttactccaagacctaca

SEQ ID NO: 34311 - DNA, 1989 bp, Glycine max
  Clone ID: PAT_MRT3847_130987C.1
cacgcgtccgctgttccaatgcaacaacaaagaaccctccatcatgcgggaccaactacgtcaactccctttgtccgttgcacgttttgaatttcaaatctcgtaacgccaacgccaacgccaacgccaacttatgttacattacatcccttcacgaccctctctctccccaacatcctaggctggctgtaactgagtcagttacattttaacaaaactttggctcttatttgagctcatttgacagacacttcattcaaggaagtaagaagtagaagcagcacctgcttcatgatgggtgcctcaggaaaatgggtaaaggcattaatcggacttaagaaaccagacaaagaggagcatgtgaaagagggtggtggtaagagcaagaagtggaggctatggaggagttcttctggggacacgggggtttcttggaagggtttcaaaggaggaaaccacagcgcagtagcttcttctgaagtggggtctgattcttctccacatgttgtagcagcagcagcagcaacaggcgcggctttcacagcagcagtagccactgtggttcgagctccacctaaagatttcagactcgtcaagcaagaatgggccgctataagaatccaaactgctttccgcgccctcttggcaagaagggctttgagggcattgaagggagtggtgaggattcaagctcttgttcgggggagacaggtgaggaagcaggctgcggtgacattgaggtgcatgcaggccttggttcgtgttcaggcccgagttagagcccgtcgtgtcaggatgtccatagagggccaaactgtgcagaacttgctcaatgaaagacgcagtaagcttgatcttttgaagcaagctgaggaaggatggtgtgacagcagaggaacgttggaagatgttaagacaaagatacaaatgaggcaagaaggagctttcaaaagggaaagagcaatggcttactctcttgctcacaaacaatgcagatcaataccaagccctaatccacgaacacgtgcctcatttacctctcttaagagtcatgagatgaacaaagctaactgtgggtggagttggttggagcgttggatggcagcaaagccttgggagagtagattgatggaacaatcacaatctcaggctgaagccttagataaaaccccacctccaaagaagtttgtggaatcctttgtgagctctaattccaaacaaagcatggtcaaagtcaagaagaacaacgtcacaacaaggatttcagctaggccaccccttgttgggcaagctactcgcttatcctcaagtccaagttctgagtttcgatacgatgagagttctgcatcatcttccatttgtacatccacaacaccaatgtctgggaacacttgtgacaggactgaggatagtaatggtaatgctgttgttgctaggcctaattacatgaacctgactcagtccacaaaggcaaagcaaaagacaagtggcaatcatgtatataatagagctcagaggcagcaatccatggatgggtttcaattcctcaagagggcagcggttttctccactgcggattctgacccttcaatcaacttttttaggccacttcacttggacaagagttcagtgatggcacggtgaaagggatagaatctggtggaagctcgacatctttgtgtatttattgttattatttttttttccaagaagttcaacatcttgttgttccatgcaatttaaattgagttagttagctggctagaagtagcttttgtgtttgggaatacttgtgaggggtctccattttgtataattgtttatttgtgggttttgatattactcagtgctgagaggcttatccagataaatcaacttaagcataactatatggggaaacactcctttggttaacacatttagacggatttttttgtcccttgagttttttttaccacaaatgataatgccatttcataatcttgtagg

SEQ ID NO: 34312 - DNA, 673 bp, Glycine max
  Clone ID: PAT_MRT3847_130988C.1
ccacgcgtccgcgagccccctcctctctctctctctctctaacatcctaagctggctgtaactcagttacgttttaacaaaacttgtgtcttatttgacagacacttcattcaaagaagaagaagaagaagcaagccaagcagcaacacctgcttcattatgggtgcctcaggaaaatgggtaaaggcattaatcggactcaagaaaccagacaaagacgaccatgtgagtcagtcagttagttctctattgcacagcacagtgcatggctcttttttctatgaattgtttggtttatgatgtgttgtaggtgaaggagggtggtggtaagagcaagaggtggaggctatggaggagttcttcaggggacacggggggttcttggaagggtttcaaaggaggaaactacagagcagcttctgaagtggggtctgattcttctccacctgttgtagcagcagatgcagatgctgctttcacagccgctgtagccactgtagttcgagctccacctaaggatttcagactcgtcaagcaagaatgggcagctataagaatccaaactgctttccgcgccttcttggtataccatcttatatacactattttttttttttatcgacaatattagttgttaggattgttagtttctaaatatggcctctcccccttt

SEQ ID NO: 34313 - DNA, 476 bp, Glycine max
  Clone ID: PAT_MRT3847_130989C.1
tttttttttttttttttttttttttttttttttttttttttttttttttttttttttttttttttgggaacaaaacatcccccataatttgttaaaatacgggggaaagggggaatttacataataatcaaggctttaatcaaagccttttttttttggggaaatttcattaaactttgaaaccctcctaattccttgaattacccaagaggaaaactttgtttgtttttaaacatcagcaaaggggtattttgggtttccatttttttccgaaaaacatttaccaccataaccggtttttttgaaaagggcttgttttattttttccgggctaaaaaaatttttggggtttggaaccttggggaaaaatgtttgctttgaaaaatcattggaggtgtttataacccactggggaatttgagggcctaaggtttttaaggggttcactggggacaggagaaaacctggttttgggg

SEQ ID NO: 34314 - DNA, 298 bp, Glycine max
  Clone ID: PAT_MRT3847_13098C.1
ctgcgtgaagactaccgacgggtgcggctgcaagaagactacataatggtacgggggggagacgacgacaggagggtgcggctgcttgattacttcataagtgcactgctgctagaatacgactgacaggtacagctgctataagactatccgaatggtacactgtgctatgaagaccacaaatgggtacgtgtagtacacaactacaaaacggggcctcattttctagcttacatacccttacacttctcttcctgttagatcatgacctatccattaaggaaattctccgaacatg

SEQ ID NO: 34315 - DNA, 434 bp, Glycine max
  Clone ID: PAT_MRT3847_130990C.1
ggctcgagcatgggtcagaggatagagacgtgagttcgatgtagaacgtgtcgagataaggcttgaatgcggaatgaaagagtatcataaaatgggtacctcgattcactatacgtaccttatatatatcatggggatatctatctagattcttgacccgatcttatatgctgatccctattgcatgctagtatcaggagattgactataatggactacaatgactatatgtccatacctagcatataagaagtctagtgataatagataagccaagatatctcatactatgatatacccgtgcgttacatcaaagaagttctggctatgccttattattattagtcaacgaaatgaaacaatggaattgaaataactcactcagaacgccctttaccagaatacgcggaacgagtgaatcaactcatccctta

SEQ ID NO: 34316 - DNA, 140 bp, Glycine max
  Clone ID: PAT_MRT3847_130991C.1
gcctcaaagaaattttctaccgctttgatggaaccttgaaacaacccataccaccggtttgagacgggtgccttcaccaagaaaattttatcccacattttcaaaccttatctaccaattcatgttaagcaacggacccc

SEQ ID NO: 34317 - DNA, 479 bp, Glycine max
  Clone ID: PAT_MRT3847_130992C.1
tacggctgcgagaaggaacagaagggatgactaatggtagagaggtcgtctagctctacgggacactgaaagttcagtatcaattttgaccctgaatagtcccagaagaatcaacttcaaaagttaaaaataattgtaataatcatatcaataatgcaaagaaaaaatgcaagagaatgggagacatacagatagctaatcactagcaaccaccattaaacatcattgactactagaaaacaagaagagagatgccccgagtaagacgcaaacctttctttttctctattattattataattattattatattatattcacacattttagtatttaccaatcctcaggacactgaacatgcagcaaaaaaataacaacaaaaaatagaataaatacagcaacatgaacaaataataacgcacacttcactgttatgattgtcataatatcattaccatcagagcctgaaagtttcagcg

SEQ ID NO: 34318 - DNA, 192 bp, Glycine max
  Clone ID: PAT_MRT3847_130993C.1
atgaacaatcctctgcttacagtccacatcacataatccttatctcgaatttccacatcggctgctatttacctcggattcccttctattcatgttgaattctcattgggatctccatctaattgtggtcaaccctttttatcggatctatggtcctacatatccgcaactgaattagggttagactccaat

SEQ ID NO: 34319 - DNA, 426 bp, Glycine max
  Clone ID: PAT_MRT3847_130994C.1
aagaacccaaaaggatttttaattggttaacaaggtttttctttttactaaaaaattggaaaggcctacattggaaaaaaaggaccaatttgaaaaaaaagaaactttgttgtttaaaaaaaaaaaattttttgaaaagtttacagaaaatgaaatgggggaaaaaaaaaggatttttgtttaggggaaaaattcttaaagggatggcctttttggaaaactttggatgcccaaaaaagcatttgttgttgttgaaagcaaattcttcttataaactttaaaggaaagcaggggtttttttttgaaaaatttgccatgccatattgacatgcctcttttttgaaaagggggctcctactgaaaaacgtaaaaggtcctcccttgataaaaccgggtgggttataaaagctttcccagttgatttta

SEQ ID NO: 34320 - DNA, 438 bp, Glycine max
  Clone ID: PAT_MRT3847_130995C.1
cgaactgaatgtttctgcatgacatggtaccagtacatcatcagtcgacacatgtcgaccgagtcaagaaatgcgttcccctctcgtccttctcaccacaacttggcctcacaccaacatttcaaccgcttagtacgttcgcttgaaaggcgggacgggcttgcactcggcctcgtccagcgtgttcgcaatgaccccccgatactgcagctcgacctcgggcgagttcgggtccctctggaaagacagggtgtgcttcatccacttgtcgtcgtctcgctccgggaagtcctctcgggcgtgagcacctcgggactcctgtcgcgccgcggcagaaaccaccgtctgcatagcgttctgcataatgtttcgcagctcgagcgtctcaaccaggtcagagttccagatcatcgatcggtccttgattccaatgtcgtc

SEQ ID NO: 34321 - DNA, 401 bp, Glycine max
  Clone ID: PAT_MRT3847_130996C.1
ttcgcgtccgttctcgcgtccggccaaatgctggtcttttaatgtggagatattttggtggacatctcgtctttgaagtctctaagatgacttctccctacattaaatgcacagtctctttcttcatagcattaggaaattaggctgatgacaccatcaattatgaggcttttccccacaagttgttgcagcttggagagatccaagaaaacgttgtattcgtactttcacaagaggaatttgttacagcttggccaactcacgcgcgtactgcaacaactctgtcggatgacgggtggccatatttgtatgctatggtacacgacagttcaccgtctacaataccagatgatattgacattggcggtaagttgacaaccatcaacaatacgtgtgcatat

SEQ ID NO: 34322 - DNA, 1416 bp, Glycine max
  Clone ID: PAT_MRT3847_130997C.1
ggtccggagccccggggcgacccacgaataaacgaagaagcgaaatctcctagaaagcgagtttctctcttctctctctcaattttcacatagtcagcgaaaacaaacaaactattggaacacgaaacacaaacatcataacataagcagcagcagcagcaccacccaccttgttcattgttttgaattcaactgagaaaaacgacaaacgaggatgtttcaagagagcagcgcgacacggtggccgactcagccgactcagtggactcgctaccacgacaagctcttcgagcgggctctgctggtcgtgccggaggacctgccggaccggtgggagaagatcgccgaccaggttcccggcaagtcggcggtggaggtcagggaacactacgaggccctcgttcacgacgtcttcgagatcgactccggccgagtcgaggtcccgagttacgtcgatgactcggtggcgacaccgcccagtggcggtgctgaaatttctacttgggacaacgctaatcagatctcattcgggtccaagcctaagcaacaaggcgacaacgaaaggaagaagggcacgccttggactgaagaggaacacaggctgtttctcattgggctcagtaaatttgggaaaggagattggagaagcatttcaagaaatgttgttgtgacaagaacaccaactcaagtagctagccatgcccagaaatactttctccgccagaattcggtgaagaaagagaggaagagatcaagcattcatgacataaccactgtggacagcaactcagttcctgtgcccattgatcagaactgggttcctcctccgggtggttcagtgcagcaatcactgcaatacccatcaagcaacatgctcgatcaaatgggtacatttgggtattcaaactatggctttggcatgtaaagaatactagactagaagccgtatgttctgtatatagtgctgtagatttgattcataagttcccctatgtaaagttttatggttttgctagctgacaagggtgattaggagtattgctaattattgaattcattagtgtaggtttcgtttgaatacctttgtggatcctataaatgaaccatgaggatgaaagggtagtgaatactaatagtgaacctttaggaatgaattcaacaggtatggaaattctttgtatgtgcccaattcaattactgctttgcaattcggattataagtattgaaatgaaaccctaaaccttggccatttcttcagtgagttcagttgagtgaaagcttactgagtatgcattattgcattcaatcagcaaacaaagcctgtttcggttgctgtttcttgatggctttttatggttaaagcctgcaattttattgaagttaatgaaaagagttgcagaacttttatgtagaaa

SEQ ID NO: 34323 - DNA, 1363 bp, Glycine max
  Clone ID: PAT_MRT3847_130998C.1
ggctcgagggcagaagcgagatctcctagaaagcgagtttctcttttctctctctctttcaattttcacatagtcagcgaaaacaaacaaactattggagatttggagcacgaaacacaacacaagcagcagccacctcgtttcattgttttgaattcaactgagaaaaacgacaacgaggatgtttcaggagagcagcgtgacgcggtggccgactcagtggactcgctaccacgacaagctattcgagcgggcccttctggtcgtgccggaggatctgccggaccggtgggagaagatcgccgaccaggttcccggcaagtcggcggtggaggtaagggaacactacgaggccctcgtccacgacgtcttcgagatcgactccggccgagtcgaggtcccgagttacgtcgatgactcggtggcgatgccgcccagtggcggtgctggaatttctacgtgggacaacgctaatcagatctcattcggttccaagcttaaacaacaaggcgagaacgaaaggaagaagggcacgccttggactgaagaggaacacaggctgtttctcattgggcttagtaagtttgggaagggagattggagaagcatttcaagaaatgttgttgtgacaagaacaccaactcaagtagctagccatgcccagaaatactttcttcgccagaattcggtgaagaaagagaggaagagatcaagcattcatgacataacgactgtggacagtaactcagcgcctatgcccattgatcagacttgggttcctcctccgggtggttcactgcagcagtcacagcaatacccatcaagcaacatgcatgatcaaatgggtacgtttgggtattcaaactatggctttgacatgtaaagaatgctagaagcagtgtgttctgtatatagtgctgtagctttgattcataaggttcccctctttgtaaagttttatggttttgctagctgacaagggtgattgggagtattgctagttattgaatttttatcagtgtaggtttcgtttgaatacctttgtgaatcctataaatgaaccatgaggatgaaagggtagtgaatactaatagtgaacctttaggaatgaattcaacaggaatggaaattctttgtatgtgtccaattcaattactgctttgcaattcggatttaagtattgaaatgaaaccataaataaaccttggccatttgttcagtcagtttcacttgagtcaaagctgcttactatgagtatgcattcaatcagcaaccaaagcctgttttggttgctatttcttgatggctactttattatggtaaaagcctgtaatcttattgaaggtaatgaaaagagttgcag

SEQ ID NO: 34324 - DNA, 328 bp, Glycine max
  Clone ID: PAT_MRT3847_130999C.1
cccaaatgagagttgctatttgttaagaaagtgttaacaaaagagaggcaaggaacgaaatttgtttccgacgaaaaatacaaaaatatcgaccttttgacaataataatgtcaaggtacggatgcccatcgtcactcccccaaatgaaagttgttgcggccttttgtactccattggctaaaaaagaatctattcaaagtgttcatacagatacaggggaaaggggaaccagatcactatcttattgtttcctatgctgcaattgctgtcatgtacctccagctttcacgactaagtcctgacaagtgaaccttcaaattcaaattc

SEQ ID NO: 34325 - DNA, 501 bp, Glycine max
  Clone ID: PAT_MRT3847_13099C.1
gcgagaagacgacagaagggaatgtcgttattaagtgttcgtcacgtgattgagcattttcctacatgatatgagaaaaatctaacaaaagcaaaatgggtgatgcgttatgcgtgagacaaaattttacttgcacataacataacatatacagatttaactgtgtacaaaccccacctatcctctctccaatgccaatcatccatttaccctactttatttgtgatactatgcaacatacattctaatttgtcacagcaccaaagaagcttccaatgccaaggcttatcaatcaaatttcccatatttgtaataacttcatcttttggtgtgataccaagtaaagtctaggaacacatgtttgctaaaggctcttgcccaatccaagagtcatgccaagaaaatattatcatcacttcctatttccagtcaaccatatattatcaaatcactttgtaacattttcttcacctcacaccttgcacaaatatttccaccacg

SEQ ID NO: 34326 - DNA, 602 bp, Glycine max
  Clone ID: PAT_MRT3847_1309C.1
gctgtgttttaagcattgcggcttcaattttatctatatcgcattggtaggaagcaaatcagagagtttgattgggaagtatggtgtggaagcttttgggagcacgccctctctgctcatattcttcttctttgcttctcacacccctcttatttcgcagcaaaataaggtacctctgtctcaggatgttttgcatttttggtgtcttgtttttctttactactgcatttaattgtctacttaactaaattaggaatactagaaagacaaacctcagatttgtagtcaaagaaaaaaattggaatgtgatattcgttcagtagagtagtaagaaatggaattcaagtaaagtgtaagagtgtggatgtcacctcattttcctgttcatttgtgttctctttcaactcaaacgaatggactccagtgaactaccaatcattttgaacttttctttttctttggtttagctagcttgtgattttgtatgtgaagcaaaaaaaattagcttgcttcaatattattgacgtacactgctgtagcttggttcatggccaggaacctatttttgggcacctctgttacatgaaaccatctcctttctt

SEQ ID NO: 34327 - DNA, 202 bp, Glycine max
  Clone ID: PAT_MRT3847_130C.1
actactactactactgcacacactctctctctctctctcattgtatggccgccaattcgagtagccgagggatcaccgccttggggaaccgattcgcaaaccgtctcgagttttcaaacccccttaaagctctgaagtctcgaagggggacaatagcaggtgcatacagtagcacggcgggtcagtgtatgacaagaacctg

SEQ ID NO: 34328 - DNA, 306 bp, Glycine max
  Clone ID: PAT_MRT3847_131000C.1
gttaaaagccttagccttccctacaactccaaacacaacgacatcatcatccatggctgcctccgtttccactgtcggagctgtcaactgagctcttttgaacctaaatggatctggagctgtatcttcagctctcagttcatatcttctctgggaccagcttgaacaatgatattgcctctagggtccccaacagtaaggttatctgtggaagcttcaagattgttgctgtataagagatgatcgagattgaagagacccattataccgacaaggactcatggaagggtcttgtctatgatatct

SEQ ID NO: 34329 - DNA, 503 bp, Glycine max
  Clone ID: PAT_MRT3847_131001C.1
ccagtgtgagttattttgtgatcatcatcgtctatcgtatcccaactttaccccagaaccacatacacaaacaccacgccactgttactttctcttctctcctccactcactttcacttcatggcgacggtgctagcgccaccgtccctctccgtgcgcgcttcctctagccgccggcataggaagaagcagcagcagaagcgagcatggggagacttcagccacttggctcaggtggttcgcaaggacatggaattcctcaagagaggaatcgataacggcgttgcgtgggccaacgagaccttccgcattcccgaggctgccaagaaaatcgacgacgtcgtttggctccgcaatctcgaagaccctcactctcctcctcttccttctccttcctggccccaaccttggtatccaggactaagtggagtggatttgctcatgtatgatctcgaggctttggaagcttatgcttcttacttctactatttgtctaagctttg

SEQ ID NO: 34330 - DNA, 570 bp, Glycine max
  Clone ID: PAT_MRT3847_131002C.1
gaaagaggtgtgagtaagatcataagcaaaagcaacggtgaactgaagatgccggttctcaccctttctactaacgttagccttaatgatttagacgcctcttcgatactctcccaagtaatctccaccgtcgccagcatcatgcgcacacctgagccttttgtgatggtttcactggaaggatcaacaaccacatgttttggtgggactgaggagccagctgcctatggtgaactggtgtccatgggtgctcttaacccagaattgaacaaaaaactgagtgctggaattgcctgcgttcttgaaaccaagttgttggtgccaaagtcacggttcttcttaaaattctataacacagagggctataattgtgcattgaacgggtctatcatggtagtcgagtccaaatgatggaaagagaaaacctgttactttattgttattgtaattttggcatgctatgaatagtaagtatttcattaattccttacttattaataacatttttcttttataaaacggcaactcaaattgtatttaattttaattagtcaaatcttataaagtcta

SEQ ID NO: 34331 - DNA, 230 bp, Glycine max
  Clone ID: PAT_MRT3847_131003C.1
acgaggttttgaaaaataatttttagtccttaattaagcatctttaactaacaagggccaacatgcatgcatgtgttggtggcagcttgaacacagagggaaggagatggaagagaggccgaagcctgaagggataattgagaggggagggatgcaaaacttgatcagggttccccaatggagatcgaggaaacttcaagtcaattgagttttatttgttgttggttgct

SEQ ID NO: 34332 - DNA, 265 bp, Glycine max
  unsure (1)..(265): unsure at all n locations
  Clone ID: PAT_MRT3847_131004C.1
attaanacaaaacacatatctttccacattttcatggacacacatataaagaaccggtggtttatataggagaaaggggcattacatcctccattaaataaactttacaagaaacatcatcaaacaaattatatatccacaaatcataaactataaaccttttaaaacaaaaacattaatcctcacaaaacttttactaacataatactcacacatactccctaactaactgctctcacacaatacacaacacacaatgatatct

SEQ ID NO: 34333 - DNA, 247 bp, Glycine max
  unsure (1)..(247): unsure at all n locations
  Clone ID: PAT_MRT3847_131005C.1
ccttgccctcgtcaaaganaaaagaagcaaaanactctcacacagagaaagagncttaanaanaaacgggatttgttttgctgggttnggttgtgtgaattgtgnaatgcnggtgcacgganttgtcnacgtgccacggcggtgtaagancntccggcggcaacgagcatttcttcggcgngangggttcgggggcgattggcggcggcggaaaccgtngtngttgttcntaacggcgggaattgtt

SEQ ID NO: 34334 - DNA, 310 bp, Glycine max
  Clone ID: PAT_MRT3847_131006C.1
attggaccagagtaaaaaacacttcccatcactacaaacgggggacaaaaacgggtggggacccatttattttttttttgggccaacattttgcattcgacaagaaacatttggttcaaacaaggtggcaagaaatctttagggggggccccattctcccccctggttcctcccaacaccacaaaaaaggtcaaaattaaccgccccgggagggaggggggggccccgtaatacggaggcccggggggaacaacacgggttttaccacgcccaggggaagagggggcaccccccccttggggaggggggc

SEQ ID NO: 34335 - DNA, 427 bp, Glycine max
  Clone ID: PAT_MRT3847_131007C.1
cttggttgggatacctgcaacctccgatttgatcattacagaacaaaaaagataccaatccaatccatccaaatggctctcaggattcacgttatttcccctttcttctcaatctccaccacctcccccgtcgctctctccacccacaaactcaccatccgacgaatcaactgcaccggcggcggagagggcggcatcaacgacgcatccctggcatcggagttggcggcgagggccgccagaatgaatgcgcattcggtgatggcggaggaggccatgcgcaagagcagaaagctcctcttcggagaactctgcgagtacatgggcctcgacgaagaccaggcccaacacaaatggacctatatggatgatgacgagaaattggttctcgtgaaagcgtttcttgcagagtggggttcccattttc

SEQ ID NO: 34336 - DNA, 246 bp, Glycine max
  Clone ID: PAT_MRT3847_131008C.1
tctgctcctccgactggagttgatactagaggagatcctttaccggcagctcggctgggcgatcagaatgaaattaagagtgaaaacgcgactaataacacgactactcctctgctgacgaaacgtcagaagaacaaatagaggctcaaagagcgggctgatgagtgtgctaactcatatgtgaactagtatgcactaaaataaagaccaaaactaagcgcaatacgaggggctatgtgtgtgttt

SEQ ID NO: 34337 - DNA, 323 bp, Glycine max
  Clone ID: PAT_MRT3847_131009C.1
attgttgaaagatattgatcaacctactgccacatcgaaaaagtttaaaagatctcgcaaagtgcaggttgaggatgatgatgatgatgattggcttccgctggacctatttgagatatttgaggaaatgaggaagcggaaaatattttctgtgtcagacatgcatacatagcagatgcttggggatggacataggagagagaactgaagaagaaacctcctcgtagatggtcacaggaatgggaagttgagttggcaatcaaagttatgcagaaggtcatagaattgggagggagacaacaataggagattgtgccatgata

SEQ ID NO: 34338 - DNA, 616 bp, Glycine max
  Clone ID: PAT_MRT3847_13100C.1
cccattacttggcttttttttcctcactgatctaacagcctattctcactatatatatatatcccatggcttcagaacctgttctagctgaaactatccacctaataggatggatctaactgcagagatggctgaacacaagatgaaggtgatgactccatgatttctcttgttcatactgtcgtctagtctacacatgcggcacacaggctcaagccaggcaagttattgatgaagcctattatatacttaattagtacctatttttgttccccctttttggaaacatcaaggaactagatgtggttgttgtttctttccttggctagtatgtattatttatcttcaaaaaacatgttacatagataacatatatacaactagaaggatgttaaagtctatgctgagttcacttttcaatagggtagaggctagctagctattaattagggatggaatcagatgtataatttttttatttttctgttcatgttttgccccttctcagggtgcatgatatgtttgaccttttatgaaatttgggttttatttttatctgtcgcggactgttaaataattccgtagagatcataaagaaaatatttctttctttatt

SEQ ID NO: 34339 - DNA, 458 bp, Glycine max
  Clone ID: PAT_MRT3847_131010C.1
gcgttcttgtattatcaataaaagtactgttgtccttggcagcgcaaacgcggtcctagatagcttactcatacatacacagatcacctcctaacagtgacatcccttgcttaataatgcctaggtacggctgatttactacctacaacgagctctgtctcttgttgctttttgaaggcgacttttacagcactcctagaggggcaagaggctgttgagatccgatcctgctttttctcaaacgctcatggatgacgaaagcatgctcaagagatcgtgaagcatggagccttgggtgacagcgtgtgtgggaacgggagctcagggaaagagatgagaccgtacttgaccctgcaatgcaatagcacgcattgtgccccgccatatgtagaggggcccctactgggaggcgtccttagtgcgagtgttcgaaccataatgagttcacttcctacctg

SEQ ID NO: 34340 - DNA, 271 bp, Glycine max
  unsure (1)..(271): unsure at all n locations
  Clone ID: PAT_MRT3847_131011C.1
cccacgcgtacgnccacacatacaaaatgactaacataattatttcaaatctatctcactcctttnaatcccgcctaattataaacaggctcgccctccctccaacctnnataacnctcacaataataaccctaatctcgaaataactactcatccaaaaccttgtcattattaaactcaacactatcattaacacttctttaattctatcacccacattattaaaattactaaatcctaatattatcttcacaaacctacaccaaaacca

SEQ ID NO: 34341 - DNA, 262 bp, Glycine max
  Clone ID: PAT_MRT3847_131012C.1
cagcgccgctttttggcttaaatcctcaggaccaagaaggtgatctttttgtggctgatgttaacacccagttgaagaacaagaacatcaccactgatatcaaattagacactaattccaatcttctcacaactatcactgtcaatgagcctgctcctggtctcaagactatttttagcttcagagggccggatcaaagggctggaaagggggaaggtcaggacttgcgtgactgtgctggggtgagcgccggggggggggg

SEQ ID NO: 34342 - DNA, 367 bp, Glycine max
  Clone ID: PAT_MRT3847_131013C.1
ctctatcctcattttaacaaacctcagaattatttctactcttctctctatccctcagtgtgatattctcacgaggatagcgagaccaaatatttctttaaaacaattatgtctattttgatcaacacactttttgttatgcatgctagacagttcttttattgcttgatgggagataactctgttacctcttactttgatttgattatttgctcattaactttactattttgctttgattttcacccatccataaccataccttttcgttacaattcatgatactttcatcaattgcctgacattttccatgctttacatgcttatatggtgcctatagttttatccatattttttttctttattt

SEQ ID NO: 34343 - DNA, 414 bp, Glycine max
  Clone ID: PAT_MRT3847_131014C.1
aacaaaaaaggggggggaccttatttaaaaaaaaaaaggccacccgccccctaaaaccctagggagggaaaaaaaagtgtttcttttttaaaaaaaaaaacaacatttcccaacccccccccccggggttcggaaaaaaaaccttttatttatgggtccccaaacaagacccttaaaaaaacaagggggggggacccaataaaaaatcgggttgggaatacaggaaaaaaagggtgggaacatttccccagggggcgggggtcccccagggaaaacacaaacaggaatcccccccccgggggggggagccacaaatcttttttgggccaaaaacaaagtttccggtaaaactattcgggggggggggggggcataaaaaaagaccccctggacaaggtcaaaaccccccccccc

SEQ ID NO: 34344 - DNA, 349 bp, Glycine max
  Clone ID: PAT_MRT3847_131015C.1
gagcctccattcacgcgctaagcacccatgctcaatagaactggcttccagtttggcttctcgcgttgagcgtgcaatggcgcgctaagcacattgctccaattcttcacatcttatagtcctctatttaattatataaattttattattttaattagtgtctttgatgttgtgttatttgtgtgaggttagctattttgataatttttaataaaatataattcaattatgtttttatattttttatatttatttattgtaaataataatgtactaaaaattttaattaaaaaataaataggatagttatatattaataaatcatttaagattaaaatataatgatgta

SEQ ID NO: 34345 - DNA, 514 bp, Glycine max
  unsure (1)..(514): unsure at all n locations
  Clone ID: PAT_MRT3847_131016C.1
gaccccaaccccaaccccaacgacgccatcaagattcttcccttcgagttcgtttccctcgaggcctgtctggaggctgcttgtagcgtcttggaaaacgaggctaaaaccttggagcaggaggctcatcccgccttggacaagctcacctccaagatcagtactctcaatttggaacgcgttcgtcaaattaagagccgattagtcgccatcaccggtcgtgttcagaaggtcagggatgaattggagcacctgctcgatgacgacgaagatatggctgagatgtatctctctgaaaagctagccgaacaacaggtcttggatggcgacgtcgtcgtcgtcgacgacgacgatgacgacgacgatacctcttctgccgacaacggcgatcttcttcaacctcacaggaccgctcctgaattatcgttcgacaatgttctcggtagggacagcgcctccttcagtgccgtcnacaagcaacttgatgtcgaggagcttgagatgctcttggagg

SEQ ID NO: 34346 - DNA, 1474 bp, Glycine max
  Clone ID: PAT_MRT3847_131017C.1
ccacgcgagcggtagagagagagagagagagagagagggaaggggatgagagagggaggatgaggggcggtgaggagcgatcgacagggattcgaaagaagggaagcggagtgagacaatggctggtcctggacggcagaggagagacggaggtggtggaggccgggaagcacgccatcatgaggaggacgggactccccgcgcgtgacctgcgtatattggaccctctcttgtcatacccttctacccttctgggtcgtgagagggccatcgtcatcaacttggagcacatcaaggccatcatcaccgcccacgaggtcctcctcctcaactctcgcgacccctccgtcacccccttccttcaggagctccaggccaggatcctccgccaccaccaccagactctggccgatgccaaccccaaccctgacgacgccatcaagattctccccttcgagttcgtagcccttgaggcctgtctggaggccgcttgtagcgtcttggaaaacgaggctaagactttggagcaggaggctcatccggccttggacaagctcacctccaagatcagtactctcaatttggaacgcgttcgtcaaattaagagccgattagtcgccatcactggccgtgttcagaaggtcagggacgaattggagcacctgctcgacgacgacgatgatatggctgagatgtatctctctgaaaagctagccgaacaagatgacttggagaaggcggaggatacctcttctgccgacgatgttgatgatcacattgacaggaccgctcctgaaatatcgttggacaatgttgttggtagggacagccatggaactcgcgatagcgccacctacagcgccgtcaccaagcaacttgatgtcgaggagcttgagatgctcttggaggcttactttgtgcagattgatggcaccttgaacaagctctctacgctgagggagtacgttgatgacacagaggattacatcaacatcatgctggatgacaaacagaaccatctcctccaaatgggagtcatgttgaccacagcaactctggtagtgagtgcctttgttgttgtggccggtatttttggcatgaatattcacattgagctatttgatgaccagaaagctgggatgacacaattcctctggactgttggtggtagcactgcagggaccatattcttgtatgtggttgccattgcctggtgtaagcacaaacgcttgctagagtgaccaggcgtcaaatagtgtttcataaacaaatgtaatttaacttgaaaatcaccttttgttcatgtgctataaattttagtagcagacagtgcagtatcttgttgcttcttgtactcgtatgatccttcagcttcaacgatgttgctcatcttgtacattattccgtgcttaaaaacattaattttatggacacttgtctttccaataacagttttgttatttgcacaaaaaaa

SEQ ID NO: 34347 - DNA, 571 bp, Glycine max
  Clone ID: PAT_MRT3847_131018C.1
ggaaaggaaaggggttttatttggaaccttatttaaggcttaaccatttccctaagggccccaaaagcccaaaaaaagggggggtttttcctttccaacccccccggtcccataaaggggttgggccccccccaaggccttaacccccaaaggggccccttttggcccggatttaataatgcccccaaaggggggcccctttttgggggggccataatttttggaacccccctggccggggacaatatggccgggcccaattcccttggggggccggaaaaaggggccctcgggggtttttttttccaaggccttttttccgggaccgttttaaatatccccaatctttttaaccctttaacccccggggggcccaaggggcccttgggcccccaaaaagctaaccaaacctttggcctccttaaggggggggcccagccaggacggggggcaagggttcaccaaacccaggccccattgggtaaaaccccgggaacccctcctttttttaagaataaagcccccccccgccaccgggtggaaaggcttaccgtgggccccccggggggcc

SEQ ID NO: 34348 - DNA, 289 bp, Glycine max
  Clone ID: PAT_MRT3847_131019C.1
ctaaaactcgctgatttactgttcttgctatggcggataatcatgttgtccgtacaaagtttttaaattttgtgaggttcattatcaacaaaagggccaaacttagtgggcaagttggaatcaacccatactccatggaatggactgattaggccaatcgagtactgaatgagggcaatgatattctgtgttgcgattctgctcgttttgacgggtcgattaccaaccctgttatgaacaagattgcagaaatgattaacagactttgaggtggtgattaaaaattgat

SEQ ID NO: 34349 - DNA, 757 bp, Glycine max
  Clone ID: PAT_MRT3847_13101C.1
agtctgtctcctccttgacggtgctgtcccactccttcttgttggctccatcctgatgatcctcaccggcactgccgttgtctagctctgcaaccacttctatgtccttgataataacttgcagatctgaattaacctctgttgatgtatattgtctcatatttgttcgtgtatgagttcttgatttgtagatcagtcataccgtgacagagagattggtggtgcgaactcggacaaccactaacagagcattagtcttgcgatggtataaacgaaggcagagtacgtctgcaacgacagaagccattgtcggtgagacgtgtgcagtggcatcactatcagtggtggttgtgtgatcgccgccgtcgcggaagttgttgttagtggtgaagaggctgtccaatctcgaggccatgtcgtcgttgtcatcgtcatcggcggcagagggagaggagtgggtgtgatggcaacggtggaggatgaaggcggcggcgacgacggtaaggagaagaaacggagacaataaaagggagactagaagaggaaatgttttttttacaaaaatccattgtaggcaaatctacggtggaattactcttatcttaaaaaaagaaattctcttatagatcacctttgttcgcaggggacttaaaaagctccgcgcgttaagttgcttcatgaaagttcttacctacaaggctacaattatccaattgaggatttaaatttagtttctgtaaaaaaaaaaaaaaaaaac

SEQ ID NO: 34350 - DNA, 123 bp, Glycine max
  unsure (1)..(123): unsure at all n locations
  Clone ID: PAT_MRT3847_131020C.1
atngtctcgcgcccttagtnaaagggatacancgttctcggcccaggtgtatcaagaaaagcaaaagtgtgangatgtgcgncatttgtngnngnagatgnggtgggtcctactatgagcagt

SEQ ID NO: 34351 - DNA, 297 bp, Glycine max
  unsure (1)..(297): unsure at all n locations
  Clone ID: PAT_MRT3847_131021C.1
caaatcctcctctgcttcttngtcttcccaaatctgtcacctttctttcctctttctgcttccactaaatcccccactaactcttttcaattgatatcaattgctggtactacataatctgcatcaaagtttgatgatatagtttctgggactaatatgaattattacatgctaagtgggaaaaggggattaaggaagacaanctgtgntgnttnacttgctgttaaatttgncaataatggacaccctactcttntnntttncaccgatccaanncattntttaantnattntttt

SEQ ID NO: 34352 - DNA, 723 bp, Glycine max
  Clone ID: PAT_MRT3847_131022C.1
aaagttctccttttttttttcttctgagaaagaagaagaagaagaagaagaagaatgggtgtggatatacaaggtaagcttcgtttagctcttggctcagtgaaagatcatgtctctattggcaaggccatgatgtaccattaccaacatgatggcttttccaacatagagattgcagtcctgcgtgccactggccatgacaatggcaccattgatgacagatacatgcatgaaatcctcttccttgtgtcaaacactccagggtccattccttttctagctgaaaggatttcacgccgcctaagcaaaactaaggatcatgctgtggccctcaagacccttgtcttgattcatcgcctccttagagggggaaacaggtcctttgaacaagagctatgcaaggcacatgtctcaggtcacctacaaattagtacaaggtgtttcacaaagagttctgatcacccttcagttggtttcctacacaagtatgcagcttatcttgaagagaggatgagttggctcatcaatcaagcaggaaaacttgaacctgtcatgtctaaagggtttagagtttaggcgctatgatgagaaatccattgatatggcattcagaacattgcctaaatgccaagtgcttatgacaagggtggttggaatgctcccctcatgatattttatgcttcagatcatagcctggctcaagctgccatgagcaacaccttg

SEQ ID NO: 34353 - DNA, 366 bp, Glycine max
  Clone ID: PAT_MRT3847_131023C.1
ctaccattgagtaaggggaaaggcgtgccggctccgggccccgattccgggttccagccacgcgccaggcttaggttcccttgggacccgtacgctgcttcgggctacccatagttctgtcggatagcggtcgtgggaaccaaccttatcccaatgggcgcaatgggacccaaagttcatgcaacgggttgaaaggccctagaagatactgcttctgtagaccaagtggcgttgaagaccccacacgtcttaagcgccctaaacataatccgcatgcgcgtcggttcgcatgagaaatacggtcaacagccaggacggtcacgggaagtatacgaacgcgcgacagccaaagcccgaattcttcag

SEQ ID NO: 34354 - DNA, 321 bp, Glycine max
  Clone ID: PAT_MRT3847_131024C.1
agctcggaattcggctcgagtccggttgcaaacagacacacgaagggccttattttcatcatgaatcattgaacaaaccgctgaaaagatacaacagtgcttacgtattgaatccgacatgagattaggtatatatcatgcagctcaacatattgttcgctgatttcaggccactatacaaaccactcaattgtacgtgatctttgggtaacatgccaacaaggaccgcctctgaagcattcacattaactgaaaacattgatgctcactacattatctacgatgcatgtcaggcccacataccttacctatttaagcata

SEQ ID NO: 34355 - DNA, 1277 bp, Glycine max
  Clone ID: PAT_MRT3847_131025C.1
ccacgcgtccggtgacctgttatcgcaggttgttttggttgggtgtgtgagcttatttgcttacgcacactccatgttggactgcacctacctctgattaggtgagtcatcactccgattctcttcacacctaagatccattctttcttaattctcacctccctcactcgttcattcgaacaaaaccctttttagtttttttcctcctctgtttctctctctgctctgcattttggtggcatcatcagagatagagacttgagtgtgagagccacaacttctccaattcttcaaaagggtgaaactttgaaggaaaagaaatggttggtgctataaaagcagcgattggagacgcggtgttgactttcatgtgggtgttctgttcctctgtgttgggaattgcttcagggtacataaccaatgcacttaaccttcaacacataacctacaacgggttcccttacccttcttttcttgtcaccaccaccctcgtttttgttctcgtttttcttttcaccatcattggcaatgttcttggtggggccagcttcaaccccaccggcaccgcttccttctatgccgttggtcttggttcggatactctcttctcaatggcgcttcgtttccctgcgcaggcagctggtgctgcgggcggtgcactggcaattatggaagtgattcctgcaaagtacaggcacatgattggggggccttctttgaaagtggatttgcacactggggctgtcgctgaaggggtgttgacttttgtgattacctttgtcgttctcctcatcttcctcaagggccctcgtagtgacttgttgaagacttggttgctggccacggcaactgtagttttggtcatggttggatctgcctacactgggccagccatgaatcctgccaacgcttttggctgggcatacataaacaactggcacaacacatgggaccaattctatgtatactggatttgccccttcgccggagcaatattggctgcttggctgttccgcgctgtctttccaccaccatcaccaccagaagttaaacagaagaaagcatgaagagggatagtagatttggttcttctggtcaattgttaaacgccatgctactgcattaagaacctttttttttttcttactttatatactttcttcttcattctctcttctgtttctgaactcaacctttcaacttataattaaacatgttccgtgcaaaatcagaggtgaaaatgttggttttaaattaatgggttatgtttggcccct

SEQ ID NO: 34356 - DNA, 257 bp, Glycine max
  unsure (1)..(257): unsure at all n locations
  Clone ID: PAT_MRT3847_131026C.1
aaagnacaanaaaaagcaaagttaagcaaggtgacggtactattacataacaagatgttttatttacctctaaaacacataattttccaaacttaatttgaactaataattaaatattgggggaaacaaaatcttaccagagtttttttctttgttatttaaccaaaaaaaatcttcaatcgccagttcaaactatatttattttttaatcacaaacttccatatttttaatttttcttttctatgtaattttattc

SEQ ID NO: 34357 - DNA, 1233 bp, Glycine max
  Clone ID: PAT_MRT3847_131027C.1
catcactccgattctcttcaaaccaaagatccatgctttcttaattctcacccccctcactccttcaaacaacacccttttttatttctttctcctctgtttctctctctctgctgtgcattctggtggcatcacagagagagacacagttgagtgagccaccaccttctccaattcatctactttctctccaattcttcaaaagggttgtctccaattcttcaaaagggtgaaactttgaaggagtaaagatggttggtgctataaaagcagcgattggagacgcagtgttgactttcatgtgggtgttctgttcctctgtgttgggaattgcttctgggtacataaccaatgcccttaaccttcaacacatcacctacaatgggttcccttacgcttcttttcttgtcaccaccaccctcgtttttgttcttgtttttcttttcaccatcatcggcaatgttcttggtggggccagcttcaacccaaccggcaccgcttccttctacgctgttggtcttggttcggatacgctcttctcaatggcgcttcggttccctgcgcaggcagctggtgctgcgggtggtgcaatggcaattatggaagtgattcctgcgaagtacaggcacatgattggggggccttctttgaaagtggatttgcacaccggggctgtcgctgaaggggtgttgacctttgtgattacctttgctgttctcctcatcttcctcaggggccctcgtagtgacttgttgaagacttggttactggccacggcaactgtagttttggtcatggttggatctgcctacactgggcctgccatgaatcctgctaatgcttttggctgggcatacttaaacaactggcacaacacatgggaccaattctatgtatactggatttgtcccttcaccggagcaatattggctgcttggctgtttcgtgctgtctttcctccaccaccaccaccagaagtaaaacagaagaaagcatgaagagggatagtggatttggttcttcatgtcaattgttaaacaccatgctactgcattaggaacccccccccttttttttactttatatactttcttcttcattctctcttatgtttcttaactcgacctttcagcttataattaaacatgttcccttaagtacaaaatcagacgtgaaaatgttcgtgtcaaattaatgggttttgtttggcccataaattcagtatccgcttag

SEQ ID NO: 34358 - DNA, 182 bp, Glycine max
  Clone ID: PAT_MRT3847_131028C.1
tgtgcattcacgcaaaaatggtgaaaaaggcagagaggagtttttaaaactggggatcgtttatagcacccccattgattccgggaaccactgttgaagaggctttacatcaagctaatagttgcacttgagaaaagtgttcctaccttggttggcttattatgtcctaaggatgagaaact

SEQ ID NO: 34359 - DNA, 358 bp, Glycine max
  Clone ID: PAT_MRT3847_131029C.1
ggggtcaaggaatccttctttattcatgtcaatcttagatccatctgtgacaccttttggtaatttagagttcccttctccaagaagactgaacctctcaacatcacccatgaccattgcagctctgacctcaccaggtaaagcttgacttacagatggagaccaaagggaatgtatacagcgaagtagctggaaaataagaacatgctacacttattaatacaaagtacttagagagcaagattacaagcacaatgatccttttgttgaaaatactacaggaaacataacatggccagtctcttaatgccagtatacatactttcaagagaggagtcaccatccatgatatgcgaga

SEQ ID NO: 34360 - DNA, 324 bp, Glycine max
  Clone ID: PAT_MRT3847_13102C.1
aaaaagaaaaaaattgccgcttttttttgggaattcaattctttgaataagttttttaaaaaaccgggttcctttgttttccgaactttaaaaaaaaaatctccccagaaaatttggttggatttgggccccttttgccctccccccaaatttttaaacccccccttacagtgcccccgaattttagccgctttcaactggcattagcaagatcctttttccttgccccaaatgacccccgaacttgaatctgccctcacccctttttttgctcatcaggctgttgcccagtttcctcaagcttacaattggggcctttatttt

SEQ ID NO: 34361 - DNA, 433 bp, Glycine max
  Clone ID: PAT_MRT3847_131030C.1
tgggcggttatcagttggctggatgtttgcgggcaaggcaatgcatgtaataacttcatattggcgaacaacatatatcatacctttgatgtcttcgttatcaacaatttgtattgctataaacttgagcattttgtaccccactacttgtgggtatcaaaatgaaagatagcatacttggtccaattgttgaaattggagcctttggtggatcattcttttcaaggattcaagtgcatggccttgctttctttgaaagaacatcaggtgggggaattgaaacagatccccttcatctgttttgattatttgaccattgtagtgcactaaccaattgatagatgaggatgacatgttgtgtaatagagaaagaaatatgacaaagggtttatgtttgcaaagttggaaggaagttacatagaaaaaatatgtt

SEQ ID NO: 34362 - DNA, 355 bp, Glycine max
  Clone ID: PAT_MRT3847_131031C.1
gcgtacctcctttcgtgggtgcagggtgtccatcactgtatggtccgggggttgatccacgcagtgcgatatcattcacttaggatgattaaagtcatgggctggataggaaaaagccatctacactaaaggacaatatggtcgcggaaaagccttcaaatgtgatataattggggctggcatacattattccattgaacagcctgctgaagggaatcaaatggcacccgtgagaacagcatccaatttggaacatagaatgcatacttaatgcaaagaggctatggatcatatgggaacaaagaatgttagaaggagaaaactgaagatgggaacacactaatggaaacatgtt

SEQ ID NO: 34363 - DNA, 270 bp, Glycine max
  unsure (1)..(270): unsure at all n locations
  Clone ID: PAT_MRT3847_131032C.1
ggcaaaaatgtttaaataattatataatgtaaagtatttatgtacaactatttattggcttaaccttcacataatttagtctacacagcttttgtgaaaccatatctatatctcatgcttagaatgttgggtcttgttaggttgtncttgnnntgctncanatgntncctcaaatcctgcatttgttggtactcctatacgggtgttactgacggtgaactttttggggccaattttagngngtttggaagattatttttttttttgtat

SEQ ID NO: 34364 - DNA, 252 bp, Glycine max
  unsure (1)..(252): unsure at all n locations
  Clone ID: PAT_MRT3847_131033C.1
cacgcgtncgattgaatcttcgctatccttctttttttctacttgcactcgaatattcactgtggcagatggggggggttttctaaaaatctgtgccaggccatttgggatgatggtcaggattgcacttgctgaaaagggtatcaaatatgattccaaagaagaggacttgcataacaagacccctgtgctcctcaaaatgaaccctgttcacaagaaaatacctgctctcatccacaatggacaacccat

SEQ ID NO: 34365 - DNA, 255 bp, Glycine max
  Clone ID: PAT_MRT3847_131034C.1
aggacgggcgccgacgttggatgggctcacagctccatcataccacacgggaagacggctggtgacaatatcaaaggcgaggaggtgacgcacaagccggtgcagactcgaacagatacaagactcaatagcttttgaaacctcaccggaggaaaatcttacccatagggcgcctcaggtgcggcatccaacaactctattggatgctatgagactgtactggaatacactggaacacgaatggacatcgacttc

SEQ ID NO: 34366 - DNA, 581 bp, Glycine max
  Clone ID: PAT_MRT3847_131035C.1
aattcggctcgagattgaaaacaaaaagacatcacgccttgggctctttgagaagtgtcactcaggatcttggtgatgctaaggaatcactgcctagagtaacaggacaggaagacacccttagaagcatggtggaagctcttgggatggagctggagaatgtaaaaagagaacactctgaattgaaggagaaagaatccaaaactgaatccattgttgagaatctgcaggtagagctctggaaaagcgagtttgaacttgaagcctacttggcaggagaatctaaagctagaggcgcatcagaggaaatgatcttgacattgaaacagttgttttctgaaactgaaaatgcaaggagggaaatagaagatatgaaaaatgagactgcagaattgaagatggaagctgcagtcactaaacttcagatttaagatgacaaaacatggcggacaagaatggtggaaaaagtggaagcagctaatgcagcagaagcaagtgctcttgatcagattaagggcttatctatgagaactaggccttctgattcatcaccttctgaacctggtgcaagaattacaatc

SEQ ID NO: 34367 - DNA, 350 bp, Glycine max
  Clone ID: PAT_MRT3847_131036C.1
ttggccaggttcatgaacattgatcacaaattcattgggcctttgccacgtttaaacgaataaaaaagaaaagaatataatctatgacaaaagaaaagaaaagaaccaaagaacttcctattagtttcctgatgaaaagctattgattaattgtagcactattgatgacattgggattgctactactgttgttggcgctgttattgtttggattagcaccaccgatgatggaggagatggcggagacgagcgctgccgtgaagtttggatcggcggtgatggcactgatggtgtcagtgagcgagacctgtcggcttggctgcaaaaacgggcttggagcttgggaatta

SEQ ID NO: 34368 - DNA, 369 bp, Glycine max
  Clone ID: PAT_MRT3847_131037C.1
tttttaatgcatgatctgagcttttttggcaatggaaaataacattactaatctctttccttttagcctacatcgcatttagttctaacgggtaatcccacatgattgccactcaacaagaacaactggcgcttataaaaacaggggcaaattacaatgtgcgaatcttccttttaacgctcacaaagcttaacacagaaggtaatgtatatatcgcaacttttgcccagaggatagcacgggcttttcatcagggatcccgcccttttacttcggatcggtgacagcgaggacccgattttaataaaagggggagggtgatccagggaaaccaaagggggccctctggtctaccccaagagaatacca

SEQ ID NO: 34369 - DNA, 496 bp, Glycine max
  unsure (1)..(496): unsure at all n locations
  Clone ID: PAT_MRT3847_131038C.1
tcttgtaaatatattccaactccaactatctgtctttcctagtttttacatttattatatcctgcttatgtctgcacttaagttaacttccatggtgatttcattaccttttctcatatttcttcatctgttattctaattgtatacttttttttgcttttataatgctattattttttgattcttttttaatttagcaaaacagcgcgaggcagcaacaacaaaagcagaaggggccgcagagacagaancgcagccaggccagcagctccagggtttcaaatggccattgtggcttatgggcccatccgttcacctagcaactggcatggtcccaacatagaggaaaccgataacatcaaactttctcggccccaataaaaccagcctactttccttaatggaactagatgcatatataacctcggtgcagccctattactccacaaggctgaagcttgtatacgaccaaagtctccaacacaaaactgcaaaa

SEQ ID NO: 34370 - DNA, 197 bp, Glycine max
  Clone ID: PAT_MRT3847_131039C.1
ctcactctcactccttcatatattacataatctaactttacttgaaaatttctccttattcgaaaacttctcactacaaaaggatcttactctaatgattactgcagacttccacaatcttcggaataagacccacagtgctcgcctttccctcctcacaaatcctctgcatgcaatttcctaaagattcttgcctt

SEQ ID NO: 34371 - DNA, 316 bp, Glycine max
  unsure (1)..(316): unsure at all n locations
  Clone ID: PAT_MRT3847_13103C.1
aaaaaaaagagtgcccgccggcaccccggaaaaatttccttcttgggctataaaccccgggggtaaaaagagtttataccccaccttaaagggaaaaaaaaaaaaaaaggcggcccgggccgctgaatttccagaggtattcttttaaaacaaaaatttttaacaataattttaacaaaatttntttttctatcttcccatctcaccccctttttttcaaaccttttggccaaaaaaaatggggaccgtttttatcccccaaaaaaaaggggggtgggaagagcggaaactagaagaaaattctcctgtttactaa

SEQ ID NO: 34372 - DNA, 717 bp, Glycine max
  unsure (1)..(717): unsure at all n locations
  Clone ID: PAT_MRT3847_131040C.1
cctctcttctttctttctctttcctttgggagagcactgagataaatggtatccataatgggtccggtgggagggtaccttttcagtgtggaagacttggagaattggcttcttgacactaagtgcgcatatgtgatttctgtcatcaacttgtatattaatttattatgtatatagaggcataaataattaaggctgttttctctccttttttttcccactaggaccctttgctttttcgcatattcccattcattccctctcactttcatatttatatctcataactactcaaagacttgaggcatggattggattctcttttttatttctaggggtatatctgcccttagcattaaccacacaagccatcaatttgaaccttcttgaacccaaattttaagaagcatattatataatgtggaatatttatgaattttcatatggaatgtcctcctttaacatcaagggactagagggattatattattagtgataagattcataagatgagtgcctagtattaatacctttgtcaggaagggggaaagaggactgcgttttattaaattgcaagtccattctaatgtaagatattctattactatcttgnttttataatggatagataaattggttcactcctgtgtcatttgactatgcttattccataactttgattaagactaccgctggggactgatatccatggaacac

SEQ ID NO: 34373 - DNA, 256 bp, Glycine max
  Clone ID: PAT_MRT3847_131041C.1
tctagatactgatgatctgctgtctctgcttgacatcttaccaaataaggttaaggctattataagactgaaagagcttttgacgactaagctacctctcggaactcctcctgtcaaggttgttatcccaatacttcctactatccgggtgcttgtcactattacaaaattcgaggagctttagccagaggaggagtgttcaactcctctctccagcccatcacatgtttatgattccaaatccaatgaatcagat

SEQ ID NO: 34374 - DNA, 236 bp, Glycine max
  Clone ID: PAT_MRT3847_131042C.1
agagtaaagataacccgtggatatcgttaggatttactgctagtattttacaattgaatcttgaaatttcatttatagaaaatgaaataataaattaccacctctggcaacttcctctaaaatcccaaaacgaattgctaaattcttcagtcagatattctcatttctacaccaagaatgtccttgaccattttgtatgtcacgaaagccatttcttttgaagggacaacccgaaa

SEQ ID NO: 34375 - DNA, 178 bp, Glycine max
  Clone ID: PAT_MRT3847_131043C.1
ccacgcgtccggcaaaacttttgaaacccaaaaaagatccacataaagtacaacagaacgctccacgcaatacaaaaaccacagcttcaatcacatccctatctctctttctcgcaaatttctactctctggggttgctatttgagagtcgttagtccaatgagcgatcacttggtgg

SEQ ID NO: 34376 - DNA, 323 bp, Glycine max
  Clone ID: PAT_MRT3847_131044C.1
gctggctgacacgaatgttgtatttgttggtagagcatactgatgcttcaacacgtgacatttcggaagtatttcgacgctagcctctagcatgtatcatggatgatgctaagaatgacttgccttggaaggacttggacaataaacatggagcagacttcaccacatgttcacacattgacgcactatttactatattcacgatgaaacgttgtgatgcggatgataggcctggatgcaccaattgcagctttccttctacatgttctgatgattgtgggcgcacgcctcattgcatactctgctcacaggcatgtaattgc

SEQ ID NO: 34377 - DNA, 511 bp, Glycine max
  Clone ID: PAT_MRT3847_131045C.1
cggtcttttgggcggacgcgtgggcggacgcgtgggcggacgcgtgggcggggctagggtttggctggggacgttcgagatggctgagtggttgatagccccgccgccgaggccactctacaagcagcagtcgtggtcgccggacacgcttcgcgacgaggcctggcagcggcggaaggacaacagccaccacatcagcggcgacaaccaccgctgcagccaccggctgagcaagagtctctcggaggacgacttggacgaactgaaggcgtgcttcgagctcgggttcgggttcgattcgcccgaaatcgacccgaaactatcgaacacaatccccgctttggagttgtaccatgccgttaacaaacagtacaatcaccacagcttgtctaggtcatcctcttcgtcttgccttgtctctgacagcgacattgctagccccaccactatattcaatcctggggatgatttggctgcgaagaagactcgtttgagcaatgggcgcaggtgg

SEQ ID NO: 34378 - DNA, 405 bp, Glycine max
  unsure (1)..(405): unsure at all n locations
  Clone ID: PAT_MRT3847_131046C.1
attagacacactttgctttgcttccgtttcacgtgcattcctgtgctatcttgagctgtcacattatcattttgttcccacttctccctaactgccccatttcatcatccccttaatttaacacctctccatgcttccttcggggtagcaatctcctcttcattcttctttggaaacttgttcctggccacgataacgcctcaagttcaaaatggagtttagcgtcggtagagtttatttcttagatcatttgacggctgaacacaaatatgctggccagttttgtttatttcgtttcaaaattcaagtgcttttgaatagacacaaaaagaccacgtttaactttcaccccttgatattcnnnnnnnnnnnnnnnnnnnnnnnnnnnnnnnnnnnnnnnnnnnn

SEQ ID NO: 34379 - DNA, 610 bp, Glycine max
  Clone ID: PAT_MRT3847_131047C.1
ggaggaaactacccttctttttttccaaaggggtttaagggaagcaacatgatcttttgacctttccaaaaacatggcccttatgttatcatttggggacagtacaagcaaccccctggtcctgaactggaagtcaaacccaatgaaaacccctttttttttttttatgcagggcttacaattttttaatgcttttgaaaaaatgaaaaaagtcctttttccttccaaaattaccctttaaactccccaatttttggtcctaaaggttaaaaaacggtttccacttaactgggatcaacttcctccaagcttgagggttcccatttggggttttgatccttggccaccaacactgttgggacaccttttaaaaaacatgtcggagggaaaacctcagggcaatacaatcctcagttttctttatgccactaagcggggatagttccccgtctttattcccccctgcagaggcacccaaagagaattacttgttggtcaaaaaaagggaaaagggacccccttttccaaggccttggaaagcttcattaccccactcccaactttagggccagggcttgactggggtttttttacctcctcaaggatttca

SEQ ID NO: 34380 - DNA, 244 bp, Glycine max
  Clone ID: PAT_MRT3847_131048C.1
tggaaaccatatccaagcggtttgaagaacttaatgtttgtggcaaagttactctaaagagcaaacttcgggaaattgcctaccctactctaaactctatgtgtcatcctccaaaaaaggtcaaaacaaaaggtgttcaaaagaaaccgatgaccaaacatcaaagatcaacaaagggtgattcgtcttaatggaagtatgttgatgtattacattctatgcaaaatagtaattcttcagtcaa

SEQ ID NO: 34381 - DNA, 881 bp, Glycine max
  Clone ID: PAT_MRT3847_131049C.1
cttgatgaatttgaagagatgaaattttagatttcacagatctaagcacaataatgaaaaacaaacagcattacaaatatattatacaataaattacaacaatatcataccaagtttcaggagtcaagattttgcagttcattacttaaatacaaaaatatgtaaactcctatattaaagaaattatctcgcatttgtagctgccaacaatgctttcttctctgatcagaagcctgcagcacatctttttgccttggagcgatcagcaacaattcccacattcacaataagcatacatatacatagtctgttaatctgttcagaaacctgatgtaagcaattctccaaggacgccacagtagtaatggccctaataagccccaaaatccagtgaagtatccaatccccaagctgatgtataatccctcatagaaaactgaatcatcacctttgactggtggttcttgatgctcttctgttgtctgatctccatccccaggacaagttttgttaagttgttcaccacaaagatcaatgtttccttcaaaacttgaggcatcataggtttcaaaatgtcttcctgatgggattcttcaagatagtgggatgtgagacaagtctaatttttccaaataatcaatttaagaaagaaaaaatggaattctccaaagaatttgatttcctaataattagagtgaaaaaaacgaacctatttattctcacataaatgatatttctccactcaaattgtttcttgatagattcaaagaaactaacccaagcaaatatccgacctcctttaggtatttcacccattaaattgttactggaaaagatcaatgctcttgagctctaactctggattcttgctcgtgccgttc

SEQ ID NO: 34382 - DNA, 372 bp, Glycine max
  Clone ID: PAT_MRT3847_13104C.1
ggctcggaacctttgggctgatttatgtgcctgcttatgtgcttgcatggccgtgagaagatcatagaagggcatggtcgtgagaagatgctggaaggggcctatataatagtaggaaaagtagtaataatacgtaaccttaagaggaaccatccgcggcccttaaggactatatttaaacgacgacgaccaagggtaaaagaattaagtgctaaagaccgttacttctctccaggtcagttacgttccacaacctaattctaagcaacagcagtcttaataaccttacccacatcgttataattcatccatttctctatctccctattaataatataaccgaaccctgagaagattaacatacggcgaacc

SEQ ID NO: 34383 - DNA, 860 bp, Glycine max
  Clone ID: PAT_MRT3847_131050C.1
tacggctgcgagaagacgacagaagggggttattgaagagtagggataatagaatccgtatcgtagcaaaacgcacgagttaggggcggcgatgggaggttcatcggaggatttctcggtggtggtgctggcgtcggacctcggcgtcgatgcgcgacctttcctcgaacacgatcaacagcaagaagaagagaattggcacgactgttcccagtacctctcccccgacgaggacttctccgatctcgatcagttgcaattcctccgcctccaaggctccgacaagaactccaatcgcattctccgcatcgtcggcaagtactttcccgcaactgttgtgagtgcggagcggctcaagcggtatgtgttcaacaaaatttgcagtgagttgcctgaggggcccttctgtattgcttacatgcacagcaccgttcagaaggaggataattcccctggcatcaccatcttgaggtggatctatgaagaacttcctgctgatttcaaggacaggcttcagactgtgtatttcgtccaccctggctttcggtcccggctagtcatcgctactcttggccgctttttcttgagtggagggtaactcatctatcaatgctgaccaaaaaaaaaaaaaactcatctatcaatttttcttaacagaaatgaacatccaaaagcattctatttaggagtatcatttaggtcgtgtttggataaacttctttcaagagaagcagaataaaaaagtaaaatgaataaagcttctataagtttaaatcaatttatgcacttcagccctttgaagaagttagatgaaagagttaatggtaaaattgaagtgcataagttgatttaaattctga

SEQ ID NO: 34384 - DNA, 253 bp, Glycine max
  Clone ID: PAT_MRT3847_131051C.1
aattggttccctgactgaaacgtatccattctcctagtggatcgggattggaaaaatatacactacctaaaaaaaaaaaaaaaaaaaaaaaaaaaaataaaaataaaaaaataaaaaaaaaaaaaaaaaaatctgaattgagttaaatgagcatgtgcggcggtgcgattattttagactttataaaagaaggaaccgccagatgggcaaagataaattttcaacaacatcatttggtataatattatgaaaa

SEQ ID NO: 34385 - DNA, 586 bp, Glycine max
  unsure (1)..(586): unsure at all n locations
  Clone ID: PAT_MRT3847_131052C.1
gcacgagcctaaatcctaatgaataaattgtactgggagcatcaaaatgaaagttactttgtaataaaaaaaaaaaaaaaaaaaaaaaaaaaaaaaaaaaaaaaaaaaaaaaaaaaaaaaaaaaaaaaaaaaaaaaaaaaaaaaaaaaaaaaaaaaaaaaaaaaaaaaacttgggggggggcccggnccccaattcccccttaaggggagtatattacccccctttcttggccggtttttaaaaaaggtgggatgggaaaaaccctggggttccccaatttaaatccttttgaaaaaaatccctttttcccaggtggggtaaaaagaaaaaggccccccccgatcccccttcccaaaagttggccaaccttaatgggaaatgggacccccccttaaaggggcatttaaacccgggggggtggggggttacccccaagggaaccctttactttgccaggcgccttagccccgcttcttttgtttttttcctttccttttttcgccgtgtgggcggtttttccccggaaattttaaatagggggggtctccctttttagggggttctccccntattttttataataga

SEQ ID NO: 34386 - DNA, 400 bp, Glycine max
  Clone ID: PAT_MRT3847_131053C.1
cgtccaagcaaacccacattcattctgccatttttccattcacacacaaaaattcttatcaagtatgttgggagccaaaaaagctgagctacatccccagaacacattgcttcaaatcaagcatgatgacaagttcttcatcattcttttctcaaaggaaggttccatgtccaaaccctctttcataatggctgtgtcagtcccttttgtgtgtcagtctcatcctgtcaccctcaaatacactttctctgatgacactcttccacccctcactccttcaccttcctattttgttaactccaacataatatacatgccactaaagaaactctcaacatccaacatcttcttatcactctttccaaaactaaatctcaagaaaaaaaacattcttttaccc

SEQ ID NO: 34387 - DNA, 436 bp, Glycine max
  Clone ID: PAT_MRT3847_131054C.1
ggggttgggaacatgatatggcaatatcgaagtactataaattccaaagtggctttttttgctttcgtccccaagctatctcaatcaaaatgatctgatttaatgaataatagaactcataatacctgaattatcttgatgtagatcagcaaaaatgtggggaaacaatatcccttctttgatttatgtccataattctcttctctcccatgtttgggcatagtaggcctgctcaaagcatatctacattcttgcagtcagaacaaagtttgcgctctaagagacgctgcttgctatctatggtgctgtcataatgactcgcctcacggtgaagcaaaaatttatctgcaccatctctgaccacctgccaaattaatgggggaaggtgattatacatccctagcggactgcttaccctgcaaaattctgcttctcc

SEQ ID NO: 34388 - DNA, 349 bp, Glycine max
  Clone ID: PAT_MRT3847_131055C.1
aaaaggacactgatgggcgtgataactaaaaaaaaaaaaaaagggcagcgctaaatgcggattaccgcccacggactatatcggaccgctacttggatgcgtacgacgtttccatataatgagctttcataaaggttggggtcgtcatgggaataggtgcttcctgggagcaaacataatcctcttaaagttctacaaagtatacaacgccgacgcataaacgggccagcctacggtgcacaggggggaggctaacaaagattaaatgattcgaaccaactgcccggtacccagactgtaaaccaggtgtgccaggagcactaacgaattgtcataaactacgcgagag

SEQ ID NO: 34389 - DNA, 389 bp, Glycine max
  Clone ID: PAT_MRT3847_131056C.1
cggaggctagaacacgccacatataccacatgaatgaccactcgtatttgaagacctggacttacattttcggggcgcgctgttcctccacagtgggggaagattcatttcacaactacaagagtctggcctttccttgtgcttgctatgaccacttactcatctatgcacataaccatttcacccatttctcatggccaggttgaaaatgtgactgcactggcccaaaaaaattgttatcgcattacataatcgccacccacattctgtacactttcgactgtcacgccgtcacagtggaaatcatgcctgcaatgtgcaaaccttaaagttcacatatatctatctttatgctactctgtatgtgtacacactcacaataccatctg

SEQ ID NO: 34390 - DNA, 666 bp, Glycine max
  unsure (1)..(666): unsure at all n locations
  Clone ID: PAT_MRT3847_131057C.1
aattcggctcgagctcgagccgattcggctcgagtacggctgcgagaagacgacagaagggggaggagagagaagtgtatctggggaaaaaaaacctcgcgagtcgctgtaaaagaaggcacgcttatccgttttatggtgaaagcaaatttgttatcccaaagaattaaaaataagaaagttcacacattgttctaccgattgaaagcacgttgaataaacgcttttaggatttaaagggggaaacttgaagtgccattggataagtggtggagtttgtttgtttgattgattttgcaaatcagttgaatgataggatccccaatcacccaacaagatcaggtgtgattgaaggaaaaaggggcataggggaagttgaagtgaaaaatgctgagtgatagagatgggaaagaggacatggacaggcttagtgacttgcctgaccttgttttgcttcatataatgaaatttatgagcatgaaacatgctgttcagacttgtgtcttgtctacaagatggaaggaactgtggaaacgtctctcngaattggcattgcattcctcagattttaccaaccttgcacatttcagcaaatttttatcatgggttctgttgaatcgagatagctccatttccctgcatagtctaaatttgaggcgtaaaggc

SEQ ID NO: 34391 - DNA, 209 bp, Glycine max
  Clone ID: PAT_MRT3847_131058C.1
gacgatgggagcatggctacattgaccacttcattgcaagcactatggaaaacactgctttcatacatcggtggctacccttatggctctcagccaccactctccccaacaagacgctgaggctgtcaccaaggcttgagaaggatgggggtccgaagagaagcctgtgatagtaatactgcttcatcgaactgcctatcacaggcagt

SEQ ID NO: 34392 - DNA, 203 bp, Glycine max
  Clone ID: PAT_MRT3847_131059C.1
cttcctttttttttttttttaaactattacaattttatttccactcccccaaggccccaaagagcccaaggggggacattccaaaatttaatgtgaccccctttgctttttatcaataacttatgaaactaaacttggttaaaacttcatcccaaaaattctacttcttttttgacagaaatcctcattgtgggtcttcccca

SEQ ID NO: 34393 - DNA, 453 bp, Glycine max
  unsure (1)..(453): unsure at all n locations
  Clone ID: PAT_MRT3847_13105C.1
ccaaaaacacagagattagaattcaggcgagaaggggatcaaggcaaagaagaataatagaagtatcaaaatggcaagccaaaaatgtatggaaatggaaggagaaatcaagagcttaatgaaggtgtcactgccttcttcatcacttggctcaccaacttcaaactcctcctcttcacttttgatttgggccctctcacaccaaactcaaactcccttcttcacttcctctcttttgcatgcctcccaattagactaacccccttaaattcaaaatcaaaatcaaaatcaaaattaaaattgcatttcattatttttccaatcaaggtctttcttttcagtctctcactcatgagccttaaagatcaatacaaacaaaaacttcaccctacaattattttgggcatatattgtacccttctgtatcttttaatggatngttgtttgggacta

SEQ ID NO: 34394 - DNA, 150 bp, Glycine max
  Clone ID: PAT_MRT3847_131060C.1
ccattctgaaggattgtcatgttcttgttctgtagtaattccaaatcacctactactccattctggagtatggagtagtaggtgatttggaattactacagaacgagagcgacattccttctgctcgagccgatactaagtgcatatgag

SEQ ID NO: 34395 - DNA, 629 bp, Glycine max
  Clone ID: PAT_MRT3847_131061C.1
cccgcgtccgacccgcctcccgctactttccctctgccgaaaacctagctaccccagttagtgcactcatcaaaccctacccctaatccgcatccgcaccactgcgatcaaaaccacggagcccataagctaccattgcttatttactactgaattaacctatcaacttcgtttggtatctaccatttctttctggattcgaacattttccggacaaaattagcaaactattagtatagtgcaaagcaaaccgactactgtatgcacctgaggatacagcgccagagcaaaaaaaatgctgtgacgacatcggccaaatacgtggcccgaaactagaggaacctgttcgcccgaggagaaggcctaatactgaccccgctggtgagacccaagggtcgagagactggagggaacggagcattgggacccgtgaagcacagcacctacgacgacgtaaccgaatccgagctgcccctatcagtgccacggaagggctaatgagaggaatggaagtgagtgacacaagatctgccctaaaagctccagcttgtggggcaactctacggcggatgatgcacgcgctcggacagcccatggataagttaaggcctgaggatactcgcacaaca

SEQ ID NO: 34396 - DNA, 131 bp, Glycine max
  Clone ID: PAT_MRT3847_131062C.1
cgtagacacctaagcacccagagactatgaacgagctttatctatgtacatatacaacaatgggcacggttaaatatgtagtttaggacggatttcatcatcgtctcacagttaagcatctttttcgacat

SEQ ID NO: 34397 - DNA, 375 bp, Glycine max
  Clone ID: PAT_MRT3847_131063C.1
atcatccatgctcagacgggtggacgacaataacagctattctcaggagaggtgccaccatggctacgacacgagtaaacgttacgaggaagactgagccgagggagacccgacccgtaattagtgagcctaactcaatggtaagggaagacgacaatcgcacctaggacacaacaacagaggaaaatgagaaccaggtgaaagttgacagtgatgtcaaacatgggacatcacaagacgcatggatctctaggccactggctatgaataaatgggaccactgaagtttgagcagcaacacgccaaccaagacagccccgagggttaacaggcctagctagctccgtacagattaaatacttcctgaaaaaggat

SEQ ID NO: 34398 - DNA, 454 bp, Glycine max
  Clone ID: PAT_MRT3847_131064C.1
aaatgacttatatttgatcaatgttgtggtggacatgctgactgatgttgaggtaatgttttgtaaagcatgttgaaagcattattgctatatctgttaccctcaacttatatcttatgcaggcatgttccaaggtccatcttcctatccttgactacgatgatccttcccaacttgaacctgtaagttgacactgtgacaatgttttccaaatctaatatgtgtcggtagaatctcattgaaaaacttcgctacctctattttcaaaattaagctattgatcgatgtttgagttatgcagcacacttgggacctcacagcagatcaaggttttcttgtggacaccccaataacaccaacaaagcggatgacatctgatgaatgtgatgatgaaccccaaagctctcaaatttcacccgcccaactttcatctaacaaattaacatgacatgat

SEQ ID NO: 34399 - DNA, 414 bp, Glycine max
  Clone ID: PAT_MRT3847_131065C.1
tttttgtggcttttgggttcagatgttgtcgtcattgatcctcccaggaaaggactagatgcatctcttattgatgcattgaagaatatatcatcagtcgagcgtaaagccttttcatcttctggaagctcaaactcatcccaggaagagaagagaccttgggttttacgtgctaaagaagattcagtccaaattggaagcaaacctccaactaacatagctcaatcagtgccacaaacccttatttatataagttgcggatgggaaagttttaaagaggactgcaagtcattgttgtctagtaaggcatggtatttggaaaaagctcatggttttaatttctttcctggcacccagagcattgaagttctagcagtgttcaagaggggccctcagaaaaagaaacaaggaaaa

SEQ ID NO: 34400 - DNA, 292 bp, Glycine max
  Clone ID: PAT_MRT3847_131066C.1
tcccaacactttctctaacattatccatatagatgctgaaccttatacttacgattcagttaaatttctaagaagcacatcctaacataccttctctttaagacacttatacatatacttattatatcaatatataataatttcattaaatctaacttaattacctgttacttttttaaaaacaattattttataaacaatctatatactattttttattttatttgaattttctaaattttataactttatctacttaattaccatatttaataatatctttattataaaa

SEQ ID NO: 34401 - DNA, 575 bp, Glycine max
  Clone ID: PAT_MRT3847_131067C.1
aagattctcacatggtcactttccttttcgggttgtctacaggttgctttgtatccttgttttgtgtatatgcaatcttggcacatttgtgcggtatattctcctctagtaacgagccagcttatatggaaacagtctaccccgttttcagtgtgtttacattgttaagcctgcacttgtttatgtatggatgcaacctgttcatgtggaagaatacaagaatcaattacaatttcatatttgaattttcaccaagcacagcactcaagcacagagatgcatttctgataagcactaccttaatgacaactgtgattggggcaatggtcatacatcttcttctaagggctgcaaacttttctcctaccgaaattgatgccattcctggaattcttcttctgtttttcatagcactgctcatttgcccatttgacattttttatcgcccaacacgttactgcttcatccgtgttatttgcaacatagtatgctctcccttttataagggtctgctagtaaaactttttatggctgaccaactaactagccagattccattgctaaagcatttggaa

SEQ ID NO: 34402 - DNA, 372 bp, Glycine max
  Clone ID: PAT_MRT3847_131068C.1
ggaattcggacgaggtatatggcatcattgattgaatatggtctgtgtcttggtgatgttgaaatggtatttggtccaggtgacatttcgtggaccttaggagctgcattgattgaagggaaatttctgtggttaaatagtacaagacacaaatcccatgttattatttcaactttaaagaatgtcaaggtcatgtcttctccaacttttctctttgctgtacttctattgcttttattgattgtttattttagtcaagttaagctaccaatgccaagcaggagggcttctgctcctggctcatctttgccatcttatactcatgtaagacgtcgatctaaccaataatattccaatgttcttgtaaaaaaa

SEQ ID NO: 34403 - DNA, 515 bp, Glycine max
  Clone ID: PAT_MRT3847_131069C.1
tttatttttatatatcactgccaaaatttcttcttcttcttcttcttcttcttcttctgcttctctttctgggttttgttctctttgctttgtccacaaatggttacaccaaagcatggccacagattcttcaagttccgggcactgtttctcataaccacttcttccacttattccttcttcttcttgtgaatgccccaaactaaccctttaccaaagagccacacgtgccatatatgccttcaagattcttggcacacaaagggcagtgacaggaacatgtcagtttcataggagaaattagaattgttatccgtttattccattcttctcacctgtcttatcgtgtcaaatcttgcagcctctactccccccctctctctctctcatacacacacttttagttttcaaaaaacaacaaacaaaactatatcaaatggttgcttaggactatgatcccttgacatgcgcgggtggtgtgaaaatgggtagtataatgtactgtgttgatcact

SEQ ID NO: 34404 - DNA, 535 bp, Glycine max
  unsure (1)..(535): unsure at all n locations
  Clone ID: PAT_MRT3847_13106C.1
ggctcgagcaaaaacacagagattagaattcattttagaagtttatcaaggcaaagaagaataatggaagtatgaaaatggcaagccaaaaatgtatggaaatggaaggagaaatcaagagcttaatgaaggtatggatttcaatcctagcctccctatgttactgttatttcatatcatcaagggtacccaaaggcttgttgaggtttttgaccctctccccagtgttgtacctattcaccatcctacctcttcaactcaccactgtcctcccaacaggtgtcactgccttcttcatcacttggctcaccaacttcaaactcctcctcttcactttntgattgggccctctcacaccaaactcaaactcccttcttcacttcctctcttttgcatgcctcccaattagactaacccccttaaattcaaatcaaaatcaaaatcaaaattaaattgcattttattattttttcaatcaaggtctttcttttcagtctctcactcatgagccttaaagatcaatacaaacaaaaac

SEQ ID NO: 34405 - DNA, 365 bp, Glycine max
  Clone ID: PAT_MRT3847_131070C.1
aacccccaaaggggaaacaagggaattacaaattaccccccttggctaaacaaggaaaaaccttctgcagggattcagtaaaaaacaaaaaacaagttctggaaaacaagtctgaaatccttcaaacaaaaataaaacaacccccccgcaaatgggcccctaactcaccaaacggaacatgggccttaaaaggtctcatttgaaaatttgctacaaccaccaaaaattggaccgaaaaccggtccccccgggtttgggccctgggttttgaaaaaacccccccccccttcaactaatggggggttgggccctgccccgacggccgggaaaagggccccccctttaaccccacccattttcggggc

SEQ ID NO: 34406 - DNA, 231 bp, Glycine max
  Clone ID: PAT_MRT3847_131071C.1
acggctgcgagaagacgacagaagggctataccccatcgagatatgaaggcacggtagaatttgcttaaaattaaacaaactcttatttatatacttttgtaaaaaatgcttgatgttagaccttacaacaatatattatacattaattaattgcacaatagcttgtagttgaagatattcgttcattatttcagtgtaacacgattcttagattaaggatatgagattga

SEQ ID NO: 34407 - DNA, 611 bp, Glycine max
  unsure (1)..(611): unsure at all n locations
  Clone ID: PAT_MRT3847_131072C.1
ggaaccctcgnaggcccgccgccccccccctttgggggttangngggagaggagatgtatatgacaaagacgtncatnccgggggcaacctgggaagagaaacaacaccctgtgtttgcgacggtaccgttaatttcgntgtgatnttatttttggttgattttgtgaaatactatttttgagaacacacagcatttgatgttttgagtttgaaattcgagttttgtttgatttaatgatgtttttgtataagaaaaataaaggaagaaggtggaagagaaatgttgagaagagaaaaggaattgaaaatgggaggagaaaaaaaaaaagggggttttggggttgaggtttgggttttttttggggggggtaagtggggggttggtggggatgtggggcttaggtgggggtgtgggggggtgggtgtgggggtggggggggggggggggggggggtgggtggaggggggggtgtggggggggggggggggggggagaggggggggggggggggggggggggggaaggtgaggagtggggtgggggggggtgggggggggtggggggagtggggggtgaggggggtgggtgtggggagaggggggggggggg

SEQ ID NO: 34408 - DNA, 300 bp, Glycine max
  Clone ID: PAT_MRT3847_131073C.1
aacacaaatgataacatactctctccgctgccttcaacaaccctggctcatggcactgtcaccgtgggctctatctatcacctgcgctgctcctagctgctaaatccatcttcgcacacctaccacgctcttcattcgcttgacctcaacattcaccagcacctctactaccccgaaaaagagactctcatcattcatgcatcaccctaccaaggcactatacaatactataaagcctatagccacacagaccaaatattccagcgcctgatgactagccgtcggttaccactcccctat

SEQ ID NO: 34409 - DNA, 323 bp, Glycine max
  Clone ID: PAT_MRT3847_131074C.1
taacaacaactttttttttttctcccctcctccaaaaccttcggtcccttaaaaaccagaaggctgccaaccaatcctcaacacacaatacattgaatggttctacgttaacacctacaccaaacaatcacaatgggataaactcacctaacccttctaccctccatccttaaactctgcgctctcaccatcagactgacccccagcatacgatcactccaccagtcaaaacttttttccttaaaatacgtgccccttatgaacaaataatccttactacaattattgttattttttcaacatcacctaagacaaacattttt

SEQ ID NO: 34410 - DNA, 617 bp, Glycine max
  Clone ID: PAT_MRT3847_131075C.1
aatcgtttttgccgtatgtgaagttctaccgaagaccatacgacgaaatggtgtataggtcaaagatgcggcccccactcggcggcctaatctccattgtttcccctcatatcacaagacgccatgtttccgtttctcagcgtttctaatattttatttaattccaaaaatccttaatctaaatactactacaccgcaatcaacgcctccaattaccttaccattgccatttcccccccttcttgctcagtacatagtattagtatatttgaatgtgtactattattattactactgttaagtagacattaactcgttttttgatcctcaatttcaatttccaagttccctcgtgcgtgcaaggtggggtatgaaacagcgtgcagtatgttaatttatttttggtgtttgaagaggcaatattggaagtaattgcatgggaagaaggtagcgtggtcgaaacgacgagcactagaagtgcacattggtgggaaatagtaatagcagtagtaatggaatgaatacaagtagaccaagattgggaaagcgttgaaaatgaaaagacaacgttgatctttgtaattttcctttattttaatactactaaagttttgggg

SEQ ID NO: 34411 - DNA, 223 bp, Glycine max
  Clone ID: PAT_MRT3847_131076C.1
gggaagtcctggagggattatgcaggtggggaatctattctcaatttccaaattagcttgtgctttcctagttaagaacttatgatcatagccagatgaagtcattattttttattatagaaggccaatagtcatggtgtagtaatcttctgttgctttaaattagttaatttagtctacttttttatgccacacctttgtatttgaagttcgttaataagac

SEQ ID NO: 34412 - DNA, 527 bp, Glycine max
  Clone ID: PAT_MRT3847_131077C.1
cttgaatcttcgttatccttctttttttctccttgaacccgaatattcactatggcagaagaagggggtctggtagaattctggcccaggccctttgggaagaagggcaagaatgcacttgctgaaaaggggattaaatatgaatcccaagaagaagacctggaaaacaagaaccctttgcttctcaaaaagaacccgggtcacaagaaaatcccgggtcttattcaccatggcaaacccatttgggaatctcttggtggtggtcaataccttgaagaaggccggaatgaccgaaatcccttggtggcttctgacccttaccaaagagctcaagctataaatctgggctgactttgttgacacataagatatttgagcttggaagaaagaattggacactcaaagggagaagagaaagaagctgtcacaaaggagatcatataggcccttaaattattggaggaacacgctgtgagacacgacacatatttggaggagacgatctatgtgtttgtggatatagcact

SEQ ID NO: 34413 - DNA, 1080 bp, Glycine max
  Clone ID: PAT_MRT3847_131078C.1
attggcttttcatttttcctccatctcttcttctactgccctctctcctttctcctctccttattgtgaaccaaaaacatgaatagaaatgcatacaacaaggaggaaaaaggatgttgctatttccacccaaaacaagtggttgttggagtgtgccccttgtgcttgaatgagaggctcctcatactggctgcaaatcaagaccatcatcaccatcacaggcttcaaagttccactcagggaaggcttcagcttccattcacaagatctttgctcttggttctcttttcactcgccaccaattaaaatctcacaactactatatgatcaagatgatgcctcccaagagtcattcatctcaatcaaatttgaagaaaatggagtagcctcatgggagaagagcaccagcaccaatgccatctcaaatatctccaacatgaaggtgtgtgtagagagccaggtcctaaacaaggacgccaaggagagcaagagcgtggtagagcatggcaagtcaaataacgcgtttagatggcgaaagcgtattggccgtttggtccactttatcccatggaagagctctaataagggtgggggtgtggggtcaaaggggaggggtgaaggccaattgctaaggattggatgaccacgctgacaaagagcaagaccgtggaacacaagggttaaaaaagaaagtcacaccaacacttgcttttctctccctctcacccttttgtaggattggggttaccacttactacttactacttactactactactcagtgtggatgtgaagttataacaaacatagtataatactatctagaagggggtagagtaaaaaatagctttgttgattgatctcttcaaaatgtgctttagtctctcgcacccttttgtgggattggggttaccacttactacttactacaccactgcggggaggtgctgttatttcattcttgccatgtgtcttttttttttggtaattttttttctagttgttatggtatggacagtacaggctagctgtaaatgagataacatttgggtgttcctttccatacggcactgcaaaaaa

SEQ ID NO: 34414 - DNA, 1676 bp, Glycine max
  Clone ID: PAT_MRT3847_131079C.1
ctcgagccgaatcggctcgaggggcgctggggtgatgtatgtaatatatagggtaacataaaaatagcgagcgcaaccctctctcccagtctcggaagaagaaatgaagcagctgccaacgctgctgatgaagtccctctcactctcagtgtgttctttgccagcagcagcttccacaaccacccttcaacaaattgctctccatcaacccaaaggtgttgcaaaggttgtacttaaaaaggggaagacacaactctttaaggatggcaacccaatggtgtacagtggagctgttgatagaataattgggaggccacctcccaagaccggggatgttgttctggtagcagatgggactgagaaaccaattggatggggcatgtacaactcagtttctatgttctgtgttcggctcatgcagcttgaagatgaagctactagcgattcatcttgtgcattgaatatggagaaactgattgaaacaagaattgatgcagctgttgaaatgcgtagaaggttgggtcttccatcagtccacaccaatgcataccgtctaatcaatagtgagggtgacagactatcaggattgataattgacgtctttggaggtgttgctgtagtagcgtcatctgctgcttgggttgagaaatacaaatcagagatagaggcatgcatcaagaaaatcaactatatcaatcatgtaaattggaggccatctgttgatattttaaaggaagatggagttaatgaatatgatttaaacaaaatgcattcatctacatgtcctgaaagaacaaagattgtggaaaatgaaattgtatacacaatttcattgaagggccagaagacgggattctatgcagatcagcgtgagaaccagccagtttatatcaagaatttcagatggtcaaaaggttcttgatatttgctgctatacgtccggttttgctctaaatgctgtgcgtggaggtgctctaaatgtcaccggtattgacacatcaccgctagctttggagcttgctaaagaaaatgttgtactcaacaacattgatcctggaagaatatcctttttgagggaagatgctactgaatttatgaagggtgctctcttgagaaatgaatcctgggatattgtcatcattgatcctcctaaactggcaccaacaaaaaaggttctacatagtgcttctggtatgtacaggaatttgaattcacttgctatgcaacttacaaaaagaggtggtcttctgatgacatgttcctgttctggagctgtgacccaaagtgggatattcatgcgcatccttcagggtgcagcatctatggcgggtaggagaatcactgtcctcagacaggctggagcagcttgtgatcaccctatcgatccatcatacccagaaggagcatatctaaccaacattctattgcgagtttcatgagtattgtatttgggggattttcattcatttaagttttttcccatgtaattatatattttaatggaactttggaaagtgccctttcaccgaattagtgaagaaaatgtcttacacatcagttgaaagaaaaaaatgggcataggtttgcttatttaattaaaaattattgtcaaactatattttaccactgaaagtgaaagctaacatctcaaatacaattgggtggctcctctagcc

SEQ ID NO: 34415 - DNA, 350 bp, Glycine max
  Clone ID: PAT_MRT3847_13107C.1
aaagcttacagcttgattatcattatacaattacagtgcaaagagtttttacaaccttatcgttctcctaatgcaaatcagccatacatagacaaatgtactacagtagtcagacaaccctgtaggctgtaggactcttccagctgcatcccattccaaattttgtgaaatccagaaatcaaagacaaaggcaacactggaagtctgcaattctaaatgaaatattaataataaggggccattaattttcaagtagcccatatctagagtgatgacagaaagacttgggtagcttgttcttggaggacaactgatttagatggcattcgaccttcctctgattcatgcat

SEQ ID NO: 34416 - DNA, 705 bp, Glycine max
  unsure (1)..(705): unsure at all n locations
  Clone ID: PAT_MRT3847_131080C.1
tgggtcttccatcagtccacaccaatgcataccgtctaatcaatagtgagggtgacagactatcaggattgataattgacgtctttggaggtgttgctgtagtagcgtcatctgctgcttgggttgagaaatacaaatcagagatagaggcatgcatcatgaaaatcaactatatcaatcatgtacattggaggccatttgtagatattttaaaggaagatggagttaatgaatctgatttaaacaaaatgcattcatctacatgtcctgaaagaacaaagtgtgggtgggtgggggcttactacctactacagttggggtggaattacactcgcagaaatgtgaaatttactgatttgctgattttggggcatgttgttcccatctgccagattgtggaaaatgaaattgtatacacaatttcattgaagggccagaagacgggattctatgcagatcagcgtgagaaccgccagtttatatcaagaatttcagatggtcaaaaggttcttgatatttgctgctatagtggcggttttgctctanatgctgtgcgtggaggtgctctaaatgtcaccggtattgacacatcaccgctagctttggagcttgctaaagaaaatgttgtcctcaacaacattgaacctggaagaatatccttttttgagggaagatgctactgaatttatgaagggtgctctcttg

SEQ ID NO: 34417 - DNA, 136 bp, Glycine max
  Clone ID: PAT_MRT3847_131081C.1
atcgattgaaataactacagggatggtcgcgatgctcccatgaatgctatcaacaacccacgaactgagtacttcgtgtgcttgatatcaacctcggctggaggccttggaattaatcttagctacatccgatgtt

SEQ ID NO: 34418 - DNA, 554 bp, Glycine max
  unsure (1)..(554): unsure at all n locations
  Clone ID: PAT_MRT3847_131082C.1
gttttcaggaagaaaaaaaacataattcaaaaggctaatataaagaacctgaaatagaagtactctttatttgaatatttgattacttgacttctcaggaagacctgcttcctgatgaaatggagctgcacgtctattgagctcggtttctctaaacaaggaagggcatttgttcttttgtcattgcccttctgcatgaaataattaatctgattctgatcttctaagctcttgcgaggggaaagatataaatgtaggcttagttataacaccacagactagcatagtttaatgtgacctcgtgccgaattcggcaccagaaaaggagagcaggtgttttgagtgttactaagtttcaggatgtcttcaatgctgcttcaaagtccattcatgattttgcaaaaccgctgattagcttgatgaaagcttcnggctgggaccttgatagggcagcaagttccattgagaatggtgctgcttattccaaacggtgtgacangacgtatgnctttgaggcctacattgcgcgcagaatggttcatgggattgtgtta

SEQ ID NO: 34419 - DNA, 225 bp, Glycine max
  Clone ID: PAT_MRT3847_131083C.1
acacaatgttcaagaaatttcagggtgcaatgcagatagtagctacagcagaaactatggtattatatttgggtttctcttcatagtttataaacttgatatatataaatatctgactttgacaagctcatcaattttagatatatatgaacatcgatgactcttcagagaattactggcttcgtttattgctcagagaatgggcacaattctgcatctttttgt

SEQ ID NO: 34420 - DNA, 168 bp, Glycine max
  Clone ID: PAT_MRT3847_131084C.1
ggccttctgaataagcatatagccgataacaggggatctcgccatggggggcagatttaacctgcttactaacggacgcattgcggctgatgccagtgcctcccagagcatcgaatgttatcaaacctaaccctcgatacgagatatcggcacttacagtttacctgg

SEQ ID NO: 34421 - DNA, 795 bp, Glycine max
  Clone ID: PAT_MRT3847_131085C.1
ggccccatcttgcacacacacacgtactagtactacacatttacacttttttccttcgttaaaaaatccctttcctgttgccctgggttgttgtagctacccttcagagcaaagaaagagagaaaaaaatgtctcttccaagacccagtgagggtaaagccccttctcagctgaaagaaggagtagcacctgctgctgctgcagcctcatcctcttcttcatggaataataggctacacactttccctcctttgtctctacacaacaagagtagcaaaattgaagacagtgatgaagatatgttcacagttcctgatgtggaaaccacaccagttagtgttcattctgcagcgactcttcaaaatagtaaccttactcaacgtaatgtgacagaccctcaatttcaaactggctttcctggaaagcgccgcaggggaagaaaccctgcagataaggaacatagacgcctcaagaggttgttgcgaaacagggtctctgcccaacaagcccgcgaaagagagaaggtttatgtgaatgacttggaatcaagagctaaagagttgcaagataaaaacgctatcttagaagaacgtatctctactttaatcaatgagaacaccatgctgcggaaggttcttatgaacgcgaggccaaaaactgatgatagcattgaacaaaagcaagaccagttaagtaagagctaacaagcaaagctagagggtgcgtcaaagtaaggcattcaagagatgcatttatgatttattttagacactagaaattgtaaatttataaata

SEQ ID NO: 34422 - DNA, 127 bp, Glycine max
  Clone ID: PAT_MRT3847_131086C.1
ccccaccgaagaagccctacaaatatccatcaccttccccaccagttgacacctaccctccccatggtgccaccccagtttaccactttcctgcaccaccaccatacgagaagccttacgagggcaa

SEQ ID NO: 34423 - DNA, 1550 bp, Glycine max
  Clone ID: PAT_MRT3847_131087C.1
cgtggcagggtgcttgatgagacgcaaatcagagtcatccactcaacagggccattcatggctgcctttacccctttatggaaactctcttaccatgacaaagaattcaacaatttcacagaagagtgtcactgcaagctgcatttctttagcttcatcaaatcttggacgattcttcagtttccaagaaatcctagatgctagcaacaaatttgatgagaagctacttcttggtgtcggtggttttggaagggtttacaagggaacgcttgaagatgggaccaatgtagctgttaaaaggggtaatccgagatccgagcaaggccttgctgaattccggacagaaattgaaatgttgtccaagcttcgccattgtcatcttgtgtccctcattggttattgcgatgagaggtcagaaatgattcttgtgtatgaatacatggctaatggacccctccggagtcatttgtatggtacggacctgccacctctatcatggaagcagcggcttgagatttgcattggagcagcaagaggccttcattatctccacactggcgcagctcaaagcattattcatcgagatgtaaagacaacaaatatcctcttagatgagaactttgttgctaaagttgccgattttggcctctccaagactggtccttctctcgatcaaacccatgtgagtactgctgttaagggtagttttggttatcttgatcctgaatacttcagaaggcaacagcttactgagaaatcagatgtgtattcatttggggtggtgttaatggaagtgttatgcacaaggccagccttgaaccctgtccttccaagggagcaggttaacatagctgagtgggcaatgacctggcagaaaaagggtatgcttgatcaaatcatggatcaaaatcttgttggcaaggtgaatcctgcttcccttaagaagtttggggagacagccgagaagtgcttggctgagcatggcgtggaccggccgtcaatgggagatgttttgtggaatcttgaatatgcattgcagcttcaggaagacctcatcggcactcatggagcctgaagataacagcacaaaccacatcactggaattcagttgacaccccttgaccattttgataacagtgtgagtatgattgatgggggcaactcttgcactgatgatgatacagaagatgttgccacaagtgcagtgttctcacaattggtaaatcctcgcggaagataagctcttgtgtatcaacaattctggccaaaagccatcaaagtaagcggctattctggtctgattggtgaatgaaggctatttcttatttagttactgcttttataatccattttttcaccacaatcaatttactttgtaatatacttgagtgatagtgatgggcaccattaagctggttagtaattgcatgcaaggtgccccataaaattctgttgtactaaatataaaccaattaggagttctgctcctcaagttgttcttacaccttacaatatatgaaggttataagttctttcttctgaacatgaa

SEQ ID NO: 34424 - DNA, 498 bp, Glycine max
  unsure (1)..(498): unsure at all n locations
  Clone ID: PAT_MRT3847_131088C.1
gnnccncncnnnnnnnnnncnngccgaacgccaatgccagagcaccccnaaaaggcngaacaccaccccacaaaataaaccanaatccaaaacaacccacaacaacccactggccgaatatgatgagcccgcanaaaagatccacannaaccaattcttgacctaacccaacaagccaacacacanacaccatcatatcaaccagngaaactgactcccancaggnaagacaacccnaagaancncnaangaanaccacaaanccaanngcncattctactgcncancnanccatcatgcctacaccngccnccnnnnncncnaaagncnncncttcctccnnagctcgcgagcaccacagccnnanctcanacnacnaccacnaccagnccctgnacccgaaagccccacccnnaanncccacccgcctcccccccccnccngcgccgccccctgcgcaaaacccaaatctcttcccaaacgaaagagtagcaagac

SEQ ID NO: 34425 - DNA, 348 bp, Glycine max
  Clone ID: PAT_MRT3847_131089C.1
ctcaaaattcgcgtcgaggtgatataaaacccttccactgttcttacttctcccacggtttttacaattatgtatcatacctataccccagcaaactttcttatagcatgcggttcttacatcatctcaatctcttatactatatccagcaaccttccattcttctctttacaagttccacccgcccttacaactctcttttctttcacttcaaagctaatcaatactatcccatatactcctttctttttaataatctatcccctaaaatatcctcacctcccatatactttttttatttaacaacccacaatccacattctttcccatcttcattatattatcctt

SEQ ID NO: 34426 - DNA, 891 bp, Glycine max
  Clone ID: PAT_MRT3847_13108C.1
ccacgcgtccgcaaaacgaaaattaaattaagtgcattactatttcgcaccacactttgaatggaactcttcactcttcagctagctctatgacttaatctagcatcttcaagtgtagtgtcagagttagaagctggtgaaatttatgtgcaggatttacatattccatgaacaaacatagccaccataactcaaaggttagaagtcctcaaagaagaccttagtgccagggttacaagtcccgaaacaggccaaccaatcagccacaacatttcctacacgaaggatgtggagaaaatcaacttgttcctgcatttctctgattgtatcaacctgcatgcaataagcaactttggtgcacagattgttacctggatgaagggggttgaacaaattggtgcatttgtggcttcaaggggtgactttagctttgataatcagcagagatattcaagaactaaagcatacaattcacaccaccaaagctggtatgcagttcctacaaatgaagtttcatgaggagttctccaatctagagtgtcgttgtaggtacgtcataatcatgcttggaagtgatatttgtaagaatgatgccacaaccatcattctgccaattttggtggtaacatttcattttcatttccttttatgtttcgtatttgtttgtatgtactcattatacttggctgcaatttctcttttcaaatttttttaggcggctgtattttttgcttttggagcttttaatagattctaaacaaaatgagtagaatggacattgaagtggtacattgcttggatttgtaaaggaggctgagattgtttatcagctattaatagattaattacagcactaacaactaggataaatatatttttaattttttgttc

SEQ ID NO: 34427 - DNA, 606 bp, Glycine max
  unsure (1)..(606): unsure at all n locations
  Clone ID: PAT_MRT3847_131090C.1
ctttttctatggaacaccttcacaaaacatggtagcctagactggaccatcaccctcttctcactttcaagctcgagaaacacacttgttatgggaatccctctattgaaggccatgtatggggacttttcagggagcctcatggtccaaattgtggtgttgcaaagtgtcatatggtacaccttcatgctgttcatgtttgaatatagaggtgcaaaactcctcatcacagaacagttccctgagactgcaggctccattacctccttcagggttgactcagatgttgtctcactcaatggtagagagccactgcaaacagatgctgagataggagaagatggaaaacttcacgtggtggttaaaagatcagcagcttcttctatgatatcttccttcaacaagtcccatttaacttccatgacaccaagagcatctaacctcactggggttgagatctattctgttcagtcatcaagagaaccaaccccaagagcttcaaggtttattcaaacagatttctatgccattgtttgcaagcaggcacnccagtccaaaacatggctacacgaacagctttcagagtaatggtggcattggtgatgt

SEQ ID NO: 34428 - DNA, 557 bp, Glycine max
  Clone ID: PAT_MRT3847_131091C.1
gaattggccacagacggattagttgtgggggagggtgagaaggttttgggtgatgaagctgcagggcaagaagctgatactagctcggagaagggtgttgatggacatgaagcaagcaaccaggtgcctggtggttctgacagtgcagcagaaaatggtagtcaaaaggaggaggtgccaccagctgaggagacaaaagttcacagagtccagttatggacagatataagatcatctcttcgaactattgaggatatgatgagtgttcgtgtaaagaagaaaactgggtcagtaaaagatgaacagattattgaagctgcaaaatcaccatcacattctgatgatgtgaaatcaccaaaaggagcagcatttgaggaagactcagaggaggagttctatgatgttgagaggtcagatcctagtccggatatgcctgttgttgatggcacaaatgcctcagcaaatggtattactgctgatgctgcaccaccagagcttcatttccttggaaagaagagttggaagttctggttcgtggtggagtaccaatggcattg

SEQ ID NO: 34429 - DNA, 219 bp, Glycine max
  Clone ID: PAT_MRT3847_131092C.1
gggatctggcactcaagaaacagagtgagtattcgaagcagagtcgattaaaaaataaatataatttatgtatttagtttcaaaatttcaggttttgctcctccttcccttgtttaggaggggaagtgaagtgtttttacttgcaattttctatttttaagtttcagttgattttttttttcattttagtattgattaaaccatatactgaagaatttc

SEQ ID NO: 34430 - DNA, 203 bp, Glycine max
  Clone ID: PAT_MRT3847_131093C.1
aactactgataaaaacaaacttttcctggtatatccaagggaacctgaatggttattctaaaaacactatcctccgaacaagcatgatttatccctccatgggaacactggtaagaacaacggtctcaacggttacacccggcccagacacgaatattacccccccctctaacccttctccagcggaactctgccctgcctct

SEQ ID NO: 34431 - DNA, 486 bp, Glycine max
  Clone ID: PAT_MRT3847_131094C.1
tctttctttttctcgtgggtgataaaccgtgatcacaggttgccgtaccttaaaaccgggaacaaaatcaatcgatcctggatttcaagaatctctcaatttcttcctacttctcagggcacgacttctcaagggaaagaaaatcactctctgtgctggccacagacctggcgaatcattttattatgcactcttagatcatttgctgaacactctcctatttgatataggactctgagtcagatttaaactacttctgtctctttctcagtcctctgtgcaaattcaagaacaagctggggaaatctcggattagtactcccactctcctatctggtataggatttcgtgggtagacttttctatttctttcctttctttaactctctacttttaactgatccgcattgccgttaaaagctggcttattgaaatacacttgggcgttggtgcaaaaagatgctttgtaattcttttcggagacac

SEQ ID NO: 34432 - DNA, 269 bp, Glycine max
  unsure (1)..(269): unsure at all n locations
  Clone ID: PAT_MRT3847_131095C.1
cagacgcgtgggcagactcgtggagtggagtttatggagaaggtcttctcctcctccaggagcttttagctaaccgtagaggatctcaaccttctttccgttaactacaagaacgtgatcggcactcgccgcgcctcctgcaacatcatcttctcaatctagcaaaacaatattattctcaatatccaaagcaatttgttctttaaacnctactaccgttccaatatcaagaaaaaccttcttcaacatttaatttcttattttcaaac

SEQ ID NO: 34433 - DNA, 349 bp, Glycine max
  Clone ID: PAT_MRT3847_131096C.1
cctgagttgtttggcatcatcctttccatcctgcacagaagttatggccatcgatctacgttacaagcacagaaaggcctctggtcgccgtgatgtcaagagcgacgacgtctacctccgtctcctcgtcaagttataccggttcttacaccgcagaactggatctgacttcaaccgtgtcgttctgaagagactcatcatgagcagaagaaacaagccccccgtatccctcagaaagctcatcaagtccctcgagggaagaaacgacaagatcgccgtcgtcgtcggtaccgtcaccgatgacgccagagtattcgaggtccccaagatcactcttgccaccctcaga

SEQ ID NO: 34434 - DNA, 408 bp, Glycine max
  Clone ID: PAT_MRT3847_131097C.1
ggggtgactcggggaaaaagaaaaggaaaaaaaaaaaaaagggggaaaaaaaaagagggcccccccccaaaaaggccctaaacgcccgagtaccaaaaagaaaaagaaaccaaaagaaaaaaaaaaagaaaaaaaaaaaaaaccagccccaccaaccccccccccaaaacgggccagaggggaggcccgagcgcgccccttgcccgggcccttaattccccacggtggaaaaacccaaagggagggccaccgaaggaaacgcccaaagggggaaagggggaaggggagacgcccaggcgtaaagaggcaccagggcagaatggaacctagagggggaccgggggggaggcaacaggaaggcgggggcgaaagcaaagggcccaaccacggcagacgcccctgggcccc

SEQ ID NO: 34435 - DNA, 223 bp, Glycine max
  unsure (1)..(223): unsure at all n locations
  Clone ID: PAT_MRT3847_131098C.1
ctcgccctggtcttacatcggtaatcctcttccctatcccccccctcccactcgcgaagacacgctaggctcatcacataccaccttggtaaatctcccataagtacttcactgtcagagccaaatgactcgacagactcatgtctggctcggcaagacatcctagacattttgacatgaatggacagacagtctanttccattaagtgctttattagataat

SEQ ID NO: 34436 - DNA, 665 bp, Glycine max
  Clone ID: PAT_MRT3847_131099C.1
ggaaaaccttcgaatcattaccgaactttatggggatccttttaagctgtagacgccactgccaattacttcctctgtatgggtgaatatacaaagggccaaccttattggttaaagatctttttttttttgattgtaggaatacagaaggccaggttccccacgtgagacacctgagcgatcattatacattaagctaacaataccctgggacacattctataaaacaaccctttttggaagcgagccatgtttacttaattgtaagcataaaagacccacacctgatactcctactacataatgggactgagagttgatcactacccgatgcctactataatgagaactggtggctctccccagggacttgacatgcaaaatgctgaaacccagttccggtatggcgcaccaaaccgacttttacgacggactcagcttgggtggagtatcccgacaaaacggttttgaagggggccaaccccatggacctgctgtatgacccccacggccaaatagatgccaaggggtaccaaatggtaaatctaacaaacgccatcctctggcgagggctatacaatgcggatgccccaccgtgctcacctggagaggattgggacctgcggccaccgaccaactattttatatcgagagaactatcccag

SEQ ID NO: 34437 - DNA, 506 bp, Glycine max
  Clone ID: PAT_MRT3847_13109C.1
ttgtttcagcaacaagatgggacatttcgaagcacgccttggtatgttcggtttggtaaatttcagggtgtactcaaaggtgccgagaagtttgttaggataaatgttaatggtgttgaggccaattttcacatgtatcttgacaattcgggggaggcttattttttgaaggaggtggatgatgataaagtagttgattcaattgaggctgttcaagattctattgacaaaaagaatggctatttgagtaatgttcatagacttgatcatagcatctcggattctggggtgcttcagttgaaagatgagagtgattccttggttttgcctcaacttcaaagggcagaatctgatgttgataggaggttttatgaattcccggatgatcgatcttctttagaagattcagttgagttgtcggaatatgagtctaattcgtatgagagcctagagggagacaattcttgggagtcacagggttcacatccagagatggtcttggtgag

SEQ ID NO: 34438 - DNA, 365 bp, Glycine max
  Clone ID: PAT_MRT3847_1310C.1
gcgcacgcgtgttaccctataatgagtcgtataatagcatgtaaatataatggcatagcgtggttctgagcgaaattactgtcaaaacacaattccacacacaatacaatcgcgtaagcataacagtgtaaatttctggggtgtgctaatgatatgagaataacgccacatataatatgcgtctgttgctcactagtccgctcatccatgaatggaaacatggtacgccacctgtattaatgaataagcaacgcgcgggagaggtagcttgcgtattgaccgctacagtggcatttcttttaaccaccgatactggcaacagttgattgcctttcaccgcatggccctgagatagtcgcagcaag

SEQ ID NO: 34439 - DNA, 344 bp, Glycine max
  Clone ID: PAT_MRT3847_131100C.1
ataaaaacccttcaaacatgacagggtaaatcagctaaagggctttaaaccaatgtttaatcattttaagaatctaccattacttttccaactacaaaaattggccaccttcttacgtaactaaaaatgattaaaacacatttatttcccccacctaaaaaattattaatttctcccacaatttccccctatttacaaacttatacgttataattaaaaaccatattaaattcccttatgttctcaacatccccttctataaatttactcaaaaactcccaattttctaatatttataaacaatataaaaatttcatccccttcattttaaacattttaaacct

SEQ ID NO: 34440 - DNA, 272 bp, Glycine max
  Clone ID: PAT_MRT3847_131101C.1
ggaaaaaaaatcacccataggcatagcaaaatctgaattgggcaattgggtccaaagaagaaaaccgggttaaccaattggaagggaagggaacccccaaaggcccgcccttggcctggccccataacatttcccctcaaattcacatcaaaccccacacaaagtgtggggtccaagaagcaaaaaaccttgcccccattggggggcccgcaacccttgccgatgatgtataaaaagatgtgggtgtgggggaggtttcacctgaagggggg

SEQ ID NO: 34441 - DNA, 388 bp, Glycine max
  Clone ID: PAT_MRT3847_131102C.1
acccactcgtccggccttttttagaaatttttcagataccctttttcatggacataatcactgacctctccatgttcattactccaatatggatggccattatcgacagctaaaatcctagactagatcgtgaaatcccaaattggcctaccacccaaaatactctacaatcaagtttcactctcctcgacctaccaatccccaaaactacacctcttttacctactcccacaccaaatcctccgcacatgaaaaagactcgagtggcattactgtattgacgaaacaccatttaatgcatctgtaaaaatatcatcaagaaaaacacggaaacccgtcatagattcagatgatagaccgttataccccaaccatcacctatcaaacc

SEQ ID NO: 34442 - DNA, 655 bp, Glycine max
  unsure (1)..(655): unsure at all n locations
  Clone ID: PAT_MRT3847_131103C.1
tgcaaatgataagaaanctaagctatctcttttcaagttaaaataagataattcaaatcaaaatgctcttgtttgggaaccaattaacttctgaaaataattgcacggctgcgagaagacgacacacacgcacacacaaaaggctattatttatccaaattaaaataagttgaaccaaaacgaaaaattaatctcataaagatacctacttatgaaattacaaatcctaaataatgtaatagaacccccatcaaaactaaactactacaaaagccttaacccactaggtgaggttggctataaggaacacatgacatcattcagctctttgtcgtgagtgatcaatgtttggtatattagagagttttacattgatttccgaggacctaaaacaactttctatgaagccagaggctgttttggtgaatctaggatatccctcgatcgggaatcagagacaaatctctcaaggtattcatttaatcaacattagaaaggtctttgtgcacagccttacccttgcatatacaaagaggctgtttcctgatttgaaccaatgaccaaacagtcaccaaggtacaagtacaactttactgctgtactagggctcaccctcttaaaattgccggacgcgtgggtcgacccgggaattccg

SEQ ID NO: 34443 - DNA, 763 bp, Glycine max
  Clone ID: PAT_MRT3847_131104C.1
gcagtagttctagttcgctttctttcactcactcactgagatctgaaataacaaaaaacaccgccagctcgtgctggtactttgcgtgatgaagctcgtttgaagaaaagagaaacttcaaacttcaaacttcaaaagccacattattttctccttgaacacactctgttttttttgttgttgttccaatgaaggaaggtgagaaggtattggatccgcagctatggcacgcgtgtgcaggtggcatggttcagatgccacaagtgcactcaaaagtcttctacttcccacagggtcacgccgaacacgctcacacaaccattgatctgagagttccaccgttcatcttatgcaacgtcgaagccgttaagttcatggcggacccagaaaccgaccaagtgttcgccaagctgagtttggttcctctaagaaactcggaactcggtcctgactcggactctgctgctggtgatgacgcggcggaaccttcttcttgtgaaaagcctgcgtctttcgccaagactctgactcagagcgacgccaataatggtggggggttttcggttccgcggtactgcgcggagacgattttcccgaggctcgactgcacggcggagccgccggtgcagacggttgtggcggaagacgttcacggcgagacgtggcggttccggcacatttaccgggggacgccacgtagacacttgctgacaacaggggggagcagtttcggtgaaccagaagaaactcgttgctgggggat

SEQ ID NO: 34444 - DNA, 334 bp, Glycine max
  unsure (1)..(334): unsure at all n locations
  Clone ID: PAT_MRT3847_131105C.1
aaaaaagaaaatgaattattgaaattgggctaaatgatgtggcaactaaaaaataatatacggattgatagtttatagaagatgatgtgcttccaaaaaaaaaaaagattgccttatgtctcaaacgaagacaagggggggatgatacaatttgcctggaagggcttatctacttcataaaaagaagactagcgttacctttttgaaatgtagtatttcaacccccaaaaagaaaatatttcatatgatcatgatgacggcgatcttaatttaaaaaggagttttgatgaaatcacccttcttgcaagtggaacacatacaanactatgggccc

SEQ ID NO: 34445 - DNA, 431 bp, Glycine max
  Clone ID: PAT_MRT3847_131106C.1
ttcgttatttgcttgttaaccaatgtgaggggttgctactacctgtagagaacgaagggaaagaacagatgagctcaatggtggttgaaaataccattggttatcttgatctttcacattgccacatatcagacaaattccttcaaagtggtctccctttgttttccaatgtgaaagaactatacctaaatgggaatgatttcacaattcttcctgcctgcattcaagaatttcagtttctgacagaactttatttggaagcttgtgagaatcttcatgaaattggatggattccacgaatttagaaatattcgctgtaatagattgcacatccttgaaagaattagacctcacacttcttcccacatggaacaaagaatgttgccttttaaggaaagctcttttatgtgggatgccggatcttgaaaaac

SEQ ID NO: 34446 - DNA, 159 bp, Glycine max
  Clone ID: PAT_MRT3847_131107C.1
gcactccatactcaactcttccacactccattatttttaacattatctcaatacgtctcatttacggaaaaggttttttttttaaaacgactttggattctaaaacacttctccatttcctccaacattcattttaatcctatttatcctctactttcc

SEQ ID NO: 34447 - DNA, 1776 bp, Glycine max
  Clone ID: PAT_MRT3847_131108C.1
cttgttaaaagatttgtgagaaattctatttaaaatgacattatttctgtgaaaatgcctctccttgacggtaaaattggcacctagtcattcgtaattccgaagcagttttccagccaggaaaaaataaatgatgaaggctaagagattaagcagtggcaaagctaaaatattttatatttggatttggatttgttggcacccagctgagatgccatgccgtgctttacaacatccgtgcatttcctacacatccttagcaaacataaagtttagccctctcttctactcattcacttctgtctctattcagagtctgagtccatgtttcccattgctttcaaacctcttggtctctgctttttggatatcttcttctccctaacctcgtatcgttccaaggtaagatcgcacaaccatgcgccaggactaacaagattgagggttcgttgaatgaatttagctctcttcttgggtctctgaggcagctttgagcccttaatggcgagaaaatcttcttccttctccttgttggtcaaggcaatcacgaacttgggtggccagaccggcggagcagccgcgtctccgctgccggacggcgaccctcccttcttgctatcgtgcgcagtatccgacgaggctgcggacttgttattgtcattaaggaggttgttatgggcccctctcttatcgtgcgcacccctgtccggggaggcaattcccctaacacccccgttgctttgtcctcctctcatggcacttgaactttctgagttccgtgagttccaattcattctttaatttggatgagacatccgcaaggaacctgagaattcgtggttgcggcgaagatgtacgttcacggagattcggatacccgttactctgatgatgatgattattattattgacaccgaacgtgagcttatttaaagaatccttgtcggttctaacgacccggcgatccacccgaaccgttgtcctctgaaccggaccggaagaatcgtccttaacctgcaccttcatgcaccttagccgcttccgattcccccactgcaacaccaaatccgacgtcgttgcttgcctagcgctatcggaattcgccctcaacagcaacgacccatcccctccgtttttttctctaacactagacattgtgttcgtattgttattgctctgaataattgactcgttctccatctcttgaacccgttccttaaaaaagtagcaatcgtcgagcaatcaattccttctgaaactaaggggaaaaggagctgatttttctatctcctaagtctgctcctgctaaaactttgttcaaccgtttaggaaaattgtccagatttcagttccagagctatggaaaatgtaaatctatgccgaaaactcaactaataatgacacttcagagcttctatctgagacgatggccaagtagcgatcgtccctgtaacgtacgacttgcacaaagttcagagtttcaaaatccgtctttttttctcaagagaaatatatcttcaaaacttgaaaaatcttatgcacctctaaaaatctcaatgaacaaaggaaatttccagaacagatttcacttgaaaatttacaatggaattccgacaaagtctggcaaatactcttaggacatgcatctcattctatctcaaaaaagtgtcagatccttaacattcaacttcgggttatgtgaattagtgttggaaattccagggcaaccagaaagttgtgggagatgatggaaagaacaaaagaagagctcgagcc

SEQ ID NO: 34448 - DNA, 2276 bp, Glycine max
  Clone ID: PAT_MRT3847_131109C.1
aagcagcggcaaagctaaaatattttgtatttcgatttggattcgttggcacctagctgagatgccatgccatgcatttcctacacatccttagcaaacataaagcttacttagcaccttcactcattctctattcagagtccgagtccatgtttcccattgctttcaaacctcttggtctctgctttttggatatcttcttctccctaacctcgtatcgttccaaggtaagatcgcacaaccatgcgccaggactaacgagattgagggttcgttgaatgaatttagctctcttcttgggtctctgaggcagctttgagcccttaatggcgagaaaatcttcttccttctccttgttggtcaaggcaatcacgaacttgggtggccacaccggcggagcagccgcatctccgctgccggacggcgaccctcccttcttgctatcgtgcgcagtatccgatgaggccgcggacttgttattgtcattatgggtccctctcttatcatgcgcacccctgtccggtgaggcaattcccctaacactaacgcccccgttgctttgtcctcctctcatggcacttgaactttctgagttcctgagaattcgtggttgcggcgaagatggacgttgacggagattcggatacccgttactctgatgatgatgattattataattgacaccgaacgtgagcttatttaaagaatccttgtcggttctaacgacccggcgatccacccgaaccgttgtcctctgaaccggaccggaagaatcgtccttaacctgcaccttcatgcacctcagccgcttccgattcccccactgcaacaccaaattcgacgtcgttgcttgcctagcgctatcggaactcgccctcaacaacaacgacccatcccctccgtttttctctctaacactagacattatgttcgtattgttattgcttcgaataaatgactctttctccatctcttgaacccgtgccttacaaaattaacagtcgtcgagcaatcaattccttctgaaactaagggggaaaggagccaatttttctatttcctaaatctgctcctgctgaaactctggttcaaccgtttaggaaaattgtccagatttcagttccagagctatggaaaatgcaaatctatgccgaaaactcaactactaatcacatttctgagcttctgtctgcgacgatggccaagtagcgatcgtccttgtcacgtacgacttgcaaaaagttcagagtttcaaaacccgtctttttttctcaagagacatatatcttcacaacttgaaaaatcttatgcacctcttaaaatcttctatgtactaagctaatttcctgttcttaactctcattccaaatctttgaatttatgagttcccaacaaacatgaattgtaaagcaacaagaacaaggacaagagaggaaggtgtaagaagtaagaacaatgagagagacattacaaccacatcccacattagtattaattatttcttaggagcaagcctagacttaattttctcaacctccttggtacccacctggaacgccttggttaacacattgtctggaaccggtggcgtcgctgcaaacaacgttagagcaatggactgtgtgccaggcaattgactgttgaatgctgcaatcactgaagcttgttcctttccattgttcttttggaagtgaaccaacccttttgggaacacaaatatttcacccttgcttatgctctttgatatgagcacgttggctgtggttatgaacccaacatctagtgttccttcaagcacaaacactacctcggtggcacgtgggtgcgtgtgaggtgggttgatgccacctggggcatagtcaatgcgtgataaagacacgccaagggtgttgagtcctgggattttctgaacgttggctccagtcactagggagccataggtgttgtttgtggcacctggtttggctagtatgtctgagaagaaatcactcgcatttaccttggcagcatctttgcatgtgaatccattcactttaaccgctgaagcaaggtctgcgacacagaggtcttgaagaggatcaggatctgatgcagagacggtggctaacaccaaagcaagagtcaccgcttgcaggaaacctgtgagcttcataatatgatatgtgacaagtgaagttgggaatcaaaggaccaaaagccagacttttaaagaggggaaaaaaaagaaagaaaagtatgttagaattgtttgtatgagttggaaggaagctcgagcc

SEQ ID NO: 34449 - DNA, 446 bp, Glycine max
  Clone ID: PAT_MRT3847_13110C.1
acttcatactgattctgttctctcttatcaaatagatagagagagagatgactgacattgaaacctcagtaacatcattcaaacaacaactgtcttctggattggacgcgcaatgactaattcgtgcgctgttatagtgaattgatgcagacaacagagtggtgatgtatccccagccacgttgcagatagcttatcatactcctcacgttataccactagccatggatcctccttctcccaagctagcaacttgtgaattctgtgttctctttctgacaacccttttctgtcttacccaccgaatctataagacgtactaggggatgatcatatttctttcttattttctccaacttgtacattagtgccgcttcttgtttgtctctgttttaattttgtggtcttggattatttgaagattcctaataaatgtgatatgtgtct

SEQ ID NO: 34450 - DNA, 524 bp, Glycine max
  Clone ID: PAT_MRT3847_131110C.1
cttggggggggggggggggggggggggggggggggggggggggggaaacccgggaaggaaccacacggcggggacaaaacacaggctggggccaagttagtagtaaggtaccataagacaagtggtgggggtgatgtgcagagtgccggtggaagatatacaagcaaagatagtgcaaagcatgcacctagctagctatgggcctggcacaaacgtagcgatagcttttaaacaatacacacctggaattgatgcaggcgggctaaaggagccaatatagaagatgccaagactttggggcgcccaagcagataaccttatcatttaagtaagtaccaatggtaaaagcctttaaagcaaagccccagggatggcgccttacaaacagtaaggggatgtaaacatataacgcaacatttttccggctaaaaaggaagccgttagtaagtaagtgacgctgtggctgtaaacgcagtagtagtactggcgataatggttgggctgcagcagcatcgcgtgcctgt

SEQ ID NO: 34451 - DNA, 526 bp, Glycine max
  Clone ID: PAT_MRT3847_131111C.1
atatgcttcctcttcaacccttcttctttccatcatctcccaccactttcacgctgctctggaatttacaacactaactcacataaaaccaaagttaaatgatgaatttcattgtaaattttcaattgaaatctgttgtggaaatttcctttgttcattgagattttttcgaggtgcagaagattttccatttttgaagatatatttctcttcagacgggttttgaaactctgaactttttgcaagtcgtacgtgacaaggacgatcgctacttggccatcgtcgcagacagaagctcagaaatgtttcctacagctttgaacaaagttttagcaggagcagacttaggagatagaaaaatcagctccttttccccttagtttcagaaggaattgattgctcgacgattgctacttttttaaggaacgggttcaagagatggagaacgagtcaattattcagagcaataacaatacgaacacaatgtctagtgttagagaaaaaaaccgaggggatgggtcgttgc

SEQ ID NO: 34452 - DNA, 541 bp, Glycine max
  unsure (1)..(541): unsure at all n locations
  Clone ID: PAT_MRT3847_131112C.1
aagcagtgggaaagctaaaatattttatatttggatttggatttgttgggacccagctgagatgccatgccgtgctttacaacatccgtgcatttcctacacatccttagcaaacataaagtgtagccctctgttctactcattcacttctgtgctctattcagaggctgaggccatggttcccattggtttcaaacctcttgggctctgattgagggtgcggtgaatgaatttagctctcttcttgggtctctgaggcgggtttgagcccttaatggcgagaaaatcttcttccttctccttggtggggaaggcgatcacgaacttgggtggccagaccggcggagcagccgcgtctccggtggcggacggcgaccctcccttcttgctatcgtgcgcagtatccgacgaggctgcggacttggtattgtgattaaggagggtggtatgggcccctctcttatcgtgcgcacccctgtccggggaggggattcccctaacacccccgttggtttggcctnctctcatgggacttgaactt

SEQ ID NO: 34453 - DNA, 350 bp, Glycine max
  Clone ID: PAT_MRT3847_131113C.1
gatttatatttcatgtgaacggcacttgcacatgggaagactgaaacgaaatttatttccatgagcggatcataaacaatttgatcacagccattttgcgcaccccaaaaaaaaaaaaaaaaaccccacatgaaagttgtccgccgcaccttaaatcataactcccataagaaaaagccacggccagagtctacatgggcgaataacaaaaggcgaggtcccaaaaaacatttcttagtactctgcacccggcacaaagattaggctattcattgcagggggtggggggataaatccccccggaccttggatccaggtgtggtggtgtcttcttttaacctgcattgttt

SEQ ID NO: 34454 - DNA, 862 bp, Glycine max
  Clone ID: PAT_MRT3847_131114C.1
aaaattgtccagatttcagttccagagctatggaaaatgtaaatctatgccgaaaactcaactaataatgacacttcagagcttcatctgagacgatggccaagtagcgatcgtccctgtaacgtacgacttgcacaaagttcagagtttcaaaatccgtctttttttctcaagagaaatatatctgcagaagcccaaaaacaaaagaaaaaaaaaacaggaataacttagcacagacgccaaacatagaggaacggaacaaaaccaaaagctcttggctcttatttaccaaccttcaaaacttgaaaaatcttatgcacctctaaaaatctcaatgaacaaaggaaatttccagaacagatttcacttgaaaatttacaatggaattccgacaaagtctggcaaatactcttaggacatgcatctgtgaacaaaaatgaatccaaaaaaaaaaaaaaagaagaagagaaggactcgagtcaatctagacagaaacaagtttcattattctccgtggccaaaaggagaaccaaaagaagaagaagaaagagatattggggctgtctaaatagcaaacctcattctatctcaaaaaagtgtcagatccttaacattcaacttcgggttatgtgaattagtgttggaaattccagggcaaccagaaagttgtgggagatgatggaaagaacaaaagaagagaagaaagggtcgaagaggaagaacgaaatggtgagtttccattgaagggcctgttttatatacactctctcagagttgatgaccgtagatcaacaatctcacggctttcctctttcctccctctaaccattcacggtttccccttacaatcccctcatccatg

SEQ ID NO: 34455 - DNA, 480 bp, Glycine max
  Clone ID: PAT_MRT3847_131115C.1
aacagcgtgaactgaagaaaaggctccaacgtgaagttgatcgcctgcgggacagcttttgccggcaacatgctcttgaacttatcttcacagaagaaggagaagctcgtctaaatgcattaatatatttgggaatggatggtaatgtagaacaacctgaatggtttccttctccaatttttcaggagatttttgcaaagcttacggatgtggcaagcattgcagcagatctgtttgtgggaagggaaagatttgccactgttttattgatgagactcgcagaaacagtgatcctgtggctttctgatgatcaaaccttctgggaagaggttgagacaggatcaacacctttaggtcccatcggccttcaacagctttatttggatatgcaatttgtgatgatattttcatcccaaggcccgtacttatctcgtcatttgcatcaagctattaaaaacattattgaaagggctattaatg

SEQ ID NO: 34456 - DNA, 483 bp, Glycine max
  Clone ID: PAT_MRT3847_131116C.1
ctttcttttttttttttttgggaaacaagtacttaatctttaaattttcctggttcaagcaacccactggataatacactacatgatataatctagagacttgaatttacagaagtccacatgtcccagatatacagagaagaaaatgacctccagctaaaaggagaaaggaagaaagaaagtttttacaatgttattaaaggaatggggatattccttttttttttacatgactacatctttccattaagggacatatgtgttaacagaaagtatatacaatgttgttaagcctgagggggatgtgagtgtaattgccaaattagtgaagtgaggaggaggaggctattggtggttttgttaaggttggagtctaagtagcgtggagcaaatgccacaatggtcacagcatcttcgttggataaaacatcacatacctgtgatgtgagtgaaaaatgaaatcatgtaatatgatgatggatg

SEQ ID NO: 34457 - DNA, 795 bp, Glycine max
  unsure (1)..(795): unsure at all n locations
  Clone ID: PAT_MRT3847_131117C.1
gttgcgtgataaaatgaatatgatttaaaaaacagaacatcttgttaaaagatttgtgagaaattctatttaaaatgacattatttctgtgaaaatgcctctccttgacggtaaaattggcacctagtcattcgtaattccgaagcagttttccagccaggaaaaaataaatgatgaaggctaagagattaagcagtggcaaagctaaaatattttatatttggatttggatttgttggcacccagctgagatgccataccgtgctttacaacatccgtgcatttcctacacatccttagcaaacataaagtttagccctctcttctactcattcacttctgtctctattcagagtctgagtccatgtttcccattgctttcaaacctcttggtctctgctttttggatatcttcttctccctaacctcgtatcgttccaaggtaagatcgcacaaccatgcaccaggactaacaagctgtaaagcaaatcnnngcatattcggaacacaaatcatgcatttgtctagaatttcaatacataacatcaaaataagacaaaaaaaaaaaggaacacaaataaacaaatggtagttgaaaagttgtcaacaaactacaagcaagtagggtttgaaaacgggggaggttgagtatttataaaagagtaatgattctctcaccacctaaatagtattcccacctaatatatacttctcatttccctttatttttgtttcttattaagcatatcnnnnattacattaattattcatatctttttatgggtggatatctac

SEQ ID NO: 34458 - DNA, 324 bp, Glycine max
  unsure (1)..(324): unsure at all n locations
  Clone ID: PAT_MRT3847_131118C.1
cananacncacancancacnncactcanncaacccanncnaacntntcncgcaacagtncaanntcantcanngaancaaaanaanactacacanacaatcccaaacgnccaatnaacatntcaactcnangaaatcaacnaccactgnncatnngaacnacaagcntnnaantananacaaacnannnannnnnaaacncnanaagancantncnganangaacnagaagncannnanncanncctangngcntaacaaacacacagcnaaacacgaaagaagannaccangatagtgcngtatgnaagtntnaaacccccaa

SEQ ID NO: 34459 - DNA, 2028 bp, Glycine max
  Clone ID: PAT_MRT3847_131119C.1
ggctcgagaaaaggcccacaatcataacaaccaaaaagcccccttctccttccaacccctccattttcaacaacaattcctctaagcatcgttcagacaagggtacaccacaacagcttttgttagtcctcaccaagcgatgagagttcccgttccctcatccccacaggccaacccaaaacccaccaataacgttgtccgtaccattgcccttcccaacctcaacaatagcaccacgccccccacgggcctgtgctacgagcccacttctgtccttgacctgtgccggagcccgagcccgggcaccgaaaagcccaccaccgatcactccgttctcgtcaccaactcccaagactatctcgacctggaagaccatgcgttgcacaacttggactgggactccatcatgaaggacttgggcttacacgacgactccgccacccccgttttgaaaacttttctccaccccgacgacgacgacgacgacgacaacaacaacaacccatcatgcgacgacttcacactcttcgaccacgcgcttgaattcaccactctctccgacatctactccaaccaaaacttcgctttcgatttcaaccacttgcctcacgacttcaaccacctcaacggcttcgatttcatcgaagagctcatccgcgccgccgactgcttcgacaccaagcagttacacgtggcgcaactgatattggagcggctcaatcaacgactacgatcgcccgtcggaaaaccactccatcgcgcagcgttttacctcaaagaagctctccagagtcttctctccggttcgaaccggactccgaggatttcatccctggtggaaatcgtgcacagtatcagaaccttcaaggccttttcgggaatttcgccgatcccaatgttctcgatcttcaccaccaatcaaatagttctggatcacgcggcgagctccttcatgcacgtcatcgacttcgacatcggtcttgggatccaatacgcttccctaatgaaggagattgcggagaaggcggcggattcgccggtgctccgaatcaccgccgtcgttccggaagaatacgccgtcgagagcacgctcgtccgcgacaacctcgcgcagttcgccctagatctcaggatccgcgtgcaggtcgagttcgtgccgcttcgaaccttcgagaatctctccttcaaggccgtgaagttcgtcgacggggagaacaccgccgtgctcctgtcgccggcgatttttcgccacctcggcaacgccgccgcgttcctggcggacgtgcggaggatctcgccgagcgtggtggtttttgtggacggcgaggggtgtgcggagactgccacggcgtcggcggcgtcgttccggcgcggcgttgtgagcagtttggagtactactcgatgatgctggagtcgctggacgcgtcgacggtggtaggcggaggggagtgggtgaggagaatcgagatgatgcagctgcggccgaagattttggcggcggtggagagtgcgtggcggcgggttccgccgtggagggaggcgttttacggcgccggaatgaggccggtgcagttaagccagtttgcggattttcaagcagagtgcctgttagcgaagtctcaaatcagaggatttcacgtggcaaaacgccagaacgaactggtgcttttctggcatgatagggccattgttgccacgtcagcatggcgctgttagaacatggagtgttattattggcagaggggattatgtaataatgtagtaattataataaactgcaacgaaagtaaatttaggttccaatttcgaagtccactacactcgttcaaactattgctatgatggaaaaaatctaggtatctttggcaaaaggaaaaggtggggagggggtggtagataagataaacttgtatttttctgtaccattttgttgtccttctttgttggatggactctttgttatcctgatgaactttactactggttttctaatcaaagggtttggcagattttaaaaaaaagcatac

SEQ ID NO: 34460 - DNA, 295 bp, Glycine max
  Clone ID: PAT_MRT3847_13111C.1
tattcctacaatattgtatacttatctgaaattcaaaaccaatatctgtagtttctaaccaaacatgttatgagctactacatgcattattataatctgcatgtaaccattcacaatgtactatcataataaaccatggtacaatacctaactctaaatatgatatactgtatcctccagttcaacatttatgatttgaacctcatatacatatagtattcataacaacatacacaccatctcatcctttgacattatcatgcgtactaagtcacttgatcttggaatgaatcca

SEQ ID NO: 34461 - DNA, 320 bp, Glycine max
  Clone ID: PAT_MRT3847_131120C.1
atcacagtcattttatatcaaacgagatggccagctcacaacgccaatccgagttagaccgcttcctacgcccgatgtccaacgaggagctatggtatagggccaacgccatctaaactagagggacgcagttcttgccaccctcttacacgcaaaaactcggattgtcccctcatatccctatagcgccatagcctcctgcagccaactgatggaacaactaatgggggatgatccttggacccctcccagcatctatgccaccgcaagggggaacgggccactcttcggtctggcccggttcaaacgcaccccggcgg

SEQ ID NO: 34462 - DNA, 789 bp, Glycine max
  unsure (1)..(789): unsure at all n locations
  Clone ID: PAT_MRT3847_131121C.1
gatcagccaccctaaacttggaaactgccacagatctttgaaaaagatagaggaaagaaatgtgattgaaaataagctgaaagaggaagcaagagagccaggaaggaagcaaattattgctgaatttaaatctttggtttcttcatttcctgatgaaatggggtctatgcaaagccagcttagaaaatataaagaatctgcttcagatatccattctctgcgtgcagatgtgaagtctgtttctagtattcttgacaggaaggtaaaagaatgtgatgtattttctgttaggtctgttggtctagttgctgagataaagagactgcttggtgtggttcaagacttgagagagagtgagtgggacttgcagttgatattggaaatgtttagacgtgagtccattgattcaagggatgtcatggatgcaagggaagcagaatacagagcatgggctcatgttcaaagtttgaaatcatctcttgatgagcacaacttagaacatcgagttaagacagccaatgaagcagaggcaagatctcaacaaaagctggctgctgctgaagctgagatagcagacatgagacagaaattagcagattctaaaaggcaaatgtgtgatctgtctgatgtcttgaaatctaagaataaacaaaatgagaactacttatctgaaatagagagtattggacaagcatatgacgacatgcaaactcaaaaccaacatctgttgcagcagattactgaaagagatgattataatattaagcttgttttgnnnnnnnnnnnnnn

SEQ ID NO: 34463 - DNA, 430 bp, Glycine max
  unsure (1)..(430): unsure at all n locations
  Clone ID: PAT_MRT3847_131122C.1
gggtcggggggtgtttttttaattttttttttttttttttttttttttttttaaggtgccaaaaccttcaaaaattattttacatttttataataaataaaacctttataaacatctggtaaaaaaggcaattttttcttgaaattaacaacaaattgtttgaaagaaatttcctcatncacgcacaaaaaggaacctcttttcaaattatttttaaccaaaccttttgatttcaaaattttaattactgaaaatttagggacaatcctttttttcaagttgtaccctaaaacattaggatttgcaagaatattttttggggacaaacccctggctttcactttaaaatacatttttttttgcaccatcttttcaaacaacttgataaaatttggatactttaaaaacgcttgaaaagccatttcccggt

SEQ ID NO: 34464 - DNA, 1207 bp, Glycine max
  unsure (1)..(1207): unsure at all n locations
  Clone ID: PAT_MRT3847_131123C.1
ggctcgagcctgaagaagcaagagagcttgacaaggaggttagacagattgtaaaggagaaagaagaatctgttcgcaatcaagactttgagaaggtaatatgctttaatctataagatttagttcataaaattttatggacaccaaaccaaaccatgagacaatgttatattcaagtttaaaaaagagtgtagtggtttgtttgttgttcaattaaaacaattatatctgcaaattattttggctattagcgggctgatgatgattcatgagtttatgagtttctgtgtaggccggagagctaagagantaaagaaatggatcttaaggcgcagatatctgcacttatagaaaaaggcaaggagatgagtaaggcagaagtgaggcaggagatgaaggtcccatggtcactgaagttgacatacaacatattgtctcctcctggactggtattcctgtggagaaagtctcgactgatgaatctgatcgcctcctcaaaatggaagagactttacacaagcgagtgataggtcaggatgaagcagtgaaagccataagcagggccatccggcgagccagggccacgcgtccgaatttttgaatagattggatgaaatgattgtcttcaggcagctcacaaaactggaggtgaaggagattgctgacataatgctcaaagaggtgtttgatagactgaaggtgaaagatattgaacttcaagtgacagaaagattcagggacagagtggtggaggaaggttataaccctagttatggagctagacctctaagaagagccataatgcgacttttggaggacagcatggctgagaagatgcttgccagagagatcaaggagggcgactctgttatagtggatgttgattctgatggtaatgtgattgtgctcaatggtagcagcggagcccccgaatccttgccagagacgcttcctgtataatgcggttaatttgctaatactatgtacttaatttgtttaaaccatagtcatagtatgttttacttgtcaatgtacctaaagtttttaatggaatacctggtaggcctcatcatgttttttgcctataaagcaaatcaaattcagaaaagttaccagatatagactgaaaaaatgtatgaaaatcggtactattgcactaatgaaccctaacgtcggacgctgggggtgtttgtttgctgggccggct

SEQ ID NO: 34465 - DNA, 2373 bp, Glycine max
  Clone ID: PAT_MRT3847_131124C.1
gcagcggaattcggagcaagagttttctcatctatcatatataccatagcaggcgaaaggtaggagtgatcgatcagttaattttgaacgatgaaaatgagagcaaatatgaaaaggaggtgagaggcggaagaaaagcattgaaaaatgtgatgaatttgctatcgcatatggagatgagttaaagattattgtacatgacgggagtgctggatttgttgtggaaggttcagcgaaacaatttgatttccaagtgcatataaaatacaatgaaaataaacgattcatgaatcaggatgaagcaattaaggccactagacgggatttccgtcgagttcggatgggacggaaaaatcctaatcgtcccattgccagcttcaacttgtctgggctaaaacaatagtgcaagcctgaattggtgaatgcattggctgaatacaacgttgtctccgaagaagctatgattcggcttgacatgagtgaattcatggaaaggcacactgtctccaaacttattggttcacctcctggatatgttggttacactgaaggtggtcaattgaccgaggcagttcggcgtcgtccttacactgttgtactgtttgatgagattgagaaagcccatcctgatgtgttcaacatgatgcttcagatcctggaagatggaagactaacagacagtaagggcagaacagtggatttcaagaacacacttcttataatgacatcaaatgttggaagcagtgtgattgagaaaggaggccgcaaaattggatttgatctggattacgatgagaaggatagcagttataacagaatcaagagcctggtaactgaggagctaaaacaatacttcaggccagaatttttgaatagattggatgaaatgattgtcttcaggcagctcacaaaactggaggtgaaggagattgctgacataatgctcaaagaggtgtttgatagactgaaggtgaaagatattgaacttcaagtgacagaaagattcagggacagagtggtggaggaaggttataaccctagttatggagctagacctctaagaagagccataatgcgacttttggaggacagcatggctgagaagatgcttgccagagagatcaaggagggcgactctgttatagtggatgttgattctgatggtaatgtgattgtgctcaatggtagcagcggagcccccgaatccttgccagagacgcttcctgtataatgcggttaatttgctaatactatgtacttaatttgtttaaaccatagtcatagtatgttttacttgtcaatgtacctaaagtttttaatggaatacctggtaggcctcatcatgttttttgcctataaagcaaatcaaattcagaaaaagggtagcggggttaccagggggatatagggaaaaactgaaaaaggatttgtggggaaggtgaaaatcagcgccgtattcggtataactttggcaccaatgaactattccgtcggaagctgggggtgtttgtatgtttccactggtttgactatgatgtaatattaatatcccagcattactgtaaatgatcattatggcgtattcattgcttgagattgcaatgcatgtaatgacaggtttagggtattagatcaatttgaatacgacagtgtccccaaatcatctatacacaagtttaaaatgtggcggatgcagtgaatcaacgtgattcatgtattatatcagttttatgtgtccaccaggtggagttagacccggaaacgagagtggagttgttcaatgtccagaaaacagtgcagataataatccatgtcccggagaatctatcctagctgttctttaccctgatgaatataaaatattcctcatttggaacacaacatgtttcatttcatctttagcagtgtgtctcttgcttgtaagtgggttccctctcaatcacagattcttcacctggcttttgtcaatagggatgtgcatcaccatctccagcctcactcttacctacatgactggtgcgggaatggtcaccccggatcccctttggaatacaaccaactccatgtttaataaagttatttatatttggatttcactgctaggactcgtcgcatttgtcctttgcctacgcctaattgtttggattgtctttgcctgcaggtaattaaaccttgaaatccaatatcccatgccatacttttagtattcaaaaggtgtgatttcaataggaaacgagaatgtaactcatgctattctctctattcttgtatcattttggtgtaagcatgtgtggtaggcgtgtataatctttgtgattctcaagtctttatatattatgggatatatttctataataatctcctgtgtttcgc

SEQ ID NO: 34466 - DNA, 340 bp, Glycine max
  Clone ID: PAT_MRT3847_131125C.1
gggggggaaaaaatgcccccaaattaaaaaataaataaaggggattccccataaaacaggtccctttcaaaaatttcgggggccttaaaaataaaaaccaaagagcccgggtttttgttaaaacaaaattatttaaaaaatggccaatttttttaaaaacaaggggaatttttaatttaccaaaaaaaaatgactttcaagccccccctccatgagaggaaaaatcccccccacaaaccctaaaagggaattgagggctaattaagcgggcccgggacataaaaagccaaaaggggggggtggtctttaaaaagctcaataaaaagcgggcggtttttga

SEQ ID NO: 34467 - DNA, 181 bp, Glycine max
  Clone ID: PAT_MRT3847_131126C.1
taaacaaagcagaataaccccggaacattttggaggggtcaagccttaatcataacaagtggagatactgggtattgaaccgaactgacccccttaaattttgcccgcatacgcgctaatataccatctctgggggatagagggaaagatttttcggaccgtcgggaggcaaaactttggg

SEQ ID NO: 34468 - DNA, 403 bp, Glycine max
  unsure (1)..(403): unsure at all n locations
  Clone ID: PAT_MRT3847_131127C.1
ggttttccttttttttttgtgtcgcgggtgccgggggggccctgggggcagcctggtcatgcgggagttttgcccaggggttgcatttttacgctcgggaggtccacgtggacactcctgttctgctgatggagggaaggaacacgcttcgaggaagggggggggggagaaaacatttttttttttttggggcggggaccggcgggagcccggccgccagcggggggggggggaacgtgcccccgcccccagnggtccgcnggggggatgaggtnggtcgggagggaagaggccccaacaactaaaaggcgtgcctggtgtacgggccgcccgtccgagccggcccggggtccgcctgggaagcgacgaaggcaaggcgagggaccgacacccggggggggca

SEQ ID NO: 34469 - DNA, 516 bp, Glycine max
  Clone ID: PAT_MRT3847_131128C.1
ctctataatgagtcataatacaacagaagggcgtcaaacaaattgatgataatctttaaaggtacacatatttagaagtcatgataaattctagaccgaattggtttggaatgttgtaggatgccttgaatagactgagcataatcccaaagggtacacaacacttgaaagtcatgagagccccttattggatttgaactatattgaatgtgcaagtggttgacgtggacatatggcttttactcttccccattttcattcgtctttttcttctatttctaggtatgatgctttggcttaacaaatttggattttagagggtgtggttgcaagttgagataagatctccatgaatattgatggggttaattggtcataatactattaaaggagttgaaattgtagtgggttctattatgaatgaattattactggtgggtttgccttagtgggaaagaaggaaagaaaaagaagagggagaaaaaaataattgagagatattatttaaagagaccc

SEQ ID NO: 34470 - DNA, 332 bp, Glycine max
  Clone ID: PAT_MRT3847_131129C.1
caaaacaaaaatccatcatctattggtaaagggtccttaatataatatacaccatccccacccccccattataacactcatttttctttctaaaataaaaaaataagcccaatgtaataccctcccaaatctattcattaatttgctccttctaatctcatttataacaaacaaaaacctaattaaatccattacccctgttctttcaaatatatatcattcctttttatatccaccccaacaacgaagacaaattttccattaatgtacatctaaatagccctttttttggtatcctctgcatcccacaaaaataccctttcttttacttt

SEQ ID NO: 34471 - DNA, 545 bp, Glycine max
  unsure (1)..(545): unsure at all n locations
  Clone ID: PAT_MRT3847_13112C.1
ctgagtcatcgtctagctatctcgatcgaactgtccaaggtcctgtcactagcaactaactgacaattgatacagccaagtgcatactaaagctgctgaccttgaatttataacccgtaggttaggagcccaacaggatgttgataaaacgaaggaacggccattaaggtactattgggcagtaagccaaacntgctcagagctgcggaatacacgtgttgagcggaatttggatatttatgtgtacatggctgcaggatggtaataggtttgcaagtggtacgcgcaagggatgttaaaatgtgtttgtaaagccgttaccagatagacgtattgtaagcggctaaatggtgtgttagcaggggagcaccggaggggttacaataatcaaaatattagcgtaagtggcctagtggcaggcggagcagggggcccgtaggccgtagccgggtccttacccatacagcttagtaccaaaatagagaagtgacgccagctttgcatgacatatatgattaacgcgagttaaaagttgccatgatgag

SEQ ID NO: 34472 - DNA, 736 bp, Glycine max
  Clone ID: PAT_MRT3847_131130C.1
cattatacactttcatttagtccttgtgtgtatctgttgacaaacatgggaaccacttgtccagaatctccaccacttctccaagacctaagggttaccatccacgaaacttcaatggtttttccatccaaagaaaccgagaagaggtcattgttcctatcaaacatagacaaggtcctcaacttcgaagtggaaacggttcacttctttggagcaaacaaagattttccaccccaaaaagtggccaagatgttcaagaatgctctagaggatgccctagtggtctatgacttcttgggaggaagattgaatctgaaccccgaaaccaaaagattagagatagattgcaatgcaaagggtgctgggtttgtggtggcttcaagtgagtacaagttaagtgagattggccacttggtttatcccaatccatcttttgcacaatttgttcacaagagtaaggatttccttcaacaaaatgatcaaccactatgcgttgcacagttgacatccttcaaatgtggaggcttcgcaatagggttcacaaccagccacaccaccttcgacggtctaagcttcaaaacattcttggacaaccttgccgcattggctgctaacaagcccctggctgtgataccctgccacgataggcacctcctggccgcaagatctccgccacgtgtcagcttcccgcaccacgagctgatcaagctcgataacttacccacaggcagcaccg

SEQ ID NO: 34473 - DNA, 408 bp, Glycine max
  Clone ID: PAT_MRT3847_131131C.1
aaaaaaaaaaaaaaaattaaaaaaaaaaaaaaaaaaaaaaaaaaagaaaaaaaaaaaaaaaaaaaaaaagaaaaaaaaaaaaaaaaaaaaaaaaaaaaaaaaaaaaaaaaaaaaaaaaaaaaaaaaaaaaaaaaaaaaaaggggggggcccccaataaggggctctgccacccgggaaaaaaattcgggccgggcccctggggggtcccaatttttccttaaggggggggttataaaagtgggggaaaaaaagggaaaagggggttcccggggaaaaaaggatttccgtgaaaaattccaaaaaaaaaaaagccgggaggaataaagggaaagcccggggggccttaagggggggccaaacccaaataaatggggtgggccaaatggcccttttccaaaggggaaaac

SEQ ID NO: 34474 - DNA, 437 bp, Glycine max
  Clone ID: PAT_MRT3847_131132C.1
gggaaagaaggacccaaagctttttcgggatttatgacttatacactttgggttttaaaaacaagtttgggggccgcatgatgtaaccaccgacaatttataattggaaattggaagtttttggacatttcttaagcaagccccattttgggtttgacacgaccaaatttgttaccagaaaggccaccattcaataaaagtttgacacaaatttttcaccggcgttgactgaaaaatgagcttttgcacttggtcgctgacatccaaaacttgtgtaggcttgaaatcccttcctggcaatttttggtggactcgatctacgacttggagaaccccttgattgagggccttattcgtttttggatccaaaggattacttttattcacgcccacttgttttgatgtaccaagcttattgggccccggtccaccttttt

SEQ ID NO: 34475 - DNA, 319 bp, Glycine max
  Clone ID: PAT_MRT3847_131133C.1
gccatttgaagatattcctctcatcaaatatagagattataccttatatggttacactttatcctagtttgttgcttctttgtactgagggtgtggtcattcgttaaacgtactatacactttctttttatatctctataaatcttaacaccctctctacaaaactaccctcttcatctttacaaattctcttatggtgatagcatcattttaaactactaatccctccttcactttgtttactcttcttatactttaaataacctcttatatttcatgccatcactggtaaattttgatagtcattttcttcatttca

SEQ ID NO: 34476 - DNA, 485 bp, Glycine max
  Clone ID: PAT_MRT3847_131134C.1
cttatgtgttggtgctttgaccaaatggggccgaggaggagtcaccactgccaaaaatgttaagatgcgaacggatagattgggtctgaaacctaacagctatagacgaacgtagaaagacttagacagtgcatgttttggaggtgaacacataccacacacacagattgcactgcaattgcgtgaaaactagccctgggcagatgagaatgactgtcgttgataaatttgtttgcaagtatattaggagtgtgtaattcgcacgtaccgtaaaggaagggtactgtcgagctggaatttaccgcaatggtaccaagtcatttggactattcgaattatactttagattgctgaaaaaagtcatgcgatcttgacgattcatatatagatacgcattctgccggcggggtagcttatctaaggctgtaccttcccaacagatcgctgccgtgaatgggacaccgttcacacggaaaaataatgcg

SEQ ID NO: 34477 - DNA, 393 bp, Glycine max
  Clone ID: PAT_MRT3847_131135C.1
cccacgcattcagacacacgtacgctctccaacgctacagggtctgacgcgaaaacccaggtggaatacatatcgaagagcgtcgaacagcacacactctgtactgttgggcgtctctatctcaactgtaattacggatcaatctcttacaattggtctccacccagaatgaaaactaaccgagacatcatttacaccaggctagctacacaggcttgtactctgaaaacaatcatccagagctgcactagtataatattatgatcataaagcacgaaccaacgctataatcgctattttggacactgagttcaacgcatccaaagtaccatgataaattctttatctataccgcgggatcctagtactagctactaatacctgatatgatta

SEQ ID NO: 34478 - DNA, 173 bp, Glycine max
  Clone ID: PAT_MRT3847_131136C.1
cctacacaaactgtgtttgggtacagtttggaacaggaggaattttgacattcccaaaacctcatttccaacaacgttacttaagcaaccagctcacaaaatattaccacaaaaactacgcagcaattgatgacacaagcaattcaccaccctattacctcaacacaatcaat

SEQ ID NO: 34479 - DNA, 194 bp, Glycine max
  Clone ID: PAT_MRT3847_131137C.1
gcggcctttttttttttttttttttttttttggtagtaaaacacagggctttgttgatccccattaacaaattttgtggaggtgattgttgtgagcacagaatggcttggaaggagatggattaccacaacgaaaacagggtttatgtgttggcaagcctgatatttttaaataggggactgtgctgtagccac

SEQ ID NO: 34480 - DNA, 280 bp, Glycine max
  Clone ID: PAT_MRT3847_131138C.1
ataaaaaaaaaaaattttttatcctaaaaaaaaagcaaaaaacaaagggtgaaaaaatgaaaaaagcaataggataaatatacaacaacaacattgcaaaccatgaaaaaaacctatggcaaaaagtgattgtcatggaagggtcatattacaaaaaaggggggggggcgcccccttttctacctgatcccccggaaaatatttttggccgcggattccacgggtcgtattttttctctttaaaatggggcgatgcaaacctggtttgatgaatgcccct

SEQ ID NO: 34481 - DNA, 510 bp, Glycine max
  Clone ID: PAT_MRT3847_131139C.1
gattattattaaattaaaaatttaaaaaaaaaaaaaaaaaaaaaaaaaaaaaaaaaaaaaaaaaaaaaaaaaaaaaaaaaaaaaaaaaaaaaaaaaaaaaaaaaaaaaaaaaaaaaaaaaaaaaaaaaaaaaaaaaaaaaaaaaaaaaaaagggggggggcctttttaaagatcccatttttacttccgcgggctggcaaaataaaattttttttttggggcccccaaatttaatttcatgggcggggttttaaaaacttgtggaggggaaaaccccggggttccccaaattaattggcttgggaaaaaacccccttttcccaagttggattaaaaaaaaaaaggcccccccaatcgccctttccaaaaaattgcccaccctaaatgaaaatgggaccccccctttaaggggccattaaaggggggggttgttgggggttaccccaaggttaacttttaatttggcaaggcccttaagcccggttttttgggtttttttcctttcctttt

SEQ ID NO: 34482 - DNA, 287 bp, Glycine max
  Clone ID: PAT_MRT3847_13113C.1
ggctcgagctctgatctgtttatatgtgttaactgcggtgcggctacgaagctcggtgtattgggcttcccacaccttggtcactgatcatgcatgtattgatgtgcacgtgcctattataactagcacatactctgaagggcttaccgacatgtttaacgttaacgccctgtatcagacagcatagactgagaaactagagcctctgtatgctactgtaagagctaacgattgatcatgtgaaggccgctgcacaaggagaaaagcacacattagtcgcgcatatt

SEQ ID NO: 34483 - DNA, 361 bp, Glycine max
  Clone ID: PAT_MRT3847_131140C.1
tctgcggccgccctttttttttttttttgtgctcaaactgttaacatggacaatgagatggttatatacgatttacaagacatacgtatttccatgacaagttttttgataatgacgcctttaaatcggccacctccgttctctttactaaaagatatgatccttttctaatatatatcttcaacaacttgctttcataccggacgactggcgttccttactatttccatagattggctaccactaactatttaatggaaattatattttgctgtcgacaaaacccttacaaatcacgtggcgggtttaatcaatggtcaaccttgaaaaataacggggagggctaccctatttccatgag

SEQ ID NO: 34484 - DNA, 343 bp, Glycine max
  Clone ID: PAT_MRT3847_131141C.1
cggacgcgtgggcgagaagacaacagatgggctttaaacatggcaagccagtggaggtacaaaatccaagtggaaacacgtttcattatcaacagacgccgagagtttcctatcgacagaatattaatactgctatacacttgtcactgaggagagaagaacgtatctggagcgagcaacgttcaaacatgggaactagtatgacggagacacattctctcaaatgaacactgtattggctagcatccagaggggcttctgttcaaaaatatattgcatcaagaatctatgcgaaggaaatgatcttcagggcaccctcaaactctattgatgttagcatgtg

SEQ ID NO: 34485 - DNA, 585 bp, Glycine max
  Clone ID: PAT_MRT3847_131142C.1
ctcatcaaaaaatacaactcttcagatcaccctattgattgtgtggtatatgaccctttggttatatgggtattggatgtagccaaagaatttgggttatttggagctgcttttttcactcaaatgtgtgcagtcaattacatatattatcatgtctaccatggacttcttaaggtccccatttcatcacctccaatctctattcaagggcttcctttgcttgatctaagagacacaccagcctttgtttatgatcctggattctatccagcttactttgacttgttcatgaatcaattttctaacatccacaaagcagatatcgtccctgccaattccgcccgcgagctggaggagcaggtggtggattccatgtcaaagctatgtccaatattgatgattgggccaacagttccatcctttcacttggacaaggcagtcccaaatgacacagacaatgttttgaatctctttcaagtagattcatcagccattagttggctgagacaaaagcctgcagggtcagttatttacatatcatttggcagcatggtgtgcttcagctcacagcagatggaggaaata

SEQ ID NO: 34486 - DNA, 524 bp, Glycine max
  unsure (1)..(524): unsure at all n locations
  Clone ID: PAT_MRT3847_131143C.1
cttagttctaactctcccacctgttttagacaaccttgttccaatcccttctttccaaccaaaagttctttgttgggattgatgtctcgtctgaggctaggaaagaagctccaacctgctaagaaggcttggaagagcttcttcaacaaagtgcaatcaaaagtccaaaaactcaacattcccaaagccatcaaagccaccttcaaacgcctccttgcctccttgcactcccttcatcacctcataccctcaagagctcgtcatcgtcgctctctcgcttcgaataattaccatgttcatagcaagaagaacatatctgtcataagcatagatgatctctttactgagcctgcttcttcttcttcttcttctgtgatgaatgtgcatgcacatgcacatcatggggaaacaagcagaagcaaagaggtgaaaaaggatttggcagaagggagcagtgatatgaacactatagaggatgcatggaaggctttggttgctaagtcacctcaactgcangtagatca

SEQ ID NO: 34487 - DNA, 322 bp, Glycine max
  Clone ID: PAT_MRT3847_131144C.1
cggccggaatgccggggccgccccacccgtccggttagggttaaccggaagctcctgcacctttgggggaaaaattttgtacgctaaggaagaccatttttaaaaacctagatgtcaatttttcgaggaaattatgggcataggctccagcagcgccaaattggtcctcattttggagggtttcaacagttcgttggccggaaaaccccaggcttaggcccgatgcctggccttttttggtcatgccaccaaagttgcccctgtgggggaccttaaaacaagcggtccctgacctttgacctccggcgatcaataatcaatg

SEQ ID NO: 34488 - DNA, 1938 bp, Glycine max
  Clone ID: PAT_MRT3847_131145C.1
ccaagtttgtgaatagggaaccgtaaagggagccctaagttatagagctttatcgggattatctggcgtttgtgcgtagaaatttagttttgtttatctttttttttttgcgaagcaaaaagtatactttacacataagcatcataaaaatatacatcattaacttgcaatgcacccttggtcacacaagtgttccaaatccatttgtgcccccacttcacaatggccagccaatattacatttcggccataacacatttcaattttcaaacctccacctgcctattttttttcaattttatttaaaattaggaattaaaaagaagagagagagaaaaaaataataacccctaatcatgaatcaccggcaaccggctgcgccaaagttgttccatcccgatccgacgtcgtactgctactcgcagcacacaaacacggcctcagcttattcctccacacatccctaaaaaccccaccatccccatcccttcttctaacctccaccacaaccagctctcccggtaaccggtacacctccaccaaagcagcgaaattacccccacacccctccaactccaccccacactccttcctcatcctcaccacaaccccctccttctccgccgccgccaccagcatctccaccaccttctccggcgactccctgagcaaaaacctctccccctcctccaccccacacgacgaatcaaacaacccagaaagattcaaccccgtagaaaacgaaattatatcaaaagcattcaaatccttgacaccctcaccctcactcttccactccaaacccaaatccccaaactttacctccttataccccttcttaaaccacgtgtccttcatgatctcatcaacggttattctcgtatcaggattcgtatccaacaacctcgtcagaatcctccttaactccatcgaaaaccacctcggacaccgaaactcccctttgtaaatcttcttatacataaccatcaaattaggatcattaaacggaagatacccagcgacaagaacaaagaggataatcccacatgaccaaacatcaaccttcgccccatcgtaacccttcttcgcgagaatctcgggtgccacgtaagcaggggtcccacacagcgtgtgaagcaacccgtccacccctatctggtccttcaccgcgctgagtccaaagtcggagactttaaggttgccctgctcgtccagcaggagattctccggcttcaggtcgcggtggaaaacgccgcgcgcgtggcagtacccgacggcggagatgagctgctgaaaataccgtctcgcgagatcttcgctgaatcggctcttcgcgattctcgcgaagagctcgccgcccttcgcgaattccaagataaagtagatcttcgtttttgtagcgagcacttcgtggagtttcacgatgtttgggtggtggaggcggctcatgatggaaatctcgcgtttcacgttggaagctaaccctgacgagtttagtttctttttgcttatgactttaaccgccacgctctgcccagtctcggtgttgcgcgcgtggtacaccttcgcgaacgcgccgcatcctaggagccttccaacctcgtattttccgaacagggcggtgttgttctcctcctccaccgccgccgccgccgcgctttcggtttctggcattggttttcttacttcttcggcgaccgtgctctcgtgagagagaacacgatcggtttgggaaattgagggttaatgtgagttggtttaaataggatcagggaaattgagaggaaattgtgggttgggggaagcgaagcaagaaacgtaattttgaatgaattggtttaaaggttgttctttgctggcttaagttgcttctgtttgagaagtttcaggaaacaacaacggcgttggagaatcgcggactggtttataagttggtgc

SEQ ID NO: 34489 - DNA, 565 bp, Glycine max
  Clone ID: PAT_MRT3847_131146C.1
gagagaactagtctcgagttttttttttttttttttattcaaagatatttcgattttcttttcttctgcttttaacgagctttttaccatttatttaattcgttatctcgcctaataaatgataaaatgaatttcaaccgatcattttgtgttgtaatctcgtttaatcactgttaaaataaaatccaaccgatcattcacgctgtaacctcggttaaataaaaaaaaggcaaaataataataaaaaatcaaaatatcttgaaaaataataataataaaataatcaaaatatcttgaaaaaataataataaaataatcaaaatatctttgaataaaataatcaaaaaaatcaatcagacgtttttctttgagagtttccttgaatgaattgactaataaccaaagtgaaactaaggctaaaatcaactcacaaatcaagctttgtccgcaaaagtcactcaaaaccattttaaggtccaacaccttaaacggtcctctttgcttttatcggttaatatggaccgttcaaaagcataaaatcaacccataactttaccccttttgc

SEQ ID NO: 34490 - DNA, 189 bp, Glycine max
  unsure (1)..(189): unsure at all n locations
  Clone ID: PAT_MRT3847_131147C.1
cgatcgttcttctcattgagtttggntcgtcttgggaatcagatctgnctctctaccgtttggattcaattacgacacttttcctcgcctcaaagattagagcgaacaacatggcttgtcacttgctcgcatcccattgtgagcaacatctgggacaagcgctagttctctagaacagttcgtgtgata

SEQ ID NO: 34491 - DNA, 928 bp, Glycine max
  Clone ID: PAT_MRT3847_131148C.1
tgaattgggctcgagctattattctcgttttcaatatgcagatcttcgtcaaaaccctaaccggtaaaacgattacgctagaggtcgagtcctccgacacaatcgataacgtgaaagctaaaatccaagacaaggaaggcattccaccggatcagcagcgtttgatcttcgccggtaaacaactcgaagacggcagaactctcgccgattacaatatccagaaagaatcgacgctccacctcgtcctccgccttcgcggtggcatgcaaatcttcgtcaaaaccctaaccggtaaaacgattacgctagaggtcgagtcctctgacaccatcgataacgtgaaagctaagatccaggacaaggaaggcattccaccagaccagcagcgcttgatcttcgccggaaaacagctcgaagacggcagaaccctcgccgattacaatattcagaaagaatcgacgcttcatctggtgcttcgactccgcggagggatgcagatcttcgtgaagacgctcaccgggaaaactattactctggaggtggagagttctgatacgatcgataacgtgaaggcgaagattcaggataaggaagggattccaccggatcagcagcgtcttatcttcgctgggaagcagctcgaagacggacgcactctcgccgattacaatattcagaaggaatccacgcttcaccttgttcttaggctccgtggtggcgatttctagtttcagttgaatcttgctattgagattttctcttccttgaatgtgtatgatataacaaaatttctatgtctatgttgtccttaggctccgtggtggccttctctagtttggttgaatcttattaatcatgtgcacttcaatttgaatgaattccaataatagtttcttcgttttgtaatagcaaattgttatttgtctct

SEQ ID NO: 34492 - DNA, 526 bp, Glycine max
  Clone ID: PAT_MRT3847_131149C.1
agaaacattagtttctcacttttaattgggagatattttttattcacacaaaatctcaataatggacaaattagtaaattaataatcataagaaagagtgattttgattccacctctgggccctaaattagtagggagggggactcaaattaggattaggagattagatggaattcgatggaatccattagagaccaaaatctcatgtgcaacctcgaccatccttcgatccactccatcgtgctccccttttgaacactgtaatttcgctcatgaaaactcttgctttaaattatctaaacactgaaactctccatatgcctggcttgccattgaccttggaatttccaagcctgcaacaggacaccgacgatcttccgccccaccaagaataatcaatggacgcggtgcgattgttggaattgaatagggtgaatcaaattgggaagctaaacccaggagctttttttgtgccaacccctttctccaaccactttgttttggtcaattaaccattctttttccc

SEQ ID NO: 34493 - DNA, 515 bp, Glycine max
  Clone ID: PAT_MRT3847_13114C.1
tcctctagagcggccgcttttttttttttttttttttttttttttttggcacccttattttcctgcatttcgttaacataaatcttaagcatatctgaaggactattgtggggtggaaatttctgaagcacctcacctaattacaaccatattgttttaaaaattatatttatcaaacaggtctctaaagagaaacctctctctctgtgtttacctagcgggaaaaggggtaggaagtttacgacccatatctggaaaaacaaaccaaccatcttgccaaaggcccaggaactcacatcctgctccaaagtaaactattagagcgaagtcccatgattaatcctactttttcctatcgcggatgaaaaattgcacaatgcaggcgaaggccccttatcccgagccgcctcctaagaaaccaggcccatgtgtaaaatcattcgcttaacggacatcacatggatgaagcttgctaagggagggcttatttaactgctgttaacagcgaagccttc

SEQ ID NO: 34494 - DNA, 727 bp, Glycine max
  unsure (1)..(727): unsure at all n locations
  Clone ID: PAT_MRT3847_131150C.1
ctcccactactttgttgcattacacgcaccaaccagagagtgagagagagagaagagactcttccttccttcaatttcttcaaccaccaccagcatgcaagactccggctccatgaagatctcccctctggatctcatgtccgccatcatcaagggcaagctcgacccctccaacgtctcctcctcctcctccaacgccgcagctgccgtcctcctcgagaaccgccagttcctcatgctcctcaccaagaaggtcaccatcttcttcggcactcaaaccggcaccgccgaaggcttcgccaaggccatagcggaagaggccaaggcgcgatacgataaggccacgttcagagtagtcgatatggatgattatgctgccgatgacgatgaatacgaggaaaggttcaaaaaggagactcacgctcttttctttntagctacatatggtgatggtgagccaactgataatgcagcgagattttataaatggtttacggaggggggtgagaaaggagaaggatggcttgagaatcttactatggtggtgtttggcccttggaacagggcatatgagcattttaacaaggtggcgaaagtagtggatgacatgcctgctgagcaagggggaagcgtcttgtgccagtgggcctaggagatgatgaacaatgcattgaggatgactttactgcatggaaagaagaactctgccagcattggatgacttgct

SEQ ID NO: 34495 - DNA, 264 bp, Glycine max
  unsure (1)..(264): unsure at all n locations
  Clone ID: PAT_MRT3847_131151C.1
tattctctcctcaatgggaagcaaccaagcngccatttccttcatcacaaaantcganatancggacttnggccttggngcggnggnnannggcctctcctcctcnntctanaccgtggacggcgggcagcgcgcngtnctcttngaccggttccgnggcatcctggactncaccgtcggcgaggggaccacttnctggtccnatgggtccagaaaccctacatcttngacatcngnatggcnnacanaattctcctcggtntc

SEQ ID NO: 34496 - DNA, 3109 bp, Glycine max
  Clone ID: PAT_MRT3847_131152C.1
gtgcctgcaggcttcagaaatttggagcatgatatcacaaggagcttacatttatgtgtgtggtgatgccaagggcatggccagggatgtacaccgcgccctgcacacaattttgcaagagcaggtatatgtttttaaataataaaatcttgaattgccttaaattgatggcatgggtgattgcgaatttggtgccttatattagtggctgcttctacctgcagcaatttttttatttaagatttgtggttgttaacatataattccaaacaatatatcttcgccacgtagacatcatgtctatttttgtagaggttgtctcttctgtgagggcacaagggtttaggacttctgtaatatttttcactatgagttttccatttccacaagaccttttgctcgtcgagctcgctctctctcaactccccccttcggcgggcgccgctcgctctctctcaactcccaattactttgttgcatttcacacaccaacttcccatagaagagagaagagagaagagactcttccttccatcctgcaactcaaatcatcatgcaagactccagctcaatgaagatctcccctctggatctcatgtccgccatcttcaagggcaagctcgacccctccaacgtctcctcctccaccaacgccgccgccgccgccttcctcctcgagaaccgcgacttcctcatgctcctcaccacctccgtcgccgtcctcatcggctgcgtcgtcgtcttcatctggcgcagatcatcctcccccaaggccaagcctctcgagcctcctaaacgcgtcgtcgagaagcttcccgaaatcgaagtcgacgacggcaccaagaaggtcaccatcctcttcggcactcaaaccggcaccgccgaaggcttcgccaaggccacagctgaagaggccaaagcgcgatacgagaaggccacgttcagagtcgtcgatatggatgattatgccgccgatgacgatgaatacgaggaaaggttcaaaaaagagactcacgttcttttctttttagctacatatggtgatggtgagccaactgataatgccgcgagattttataaatggtttacagaggggggtgagaaaggagaagggtggcttcagaatcttcactatggtgtgtttggccttggaaacaggcagtatgagcattttaacaaggtggcgaaggtagtggatgacatgctcgttgagcaaggggggaagcgccttgtgccagtgggtctaggtgatgatgatcaatgcattgaggatgactttactgcatggaaagaagaactgtggccagcattggatgaattgcttagagatgaggacgatgcaactgtgtctacaccttatactgctgcagttttggagtaccgggttgttattcatgatccattggaagcatctgtcgacgaaaagaagtggcataatgtaaatggtcacgccattgtggatgctcaacatccagtcagggcaaatgtggctgtgagaaaggagcttcatactcctgcatctgatcgatcttgcactcatttggaatttgacatttcaggcactggagttacatatgaaactggggaccatgttggtgtttactgtgagaatttgtctgaaactgtggaagaggcaataaggttaataggtttgtcaccagatacctatttctcaatccatactgatgatgaagatggcaaaccacgtagcggaagctccttgccacctacattcccaccctgtactctaagaacagcacttgcacgatatgcagatgttttgagttcacccaaaaagtctgccttgcttgccttagctgctcatgcatctgatccatctgaagctgatcgactaagacatcttcgcctcacctgctggaaaggatgaatattcagagtgggtgattgcctctcagagaagtctccttgaggtcatggctgaatttccatcagccaaacctccaattggtgtcttttttgcagcagttgctcctcgcctgcagcctagattttattcgatctcctcatctccaagaatggtgccaaacagaattcatgttacctgtgcattagtacatgagaaaatgcccaccggaaggattcacaaaggagtgtgttcaacatggatgaagaattctgtaccattggagaaaagccaggactgcagttgggctcctatttttgttaggacctccaactttagactcccttctgataataaagtgcctataatcatgattggtcctggcactggattggctcctttcagaggtttcttgcaggaaagattagctctgaaagaaggaggagctgaactcggcccctcagttttattctttggatgcaggaaccgtcaaatggactacatctatgaagacgagttgagtcacttcgttaatactggcgcacttgatgagctcattcttgccttctctcgagagggacccaccaaggagtatgtacaacataaaatgatggagaaggcttcagaaatttggagcatgatatcacaaggagcttacatttatgtgtgtggtgatgccaagggcatggccagggatgtacaccgcgccctgcacacaattttgcaagagcagggttctctcgatagttccaaggctgagagcatggtaaagaatctacaaactactggcagatatttgcgcgatgtatggtgatgatatctgaatgcaagccgtgggggtgacgaagatattaataaaacatagagttgtggctagaggattttgaaagggccttatttgtgccacctttcattagtgccctcaaaattgagggggggcgcttgttgccatcacgacgacatttcctacgattctttttcactatattttctaaaggattctttttggttcgtgtaatttattatatactgtttatacctagactatgaactattttacttcagttttctttttgtaatgtatgatgaacctcaaagaaaggttcagagacgcagacaattccttgtactgtatgaactataaaaaaatgtttggaggtaaagaaattattttgtgcaagtgttattattagatttaaatttaatatcccaaaaaatgcaataatcccatgcaaattactatta

SEQ ID NO: 34497 - DNA, 696 bp, Glycine max
  unsure (1)..(696): unsure at all n locations
  Clone ID: PAT_MRT3847_131153C.1
gtgccctgcagtgcttcagnaaatttggagcatgatatcacaaggagccttcatttatgtgtgtggtgatgccaagggcatggccagggatgtacaccgcgccctgcacacaattttgcaagagcaggtatatgtttttaaataataaaatcttgaattgccttaaattgatggcatgggtgattgcgaatttggtgccttatattagtggctgcttctacctgcagcaatttttttatttaagatttgtggttgttaacatataattccaaaccaatatatcttcgccacgtagaccatcatgtctatttttgtagaaggttgtctcttctgtgagggcacaagggttttggtcttctgtaatatttttcactatgagttttccattttccaacaagacctttttgcttgctaacttagtgaattttttaaaaaatgaatctgtggctaatcaagttcctttgtgaatatcaatatatncagggttctctcgatagttccaaggctgagaacatggtaaagaatctacaaactactggcagatatttgcgcgatgtatggtgatgatatctgaatgcaaccgtgngggtgacgaaaatattaataaacataanattgtggctagaggattttgaaagggccttatttgtgccactttccattagtgccctcaaaattgaggggggcggcttgttg

SEQ ID NO: 34498 - DNA, 541 bp, Glycine max
  unsure (1)..(541): unsure at all n locations
  Clone ID: PAT_MRT3847_131154C.1
ggctcgagccagtctgggttggtgggcgttgttggttcagtgttgtggtgtttgtttccctcccaagaatataacccccctctccactcccacccgtttctttcttcagagtctctctctctctctcaactcccaattactttgttgcatttcacacaccaacttcccatagaagagagaagagagaagagactcttccttccatcctgcaactcaaatcatcatgcaagactccagctcaatgaagatctcccctctggatctcatgtccgccatcttcaagggcaagctcgacccctccaacgtctcctcctccaccaacgccgccgccgccgccgccttcctcctcgagaaccgcgacttcctcatgctcctcaccacctccgtcgccgtcctcatcggctgcgtcgtcgtcttcatctggcgcagatcctnctnccccaaggccaagcctctcgagcctnctaaacgcgtcgtcgagaagcttcccgaaatcgaagtcgacgacgggcaccagaaggtcaccatcctcttcgcactc

SEQ ID NO: 34499 - DNA, 309 bp, Glycine max
  unsure (1)..(309): unsure at all n locations
  Clone ID: PAT_MRT3847_131155C.1
tcngnannnaannannaaanannaaaagaaanagngaaanacagaanaagaaaaaacnanaganaaanaagagnannagganaangnataaaagnagnnaaagaanancaaanaanaanagaaannagatgnccaagagggaagataggangtagaannagngnannaaacagnaanagaganagatcaaatngaggaacncatcaacggncagnacnagnngaagatgaaaaggccaatnanngaggttaacanacaagggagaagagaagnaatntgcngnagaagaaannacntcnaanganncac

SEQ ID NO: 34500 - DNA, 1213 bp, Glycine max
  unsure (1)..(1213): unsure at all n locations
  Clone ID: PAT_MRT3847_131156C.1
gtttccctcccgcaatataacctcctctctcccacccttttctttcttcagagtctctctctcaactcccaactactttgttgcattacacgcaccaaccagagagtgagagagagagaagagactcttccttccttcaatttcttcaaccaccaccagcatgcaagactccggctccatgaagatctcccctctggatctcatgtccgccatcatcaagggcaagctcgacccctccaacgtctcctcctcctcctccaacgccgcagctgccgtcctcctcgagaaccgccagttcctcatgctcctcaccacctccgtcgccgtcctcgtcggctgcttcgtcgtcttcatctggcggagatcctcctcccccaaggccaagcctctcgaaccaccaaagcgcgttatcgagaagcttcccgaaatcgaggtcgacgacggcaccaagaaggtcaccatcttcttcggcactcaaaccggcaccgccgaaggcttcgccaaggccatagcggaagaggccaaggcgcgatacgataaggccacgttcagagtagtcgatatggatgattatgctgccgatgacgatgaatacgaggaaaggttcaaaaaggagactcacgctcttttctttntggctcgaggtgatggtgagccaactgataatgccgcgagattttataaatggtttacagaggtgagtttgagactgttccggtggcattaaggttgagagcttatgtgttgactttgtgtgcttttgtggaggatttaggggggtgagaaaggagaagggtggcttcagaatcttcactatggtgtgtttggccttggaaacaggcagtatgagcattttaacaaggtggcgaaggtagtggatgacatgctcgttgagcaaggggggaagcgccttgtgccagtgggtctaggtgatgatgatcaatgcattgaggatgactttactgcatggaaagaagaactgtggccagcattggatgaattgcttagagatgaggacgatgcaactgtgtctacaccttatactgctgcagttttggagtaccgggttgttattcatgatccattggaagcatctgtcgacgaaaagaagtggcataatgtaaatggtcacgccattgtggatgctcaacatccagtcagggcaaatgtggctgtgagaaaggagcttcatacttctgcatctgatcgatct

SEQ ID NO: 34501 - DNA, 1605 bp, Glycine max
  unsure (1)..(1605): unsure at all n locations
  Clone ID: PAT_MRT3847_131157C.1
gagaggagagaaggttgtctaaataaagggcacaaaaacaatacaagttaattcaaatttgaaatgaaaacttcgaacttttgaagatctttggaatctcacaactgtcaccactcgccagtgtttatccattcggattattccctagatctgatcgagcaatgcactcaaaccgtgggtgaaaaacctttttaatcatctggagttttgattttcctttccagggaatgaaggaagttgtccaagttaagatctggagctgtgatgctgctttgacttgctgagtttgtttctgggttggattgtttttgcttgaaattgattgacttgtttccacatttgaatttatacaatggttttctgggaaggatatgtgagcgatgaattgatgggcacgtttgcccctatcgtgctttattgggtatatgctgggttttatcacttgctcccacctttagataggtatcggttgcataccaggagagatgaggaaacgaagaatttggtgcccttttcaacagtagtgaagggtgttttacttcagcagcttgttcaggcaattgtagcactcttcttgttgaccgcaacagcaagtgcatctggggttatagtgcagccttctatccccaagcaaattttgcagatcgccattgcaatgttcgtgatggatacatggcagtactttgtgcatcggtacatgcatcagaacaagttcttatatcgccatatccactcccaacatcacagacttgttgttccttacgcaataggagccctttacaatcaccccatcgagggtcttctacttgacactgtaggtggtgccatctcatatcttgtctcagggatgactgcaagaacagcagttgtattcttctgctttgccatcgtgaaaacagttgatgatcactgtggattgtggttgcctggcaacatcttccatatctttttccagaataacacagcttaccatgacattcatcatcaactgcaagggctgaagtacaattattctcagccattcttttccatatgggacaaacttctcgggacatacatgcctttcaatcttgtaaagcggcctgaaggggggttcgaggcaaggctagcaaaggaatagtcacactgtaattgttgaaactcacatctgatggcatcatttttccttaggaccagaccagaggctttaccactgtaggcatttctcaagttcattggagcttactggctttttcagttcatcgtgttactttaggtttgccaacccaccttgtgtagcataactatgatgatgtgattaaggagtcttttcattatttattatgaatttatgatgtacttaaaacacatttttgaagctgtaagttgctaaaagagtaccgtaccgggtttttacgctggtattatttgtgattcctactactggttcacttgtataatttattatgaatttttattgtaatccagaaccattgggttgtcgaagatatcattataatccatttacttttgaatggttaaaaaaaagagttaaaaaaaaaannnnnnnnnnnnnnnnnnnnaanaaaaaaaaaaaaaaaaaaaaaaaaataaanaaaaaaaaaa

SEQ ID NO: 34502 - DNA, 414 bp, Glycine max
  Clone ID: PAT_MRT3847_131158C.1
cacagatatgaaaccggggaccatgttggtgtttactgtgagaatttgtctgaagctgtggaagaggcgataaggttaataggtttgtcaccagatacctatttctcaatccatactgatgatgaggatggaaaaccacttggtggaagctccttgccacctacattcccaccctgtactctaagaaaagcacttgcacaatatgcggatgttttgagttcacccaaaaagtctgccttgcttgccttagctgctgatgcatctgatccatctgaagctgatcgactaagacatcttgcctcacctgctggaaaggtttaatattttattattttatatcaagggaattttaagtaactttttctacttatttttctcattcgtatgctactcttgtgtgcctttgtaggatga

SEQ ID NO: 34503 - DNA, 556 bp, Glycine max
  unsure (1)..(556): unsure at all n locations
  Clone ID: PAT_MRT3847_131159C.1
ctgaatttccatcagccaaacctccaattggtgtcttttttgcagcagttgctcctcgcctgcagcctagattttattcaatctcctcatctccaagaatggtgccaaacagaattcatgttacctgtgcattagtacatgataaaatgcccactggaaggattcacaagggagtgtgttcaacatggatgaaggtacttatatttgtttcctatattatggttaaactatttaagatcggcaaagtataatctactaaaaagattgtctttaagtacaagtatcagcttgaatttgacaaaggaaatctatgccatggttgaatagtatttttattatcaatgcctggccacttttgatgacaatacctggttcttttagatatccataatcttctgagtttatttttctccatttcaaaacaaaacttaccatttggtttgatgtccagaattctgtgccattggagaaaagccaggactgcagttgggctcctatttttgttaggacgtccaactntagactccctgctgataataagtgcctataatcatga

SEQ ID NO: 34504 - DNA, 484 bp, Glycine max
  unsure (1)..(484): unsure at all n locations
  Clone ID: PAT_MRT3847_13115C.1
ccgtagagagcagaccgaccgtctttacttgtcgtgctgagtataagcactcctaacagacattcccgctacaaacaacaccgccgctagacattcccgccacaaacaacaccgccgccagacattcccgccacaaacaacaccgccgccactcgccccctaaactacaatctccggatatcgccttcacgatacactcatctaaggagttagcgaagtgcctttgatgaccaaaacctgcttgtcgaacagcgccttgcagttgggtcccagcttgccagtcattccagcgttgtccgacacatcgaggatatccaggttcaaggcacagagctcctcgggcacgttgccagtcagctggttgcccgagaagagaatctccttccattccttgttgnttccaaagctggcagggatctcgccagtgagctggttgttggtcaaaggaatgtaccgtgtcttgatgtttccgacctctggaatt

SEQ ID NO: 34505 - DNA, 370 bp, Glycine max
  Clone ID: PAT_MRT3847_131160C.1
ggctctccaggctgctcctattgttcctgcttctttctcggttcttaaagagggaaagagaggtgtgtctctcaaggactccaccttggtcggtctttcattttcagaacctatcaaagctaacttcatctcttttgcattgatgtgcaataaggaattcgaaccaaagctctttccggggagggccgaacaggggctacagcctatcagcattatccattctcaccagaaggaataaacattgaggatggcatgttgtgataactggggcttctctggactaggcctgccactgctaggcttagctgaacgggaattgcatcgtaaatggcctgctaggattaccgcaagctgcagaactgcactgcgc

SEQ ID NO: 34506 - DNA, 287 bp, Glycine max
  Clone ID: PAT_MRT3847_131161C.1
gagtattttgtaagaaggagcatcctaacaacaaagccggggctggggtcggtaaagctggtggagacaaatggcaatcgctggctgatgctgaaaaggcccccttcgctgccacggccgaaaagaagaaacaagagtatgagaaaactatcttggcttacaataagaaatgggaggggacgaatccagaggaagacgagtctgacaaggcaaagtctgaagtcaacgacgatgaggaagatgaggacgaggaggatgatgatgacgacgagcgaagacggtgatac

SEQ ID NO: 34507 - DNA, 488 bp, Glycine max
  Clone ID: PAT_MRT3847_131162C.1
cggcgccactcttcagccttcacaatgacttcttctctcattcgaacgctccaaagagcttctacatcgctcattcgaaccccgagactgtcaagcgcatactctgccacgtcgcgtgtcggagccagaacctacgcagcagaaccagaacccgcgaccaaatcgccctttgattccaacatcatacgaattctccgaaacgaaatcgagtatcaagaagaatacgctcctccacaccagcctgagactaaattcaattcgtttacggttgaagagcgacgtggggagcaagtggtcacaattaaaggaaaatttggggaatttgaggatgttaaaattgaggctaccatgtttgattggtgtgagcatgttcctgcgtgtggagatgatagttctggggtaaatttgcgtcttcaccttagtttaattgtggatatagcaaaaggggaagaaggtgacagtgagttggagtttgtgtgctcggcgtg

SEQ ID NO: 34508 - DNA, 452 bp, Glycine max
  Clone ID: PAT_MRT3847_131163C.1
ttcctttttttttttttttttttttttttttttttttttttttttttttttttttttttttttttttggggaaccctggaaactgcaagggaaagcccccacatctatcttttaattaaattcaatcatgttacaaaaatccttgaatccaaaggaaggggggaaaaattcccctgccaaaagaaaaaaaaaacattgctctataagcatctccgtaaaggaaagttactggagacttgaaaaaaaactaaaatttcctcttcctaatttgggaacccattgatcggaaaacattatcatccggtaacattggctcctcaagagggggaattgattcaggcttggtgaaagaggggaacaggagggaaatgccctccaaataaggggtgggcccccctgctttggttttcttcttgaggccatacgctaggggaaaaactcctctggtaaaa

SEQ ID NO: 34509 - DNA, 141 bp, Glycine max
  Clone ID: PAT_MRT3847_131164C.1
ggctcgagcgcaaacacaatactcaggtgtttctatcaaacctcttggactagagacatagaaatgactgggatcatacagatacacgatgccttagcaggatgatagtctctatgaggcatcagaataagatgagggagc

SEQ ID NO: 34510 - DNA, 232 bp, Glycine max
  Clone ID: PAT_MRT3847_131165C.1
tgacccgaacaacactcatcatttgcactctaatgagaaccccgcccaatactcagagggaatcgagctttatatttgcgcacgccaaaacaagcacgtcatgagtgcagataccgaaaacccccacacggaagtcttttaacgcgcactttcaggacaagtgcatatcgccgctaaataatcctacgtgaaaaccctcggtgaccaaaaggtttcccagccgctaaaatat

SEQ ID NO: 34511 - DNA, 175 bp, Glycine max
  unsure (1)..(175): unsure at all n locations
  Clone ID: PAT_MRT3847_131166C.1
atgagttccaaaagggangtagtcatatggctgctgttgttaangcnangggacaangcaacganactccacaaatcattgatgaagagcaatngcaggaaacanaagcattggtggggttcacagntgaccactccggtgntancagnagccaggatgcaaaatccaggagtgt

SEQ ID NO: 34512 - DNA, 248 bp, Glycine max
  unsure (1)..(248): unsure at all n locations
  Clone ID: PAT_MRT3847_131167C.1
gaaggagagcttgggcttctactcggttgagagaagagaggntgtcgtctggccttgtaccttgatttgtcttaaaaggaaccggatccggaacttccactttggaatctccagtgcatggggaactgctaaaactgattagcgatcaaacttggggggatgggactgaccttacctttagctcacaagcccttaggggagtgaaacatatgagaaaactttcggccgttcgtgatttgaccctacct

SEQ ID NO: 34513 - DNA, 349 bp, Glycine max
  Clone ID: PAT_MRT3847_131168C.1
cctaaaggtgggcgggtcccaggagtattcatcaaatatttcaatttggttctaaggagggaaatttggccggtagtattctccaaaaaggtggaccaaagtcttttttggtaaaattatcctttaaaagtatctttttggaaatatggacccatggaggttattaatggcctcctaaaaaccatgttggctatcgggacataggggatgtctagggggagagaccaggataggtctccctccgactgtgagaaagtagtaaatttttaccgtgggatctatttattttttaaagggagggttaaaactttttccctttttcttttttttttaactcatttcttggcct

SEQ ID NO: 34514 - DNA, 271 bp, Glycine max
  Clone ID: PAT_MRT3847_131169C.1
caacgatggcgactcagatcctctctcgcatcttccccaaaaccctaaccctagcccccgtcctgttccgatccctcagcagcgccccctctcgctcttccctgccctcgctctccttcctactccgtatctccgtcgcagccaaccactccctccgtcgagtcctcctgcgaaactccccctcactcacgtgccctatccacacgcaccaccacctgctacctcaacgaccacaaccctaactggtccaaccgttcgacgaaagaaacca

SEQ ID NO: 34515 - DNA, 709 bp, Glycine max
  Clone ID: PAT_MRT3847_13116C.1
gggctcgagaaatgcactattcatggatgtaatatcttctggcttggacagctccacgactgttcaaattatcaagtgtctcagacaaattgttcacattctagatggaatagcggatatctcattattgcaaccagagccagagacatatgaactctttgatgacattagcctcctctctgatggtcaaatagtataccaaggacctcgtgaattcgtccttgaattttttgaatctaagggtttcagatgtcctgagaggaaagccatcttccttcaagaaaatatcagatatatctatattccatgacatgtgacttcaaggaaggatcagcagttccgtttgataagagaaagaaccacccagcagcattaactactatgaagtacggggtaaacaagaaggagcttttgaaagctaacttctctagggagtatttactaatgaagaggaatgcattggtttacatcttcaagctatctcaagttttttttagttcgcgtttaaatgcaattatgtttgattattacatgattttaatgtgcgatttttctgcttcctttcaccactagcttgcactgatggtagtgttagcaatgacaggatttctgcgaactgaaatgcacaaggattctgtggataaagggggagtttacaccggtgctctttttttcttatagcaatgatcttgtataacggaatgactga

SEQ ID NO: 34516 - DNA, 387 bp, Glycine max
  Clone ID: PAT_MRT3847_131170C.1
aaaaaaaattttttgggttttttaaaggggaaaaaaaggggggcccccctgaaaaggccaaaatttttttccaaggtccctcccccccttttaaaccaaaaccacgcttatatgacattttgggggctttaggaaggattttgggaatttcaatccccaagctttttcaaggggttggagggccccttttttgatacaaaagttttttccggaaccaacctaccccggggaaacggggtgaaattctgggaatccccttgggtcaggccccccacaaatatggcaagggtttggtttctccccgggtggggtgggggaaaccccaagcatttggggggcgccctttgggtcccttaaaaagggttgaaccccctgggaaaggggggg

SEQ ID NO: 34517 - DNA, 997 bp, Glycine max
  Clone ID: PAT_MRT3847_131171C.1
gaggggcttaatttcttgcaggtttggacctgggccttccttgcaacagtggctctggactaaaggagttaatgatggggactccctccatgtttggtccaaagcaaaccaccctcgattttctcgggttggggatggctgctgggggcacccctggtggaggcttatcggcactcatcacctccattggtggtggtctggatgttactactgcggcggcatcctttgctagtggagaattccctggcaaagatattggaaggaggagcacttgatattttgggtgcaaggactatatttttcggggcgataagttctggttgtacagtgttatgtggtccttgcacattgtgaagttgcagttcaattgggggagaattagtaagaagatatagtatgctcctattgagcagtgctacaggcaattctgaacgggtcgttttggattatcctatgcctctaatgtgggcggaaaagaatgtatattttttattatatcaaagaagaggcccagagagccttctttccatgagtaatggcacgagttacaatattatgtttactctggaccactggatttggtgttgtgcagaaggttgaaattgatgttgggttggtttcattggttgtagcgacaatggtgaatttgaagacttcatctagagatcttttgcttatcgggcatctacagttttgaattaattctgctgttggatgatttggttggtccataatagtagcctgtagacataaatcaggaaacttctatgttttcttctactgttaagcagtaaatgggtggttgaatgtttatcgcgaagaatattgtcattatgttgtaaaattgtattccattgaagttcaattttttccccatgaatcaaattccacgttattctagcatcccctaggatgcaaaattgcaaccgttgcctataagattgtaatggtgtaattcctcgcaataaaaaaggatgcaaataatagcttccctagt

SEQ ID NO: 34518 - DNA, 675 bp, Glycine max
  Clone ID: PAT_MRT3847_131172C.1
gatgacaacaatcaattttccgtacctcttctcacctggttttattgttattttgcttttttcctgcgtgctggcattcttcttgaattactgtatttttctgaacacaacactaaattcagctgtgacacagacaatttgtggtaatctgaaggatctctttactattggccttggctggataatttttggtgggctaccatttgatttttggaatataattgggcaatttctcggttttgccggatctggcttatacgcctactacaagctcattggcaagtaacttattcaagtcctctagtgaagtcttttttcaatttgggagtgccatgtgcttcattcttttgcccatcactgcatcccttgagaagggggagaagaatctgaatcaaactaaggtttgggaacttgtggtcgactaatctatacttcgggaagttttgctaatacaagttgacatacaaacagtttctggggaatcagacgagaaaggatggccatggctttaatgtattcaaacatcaaacttctaatgatctagtttgtatgttcgcccattgcatttgatgaatctcatgcatatccttgtaagatgtaactgttaacaagcactgtattttgatagctaattcatcgtggacagaaaatttaaatctaccaattcatttcatt

SEQ ID NO: 34519 - DNA, 913 bp, Glycine max
  Clone ID: PAT_MRT3847_131173C.1
ccaagcgtccggcaggaatatagcctagagagagagactcataattgttcaatacccgtaattcatcaactacaactgagatatgcatctatggccgacaaagaatctccgagattccttcaagcattcatacctcaaaaggctcgaatggaactaccagagaatgaaagcggaaaaggaccaacaatcttcaacggaacagaaacttctggagaacgaaaaccacggatcaagagcaacaagggtgacgcacccaaggaacttaattgcgaggctggcgggatctatacccagggtcaggcactgtctgttggttctctcgtggttctaccggtgcttttgctgttgtacttgtgttggtgagaaatatggagctacttggcagggtttttatgctgtccttgtttctctgagtgaaaatttgtgccttgttcagtgatcatgattttaaaatgtagtccttgattttgatgacaatttatgtagaagtgtggaacttcaattttgatttgaaaatagtactaaagctcctatggaactgcatcaaagtttttttctccttttgattacttgtcaagtttgttttagttttagtttgaacatgctatctagtattgattgaaatctattggaaatcactaaattttgtaatctcacctcttatgtaatgagtttcactcatgattttatcttttccaattaattttaacaaataatagagaatgggttagaaagagtgtgttgctacaactcttcttttttgggttattggttttggaatcaacaaatgtatggttgttctagctattagggaatcggtcagtattgattacacaaggaagtagttcttgtgattttattttttcttgttggttctcccttgtatgattgattgagctggaagttagataag

SEQ ID NO: 34520 - DNA, 456 bp, Glycine max
  Clone ID: PAT_MRT3847_131174C.1
atttttgcaatcatgcaaagatcctatcatttccagctggctaatgtctaccaaaagttcaagtacagtggatgttgaggtttgcgttaacaaaactaacatgtgttacaccaatgaatctgaaaatagcgtctctatgtgtcatgaacaaaccttagcagatcatgcagtagcatgcatttttcagcttggcgtacactgcttagcatatggaggattattggctagcatttgttatggcccccattcacatttggtttgtcatgttcaaaatgttctagaacatgaaaagaattttgtattatattctcattaagggtcttgaaagatcatgtatgacaccttgtgaaagatccgatatataaacatgaatgttgggaataatcagcatttacagcttgtattgtaaaaatttcatgtcgtataatttaatattcatacatgtatatcaataaa

SEQ ID NO: 34521 - DNA, 469 bp, Glycine max
  Clone ID: PAT_MRT3847_131175C.1
gtttgtgggagcgtacgctattcatcattcatcgtgatcaatcaacgatccctggctgtgctcgtcgtctctgaagcgattttaatcaagcgtgggagggcagcatagcaaagcgaacatgtctatgtccgattccgattcctcttcttacgccggcgccgactacaaaagtttcaagcaaattagccgcgagcgattattacatgaaatgctgaggtcatcaaaaacaggggattccaaatcaacttggaaggtattaataatggataaacttactgtgaagataatgtctcactcatgcaagatgactgatatcactgatgaaggtgtttcattggttgaagacatatacaagagaaggcagccattgcccaccatggatgctatatatttcatccagccaaccagagaaaatgtaattatgtttttgtcagacatgtctggaaggacacccttatacaggaaggca

SEQ ID NO: 34522 - DNA, 458 bp, Glycine max
  unsure (1)..(458): unsure at all n locations
  Clone ID: PAT_MRT3847_131176C.1
caaccttctctttctttaagattgcctcaatttcggatcttgcacctctgggtcgctttgctttgctttttcctctactgggttgatttctgtttccctaaaccggtttagacgaatgtgaacactacttcttttgtttaattactctggaatacgtgttaggctttcagatctagttgaaatcgtattgcacttttagggggagtttggatttctaataagaaattgaccttttgctgagaattggttcggtgattagagggtttccgtaaatttttgaagttttacatgcttgtatctgtttatttttgtttctcacatctattattgttaggtgaaggaaattatgtattgagagtctgtctgatactaaatataaacacctgaataggggctctaacactgattntatcatttgctgcttgtgtgtatgggtaaaagaaggcaattgtgtttta

SEQ ID NO: 34523 - DNA, 716 bp, Glycine max
  unsure (1)..(716): unsure at all n locations
  Clone ID: PAT_MRT3847_131177C.1
acaaaagaaaaaagaactacgacaagacaaaaccccccattgaagggtgtgagaagctgagaccatggaaggatgaacacaattaaccaactcccagatgatgcaatccaacagatggaaacccttgcgtggaagcatgcctttactttgatgatgtgagtcctatgataaagcccttatatcaatttgagaattcatcatcaagagtggtaaattttgatcaaattaaatccacacaacaacatgcccatcgatatggtagatttgaataccaggtattacttcatcatcttggtgatctgattaccgctttagacactctccctccgcctctctattgtcgagacggacaaatgggttgaatttgtgatattggaaaaagggttaaggtcttaaccctagagtgtaaaaaaattatttgaagaggttgacgacagtgttttggacacctgcctctagagatgtagcaatcgatttctaacctagaatattttagatctctacccaattgagttgaccaacgatccgttgaatagttagctttaactgcatttgaaagttgtgaacagttgaaaattctaaaatgggaggaaatgactatggaggatgaaatcatcaatggtatcttggctgctcgtgtggggagaagtttagtctcattcactcatatgactgtgagaaacttgaatttcgaaacttgagtcttacattnttgg

SEQ ID NO: 34524 - DNA, 503 bp, Glycine max
  Clone ID: PAT_MRT3847_131178C.1
attatgatacaatatccatttgtccatgacaaactaaattgtcatattataaataatgtcaataatggtaagacaatgtttaccatcacatattatcagccacaaagcctcacctctaaccaatatcatccatgtcataactatattataacaaaatggtcaagtaaacaaatttaaatgctctaccagaagaagaaaaaaagtacaaaaggagagagagttgaaggaaatgcttaccaccattgacactatagaaatcatcttcacaatctgagtctaaccaggccttggaatcaaaaaaggcttcctctttgctaccatggtcagtgaaggtggtcgttgaccgagccgttgaccacccattttggggttgttgttgttgtagcggttcttctccctctacactctgtgttctcttcacgagctcgcgagattttaaaaacccattcccttttgatctcaccgtgagtttttcccacgcgtccgcccacgagaccgcgaaa

SEQ ID NO: 34525 - DNA, 158 bp, Glycine max
  Clone ID: PAT_MRT3847_131179C.1
ggagagacagtgagacagacttacagatcattttccaacacgattacacgaccgcatcaaacctctcattctctccgaacctgctttcaacatcgtattggccttcgattggtctcctctttaccacataatggtctctcctcgatttgatggaacag

SEQ ID NO: 34526 - DNA, 723 bp, Glycine max
  Clone ID: PAT_MRT3847_13117C.1
ttgcatgcctgcagtatgttgtattttttgaagattaagaaaaagagcattctctctaaaacttgtatgtcattgttctttttaacaaatagatcaataaaacttaacaattcatttgatgtataaaactatgtcctataaaatagtatattgcttttctggataatatggattgtcaagtaacatttggagtgcagatgtaaccttctggatgttgagaggccggggactgatcttcgttgtaaaaagacatgagacatgaataaaaaagttagtggttcctagcaggcgaataagggatctagaggtttgtacatatgagatgatttaaaaatattaagttgaattacttatactaataaaatattttacagtatatttgatttaaagtatttggaataggtgatcagtgagaagttttttggaaaacaccattgatattaaaagcaattcatgtcactctaataaaaagaaaaaaaaacaaattaaaaaaaatccagtagagctgcttgaattcatcggcgtcgtcattgggttgtttttggacaactcagtttctggtttgtgcttttgtcgattattgtcgttatcgaagttggaattttgacgttaccatccgacgtgatgtaggccggcgggccgcggacgctgaggctttggaggaggaaacgcgacggaggatcttcgaggaggaccagacgccgaggagaaaggtggtgtggg

SEQ ID NO: 34527 - DNA, 208 bp, Glycine max
  Clone ID: PAT_MRT3847_131180C.1
gacactcttacgcagtccagaatctaagttcctagaaccaacatcattgcgcaagtgcagcacattgtcgcaaacgtcgcatgactccagttccgacagactgtcgttcagctcatctcggcacaaatcagggattatgatcacgtcaggcagatctaagagacgtttgacgcaagcgtgttcattggaacatcagaggatgacacgc

SEQ ID NO: 34528 - DNA, 1293 bp, Glycine max
  Clone ID: PAT_MRT3847_131181C.1
gttttaagagtaccatgcttcctttgtttcgaggcaatgagctggttatgcagttttctaataggccccagcgccagcaacacaaaatctccgaagatctaattctggatgattatgcttctctgaatgtcaatgattctaaccaaaaattcatcactagtagcagcagccaaccaacaaagaaacttttctatggggcaaataaaaagaatcatgactcacccgaacaagcgaagaagatgattcataaggagattgagaggcaaaggagacaagaaatggctaccttctatgcctctcttagatcccttctccctcttgagttcatcaagggaaagcgttcaatatctgaccacatgaacgaggcagtgaattacataaagcacatgcagaaacatatcaaagagcttggtgccaagagagatgaactgaagaaactctccaatcattccaataatatggaaaataaccatgagggcttgcatacatcttgcaacttcactgtccacgagaaaaatggtattattggaatagaaatcaccagtgtcttcagagaggaaaagcctaaaatttcaaagttactacagtttttgactgaagaaggacttgaagttgttagtttcttttcaacagaagtcaatggcagattgctccacagtgtgcagtgtgaggtgaaccattccaacagtgtagatccatctgagctgagaaagaaagtttccaaagcattttcaacctttagatgctctgattgattttgtcgttgaagctagctagcctcacaatctggctaataacaggaaatttacccatagcatgcattttaaacggagagctactctaactatggtactatagaaaaaatctaagagttttagtattgttatttttttggattaatagttgaatgagtttgagaagtgaaaaagagagagggagaaagagagattcattaaatggaagctcgtttaactattggtaaaaaaaatatcagtactaaaaccttaaatttcttaggctaccatagaatttctcttttagacttttctaacttgatagactttgtttggatgagtttgcttgcaaattttaaattggcaactgtccccttttttctctttgatttggactctgctgctttctttgtgaagaatgagggaagaagacagtaaaatcgtacaactcaaaaatgaactctatcccaattccttttgtagcttttctgcaataaaatggattcagtttctgtcttttttttttttcctttcaaaatttacagatgtgcgttaaaaa

SEQ ID NO: 34529 - DNA, 475 bp, Glycine max
  unsure (1)..(475): unsure at all n locations
  Clone ID: PAT_MRT3847_131182C.1
gagatgttgactgcctccaatcttattcctggtgctgtctattggaccattcggagtattgtgtcctgtgcatcgcatattttaggcataactggcttgggtcaaggatatatgacatcaacaacagagacttgggagctttccagtttggcccataagcttgataacataaatagtcaccttcgaaagcaactcaccgtttgtcgtcagcatttagatgataacagacagagagaagcatttgcaacacttcggctcctttttgagacaccccatcaagataattcgaaggttctcaaagctatgttttgcagcaaggatgatccgttgccactgtttgatggttcttccaaacaaagggttagcattgaggtgctgaggaggaaaattgtgctgctctatataacagacgtacataatgtccccgatcaagagcttgtgattnttgaacaaatgtaccaagagtcacgtcaag

SEQ ID NO: 34530 - DNA, 337 bp, Glycine max
  Clone ID: PAT_MRT3847_131183C.1
ctcacacattacacataactcttactcttttgtccgtcgctggacggatcacgatactgtgtggatactgtttacggcaacggtgatattaccgaaaccagaaagtgccggttgtacgtcagagtcggacttacccagatgctctgagggggtgtgatcatagacatcctgcacgccgaacaggtcaggatcatggatgaggcctatgcctgctgggtgatagtcctggagcgtgtcccaagcgacatccgggacgagagcaggatgcaccgcctgagcgattcgatggtgattaatgatatcgatgcgtctcgttactatcacagcaatggggaac

SEQ ID NO: 34531 - DNA, 194 bp, Glycine max
  Clone ID: PAT_MRT3847_131184C.1
gatcgcaagcggcaaccctttttttttttgttttttttgttgctctatcttttgctttggttcagagatttgctgacagctttgtgttcattgaaaaggagctggtatccgtcgaacggttgtgggatttgggggagagatggatgagacaccacactgtttctcgaagcctcgatttgaagcacaaccgcttc

SEQ ID NO: 34532 - DNA, 280 bp, Glycine max
  Clone ID: PAT_MRT3847_131185C.1
aagtgaagcagccaacgttgaagagatgttggccaaagatgccatcactgcatcggagaagaatgaatcatctaaaggcaacaaaaacgacagggactcttgctcaatggtgacactcacactagaagaatatcatgagctcaggacgagaacctataaggcatatacacaagcgtatgctacgatcaaaactgctacttatgagattcagatgcctggggaacctgaattacgaagcactatacaagtagagcatctgagtgagcaactgtctgcgaga

SEQ ID NO: 34533 - DNA, 1274 bp, Glycine max
  Clone ID: PAT_MRT3847_131186C.1
gtacacacccggttctggtccggaattcccgcgtcgacccacgccaacttggcgtgtgtctgtgatgactcaatcgatgtcgcacaagcctttggactcgcgccacaccacagactcctgcttgttgcagctccgcacctggaaacccttcaagctccagcaagacgggccccaccccaaaccctactaccacaaacgcccctgcctctccgatcgcacaaccacctcgttttccctcgacatgtccaaactcaccctcgccgacgacgacaatcacaatcccaacaaccgcgccaccaattaccgcctcgtcgctcgcaagaggcgccgccgcggctcgcgatccgtgtccggccgcagcagcgaccggagcgggacgcgccggtgctgctccgtgggggcctccgccgcgtacggcacctgctccgatttcccggtggccatgggcaccgactccagcggggagctcttcggcaacggcgatccgaactggtcttcggacgtgagcgaggcgaagaattcgaggagggagagagagagggatggcgggagtggcgagaaggagaatttgggcgttgggtttggggtgagtggctgttctgaagcgaatgggaatgaatcggggtatgggagcgaaccgggttatcgcggggatgctgagtttggatatggggatgagtttgatgaggaagaagatgatcccagattgttgttctggggtgaccaacttggagctgtagattctaaaatggagatggttggggagaacaccttgctagatcaaaaatctcatcatagatgccgtcgcaggaagcatgattgtagaatggttgatgcattaaggtgattatcgcagaaatcagtggactatgaacacaacggaattctatcttgccttgcatattggacggactgcctgacccatttgccaaatcaatatccaaagtattttggcgagtatgaaaaatatgatgatgtggatgaatcagcttcggtatattttgatccaagtgtgaagtggtgtacttacgataatgatttctgaaaaggaaaatatgtgtacaagaacggacctacaagtattaggctttggttatttgttttggatgggtagaacttttcaatctgagtcatacagatttcataggaaacagttgaaaaaatatcttaaaacataatctcgcatgctgggcttgcgtttaaaaaatctatatgtactgacctgccattaatctttttgagttttgattgcaaccagttattcattgcaagtt

SEQ ID NO: 34534 - DNA, 1653 bp, Glycine max
  Clone ID: PAT_MRT3847_131187C.1
gggcgggaaaagcgtgctgctgagttggtaaaaaaggataatgaagtaattgtaaaactcgaaaatacagctattgaacgctcaaaatctgttgagtcagccattctaggtaaatacaacatttggaggaaagaaattgagaatgaaaatgtcgattctactgttcggttgatgcgggaccagatcattatggcaagggtatatttaagcattgcaaagatgaagaacaaggtcgaactgtacgaagaactaatttaccggctcaaagagagtcaacatgctttaggtgatgcagtttctgatgcggatctacatcgcagtacacatgggaaaataaaggctatgggtcaagttctatcaaaagcaagagagcaattgtatgactgcaaattggtcactggaaaactaagagcaatgctacagacagctgatgatcaagttaggagtttgaagaaacagagcacattcctcagtcagttggctgccaagaccataccaaatggaattcatttcttatctacggaacttccaattgattactatctccttactcctgaaaagagaaagttccctgggagtgagaatttggagaatcgcagtctttatcacaacgcaatgttcttggacaaagtcttgtcagcagctgttgtgctctactcaactattatgaatgctaaggatccattgaaacatgtgtttcaccttgttactgataaactaaattttggagccatgcgcatctggtttcttttaaaccctcctggcaaagctacaatccatggtgataacgttgatgcttataagtggttgaactcttcctactgccctgcctcgcggcagcgtaactcccctaaatggtgctacttcaaagctttcaccgatttgacaagtaccttaactttttcacatcgcaagaaattttgatccaaatgcttgtggttgggcatacgatgaacatgtttgatctgaaggtgtggaaaaagaaggatatcaccggcatatatcacaagtggcagaatatgaatgaagacagggtgctgtggaagctggggacgttacctccggggctaataacgttctatgggttgacacatccactagataaatcatggcatgtacttggtttgggttataatccaagtttggatcgatcagagattgagaatgcagcagttgtacactacaatggtaatatgaagccatggttagaaattgccatgacaaaatatcggtcttactggaccaagtatgtcaagtacaatcatccctatcttcgaaactgtaagctaaatgaatagtactgataatttggtccaaagtacagagaagaattctctgatattttctatcacctttctggcttggctatttcaactacagcgtctttgctagaatgatgatctatatttgtcccccaacatcatctctttcccacctcgattcttgctttcaattcatttaatttgttcactaccccagtcacccatttgagacaaggtacaaaagtagtgtaccttgtttagtaccataaaacctcctcattgtacaatactctgatctgatactcggacagaactagaaattaaatatcatatttctgtattctttgaaaagttatttactcactttttctagaaaaaaaaaaaaaaaaac

SEQ ID NO: 34535 - DNA, 1253 bp, Glycine max
  Clone ID: PAT_MRT3847_131188C.1
ctcaactattatgaatgctaaggatccatcgaagaatgtttttcaccttgttactgataaactaaaatttggaggcatgagcatgtggttttttttaaacccttctggaaaagctacaatccatgttgaaaacgttgatgattgttagagttgaaactgtggatactgcactacattgcgggcatatatatcagctacattaattgaaatttattcagagtgcggccatagctgcgcacattgtctccagggctgatgacattctatggattaacacatccacttaataaatcatggcacgtactcggtctgggttacaatccaagtgtagatcgctcggagattgataatgcagcagtcgtacactacaatggtaatatgaagccgtggttagagatagccatgacaaagtatcggtcttactggaccaaatatgtcaaatttaatcatccctatcttcagaattgtaagctacgtgaatgatcctcacaactaagtcataagcagagaacactcattttctctgcacaataccctctccatctcctttctatcttggcaatttcaagtgaagtgccttgctatgatctaatgtataagcgattgggtcaatgcttgtttagtggttacccctacatcatgtctttcccccgtcactatttttgcctttaattcattttatttgtttacactaccctcactgatttggaacaaggtacataagtagtataccttgtttgctattataaaatcccttcattgtatacaatactctgatagtaagactggactagaaatagaataacaatttttatgtattctttcataaatagctttcttgttctgtttcgagaacctatttgatgtttgcatatattgtattggattttcttcaaaaagtacagagaagaattctctgatattttctatcacctttctggcttttggttatttcaaccacagcgtcttttgctagaatgatgatcattgtcttaaagcttagaagggatagggtaagggcgtgttctatatttgtctccaacatcatctctttcccacctcgatttttgctttcaattcatttaatttgttcactacaccactcacccatttgaaacaaggtacaaaagtagtgtaccttgtttagtaccataaaatctcctcattgtacaatactctgatctgatactcggacagaactagaaattaaatatcatatttctgtattctttgataagttatttattcaaaaa

SEQ ID NO: 34536 - DNA, 250 bp, Glycine max
  unsure (1)..(250): unsure at all n locations
  Clone ID: PAT_MRT3847_131189C.1
cnccatgatactttcngctaaaagggttttcctggatgnnatgatatttatgtgctacctggttaaatatgcatgnagtttgtgnanctatacacanggcaaaataaaaccctaaatnggctaatttggattaacttttngcttataataggagntttncanttgaaagagggagctcntaaatttgaatnaggngatgagagaactttggagaggttaaatggggggcntctaaaaaagttanggncgt

SEQ ID NO: 34537 - DNA, 519 bp, Glycine max
  unsure (1)..(519): unsure at all n locations
  Clone ID: PAT_MRT3847_13118C.1
tatagttttacggtcaaagtttgatatccaattttcttactacgcaggaattgtttgctgaagttggtgacctgaaacggcatgcggttcattatgacaggagtggcagatcaaagggtacagcagaagtagtattttcacgacgagctgatgctgtagctgctgtaaagagatacaacaatgttcagttggatgggaaaccaatgaagattgagattgtgggaaccaacatttccacacctggtgtggctcctgctcgtaacggggctattggaaattttgatggagttcctcgaaggtatgcacttgcttattggctctgttctttgatcatctgttcttatttaatttggtttttggagttgtgaacctttgttacattctatggtttagattttccccccctagatttgactggtgattttggatgcatatatattgctctatgatttgaaattgaattcattntaactctcgctagaaaacttaacaagtcttgctttatggtgtttgcaatta

SEQ ID NO: 34538 - DNA, 517 bp, Glycine max
  Clone ID: PAT_MRT3847_131190C.1
aggaggaacacagcggcccacacaggcaagcgggcggacaaaagcgacagaaaggaggcggacagcgaaaccaaccacaacccaggaagggaggaaagcaggagggagggaacccagcgagacacctgaggagggactaaaggcatccaggaagggggcacttgaaattggagagaggcgcaaaccacgggttcaggcactccataagacggacaaaactggttcactgtctgaagcacgggaggagttgagaacagcccggcaacaagtaaagaagactgatccacaccggcctcagcagccggctcgcgtagatgtgactgaacatggaacagcccagggaggctacagtggtgaactaaaggaagcacaagcagccaaacaataggggggagctgacaccgcagaagggagaattaaagtcggctcaactcagcgggcgatgccaaaagcgcctgccgaaaccgacatgcggcccaagcccagaaatgcgaaaaaagctgccgatattagagga

SEQ ID NO: 34539 - DNA, 322 bp, Glycine max
  Clone ID: PAT_MRT3847_131191C.1
gactaccctactcttcggtgacaagggagttactgtttttggacacataaaccctgaagagatcccatgggggtcatctggagctgacatcattgtttagtccaccggagttttcaccgataaggacaaggctgccggacattagaagggtggtgccaagatagttattattatggatccaccattaagtattgccccgatgtttgttgttggtgttaatgagcactagtacaagccagagcttgatattatttctaactctatctgcacaaccaactgacttgctccactcgactatgttatcaatgacaggcatggcatc

SEQ ID NO: 34540 - DNA, 302 bp, Glycine max
  unsure (1)..(302): unsure at all n locations
  Clone ID: PAT_MRT3847_131192C.1
caaacacatgctnaggccactgagctgctcaagggtcacggccaactctcatattcgnctattatagcttcagctacaaaaatttaaactgaactcatatccgaggggatcaaattatttttattaactactgtacaaattctatatcatctacaaatcacaaactgattgatatgctaacatcttttattgtctcaccactccttaatctgacaaaaatcctttagcccactaccattaacccattaagagtattcttaatactctcaaaacaaataagccaaccgcttttattggatcat

SEQ ID NO: 34541 - DNA, 373 bp, Glycine max
  Clone ID: PAT_MRT3847_131193C.1
ggaagcgcaaactccccacaatttgattaaagtccaaccaacgacatgttacaaagtaattcagttatctacgaaatagcattgtataagtccttaacgcctctcttctaactgaaagccaaaacagtttccaattaaaggcttatgcataatcccactgacccataatcattgcaatgaagttgaaaggagaggagatctcttcctcacttgctacaacatctcctaaagaactacacttttgtggagggaaggctatagctagctcacgatggcaaaggacgaaggtcaccaaatgagggatttcgataagagagggctttacatgctttgaaacagcgaggacaatttgagatctccgaaatttggggga

SEQ ID NO: 34542 - DNA, 683 bp, Glycine max
  Clone ID: PAT_MRT3847_131194C.1
ccacgcgtccggttccctgctgctactgagagcggagattcgtctcccccttctgttaccttccccactccgtaccaatcacaaaaacctcaccgcctgaagtcgctccccatttcggtgccctcaattaccgcgagaattatgaaaggggggcgatcgcaccgccctcagagctctgacccgccggacgagtgggtggacgggtcctggacggtggactgcatctgcggcgtcaccttcgacgacggcgaggagatggtcaaatgcgacgagtgcggcgtgtgggtccacacgcgctgctctcgctacgtcaagggcgacgacaccttcgcatgtgacaagtgcaaggccaggcacaacagcaacagcaacaacaccaccaccaccaccaccaacaccaccaaccccatggagaccgaggtggcgcagttcctcgtggaactccccacaaaaaccatttccatggacaacaaaaaagccctcccctccaggcccaggctctggaccgataagcccatcgaggagcgggtccatgttcagggcccaccgggcggagacccttccatcttcgctggccaaagcgcctcctcgattttcacgccccagctctggaaggcatgcgggtatgtccctaagaaagtcagttttaagtacaatgagttcccttttttgaatatgataac

SEQ ID NO: 34543 - DNA, 809 bp, Glycine max
  Clone ID: PAT_MRT3847_131195C.1
ttatgattgaaagttaaaaattatctgagagattattatttgaattgcaatgccctaaacttgatctgcacactgcctaatctgcagtttttctgttcaaaattcattccatcaactgtaatgtttagacctcaaaattcttttagtttttgattttcgaaaaacatttcatctttcaaggtttctttctgagagatgccccttaatccgtgcctatggagctatccgtttcaatgcaaaagctaaggtgtcatcagagtggctggcttttggttctttctacttcatgattcctcaggttgagttcaatgagcttgaaggaggatcaatgcttaccataactattgcttgggataataatctttcttggtcatgggaaaaatgcaatcaatgccctccaagaaacactacgcaacgtttcttcttccattgtgaagtttccaaaacaaactcctccaacattaatatcaagcagccataacattcctagtaaagtagactgggatcttgctgttaatggagctttgcagatgataaagcgaaatgattccttactaactaaggttgtgctagctcgtagcactagggtagtgcctactgctgatattgatcctcttgcatggttatcgtgcttaaaggttgaaggtgaaaatgcttaccagtttttacttcaaccaccaaatgcaccagcatttataggaaacacaccacagcaactatttcacagaaaatgtctccacattactagtgaggctttggctggaacccgtgctagaggagcatcacaagcactagatcttcagatcaac

SEQ ID NO: 34544 - DNA, 390 bp, Glycine max
  Clone ID: PAT_MRT3847_131196C.1
ccaactcataatttatgggtgtataagggtatgctttgtatgtttccactggtccatcccacaagacatctatctgggtaaaaagaaaagaactacattctatctactcatactactggccgagaaagaacatactttaccatcaggggaaggagagctcaaatcgcaaattcttgtgatttgccagccaaaacacagtatgaagcatcgactgcaccccctctttctattagaagatccacaaaaaaggggagaaagaatatcagggacggaagaaggtgtatacattgaacaaaaaaaaagaacggccgaccatggatagtatacattccacatgaggtatgcccaccccaaactttttggaacaggcactagaagagcttattttac

SEQ ID NO: 34545 - DNA, 453 bp, Glycine max
  unsure (1)..(453): unsure at all n locations
  Clone ID: PAT_MRT3847_131197C.1
cttaatgattactcagccactcttgttttctccctcctgccacaacctcctcatcttctctaggctactcagctaaactggtggatgttaatactacacagaaaaattataattaggttacttgtcatcttattgtttgaaaaactacaggcaagtctatggtgcacctgtttgacacataacgcagaccattgggtagctattgtctaaatagatggctgcaaattatgaggaggtctgtaacttccggtggctatgttcacaatttggtgctaccatcacgactntatcgatttattagtattttttaattaatttcttggaccaaatcttgttatattcatcattcttgctttggaatcaatcagcctcagtcttttcaaaattgatttaattttctttaatagattatttctttaaatatatgctttagttaatgctggttgaattgtg

SEQ ID NO: 34546 - DNA, 175 bp, Glycine max
  Clone ID: PAT_MRT3847_131198C.1
cgcgagagtacccccaatttttagtccaccaccagcgccaaagaaacctggctttttagacgctgggatgagggactttctcattggtgagtcattcctcacggaagcgttcatataacaatccctatagaaaataggtgccgagcccgtttgaacatggaaaaaacttattttt

SEQ ID NO: 34547 - DNA, 1467 bp, Glycine max
  Clone ID: PAT_MRT3847_131199C.1
cgtattttgtggggtggctaaattggacctttgccgcagcacccgccggtttccgtctttcttccacctcctatcctcttttctttactacccccacgcgtccgcccacgcgtccgcaactcttttaatctaatttcccccaaattcttttattattttgctcattctcttttgctcataaccccctctctccctcccaaatttcaatttcctctttcctcccttacgttatggatccactggggaaacgccctgccgccgaggacgattccgtaatttccgattgcgagagcggggtttccgggggagacacggcgccgccggccgacgaaaacgccgacctcgtccggaccagattcgttcgtggcctggtcgcgcactggttcaaacccgaggttctggcagttcgcagaaacgtgtgttcctccgtcatggccctggcgcgtcaacattcctttcacgtctttgcacgtgccgtggccgaattgcgcggcggcaatgccaacgtgaagttcgcctggtacggtgcgtccagtaaggaagagataaatgacatcattcagcacggtttcggtcacgctcacagtaacggcctgcgtctctctccacaagattctccacttgaaagtgtgaagagttccgttgtggacgaagacggtttgaggcacttgttgctgtgccgcgttatcttggggaagacggaggtggttccacgtggctcctaccgatgccgttcgagttctcaagagtttgattctggggtggatgatctggttaatcccaataagtatgttatttggtgtaaccagatcaacactcatgttttgcccgaatatgttttgagtttcagacttccttcaccattgaaagggattgtgaagattggggaacctttgaggccttcttcgccgtggatggcattcccagctttgatttcgatgctttcgaagattttgcctccgtccgaggttgcctccattgccaagtttcacaaggattatagagaaaagaggatttctcgacatgagctgatacagaaagtgagagtaatagcaggcgacaaattgctactttccgtcatcaaatctttcagagccaagaaaatacctgcaaactttaaagatgacaaggcgaaagaatggcaagcggacagccagcagcttgaacggaatgattgttcatatgggagttctattagctattacaggaagtgaatagaatacttgaagaaacacaatgctcatactaaccaaaacttacattgagggtgcaagtgcaaccactgcttaagaagtagagcgtcatttgagaccttttaaattgtttttagggtgatatactgatataggtgatttgttttgatgttgacggacgatagtgtagcaaaagaaatcactttctctttctggttggttacagttactggttgaaataaatatacttcggttcggacgtttatcatagtta

SEQ ID NO: 34548 - DNA, 372 bp, Glycine max
  Clone ID: PAT_MRT3847_13119C.1
tttattattctccggacgctggggtatattacagtaaaaatcaaacacaaagtggatcgcagatgactttcaaggggtacaaacacaagttctagattttagtggacactattttatggaagagagtaacattctaagtgaagactgacaggttttcagataataaggaaactggctcttaggaaaaccagtagacgctgtaccaacagacttatgagcaggcttggtactaaagctctttgagtttacaagagaaaacctggccttgtgttgagcagatggtcatgctatctgggattcaagctgaaaatcttgtataatttgtacgatcactggtgtagaggaccctattagagtcatatatagcacgga

SEQ ID NO: 34549 - DNA, 1357 bp, Glycine max
  unsure (1)..(1357): unsure at all n locations
  Clone ID: PAT_MRT3847_1311C.1
gcgtagggcattgcatcgcatagggtaaggtttgggttggttgggttggtgtcgttcctttccgatgggttgtatggatttgtgattcgtggagatttgacggcacacgcattatcaaaatccttactgtgtttctttcgcggccattgcctcttttctgttcgtggcttcaggattttttgaattctgcagctctgaaatatagataaaccaatcatcaggcattagaggataatggcagaatctatatctagcttctggggtccagtcacgtcaaccaaagagtgttgtgaaataaattatgcttattcgtcttacattgctgaattttttaatacaatatccaacattccaacaatacttttggctctgattggtcttataaatgcattaagacaacggtttgagaaaagatttagtgttcttcatgtttcaaatatgacacttgccattggaagcatgttgtaccatgccacgctgcaacatgtgcaacagcaaagtgatgaaactcctatggtatgggaggtgttgctgtacatgtacatcctctactctccagattggcattaccgcagtacaatgcccatcttcctcttcgtgtatggtgctctgtttgccgttgcccattcagtgtttcattttggtattggcttcaaagtgcattatatcattctcattctcctctgcgttccgagaatgtacaagtattacatttacacacaagatgtttcagccaagcggcttgcaaagctatttttagttacttttgtattaggaagtttgtttgggttctgtgatcgtgttttctgcaaagagatttcccgttggcctattaaccctcagggtcatgctttgtggcatgtgttcatgggttttaattcctactttgccaacacattcttgatgttttgccgggctcaacagcgtgggtggtctccaaaagttcttcatttaatgggtgtaccgtatgtcaagattgagaaaccaaaaagccagtgataaaaatgtgtgggaaaagaaggaaccctctgtttgatgatacattttggcaagataagctgttattaggttttttttttttttactctttttctttttttgttttgttgtttagattattggcttgaaaatgatgattgattatttatgtatttcgatgtagaagtaggacatgtaccataattatcccgttggttactttcttgagcctagaccttagctctaaaattgttatgacaacccaaaaacataattttgccgtcctgcttgttgttaggctcctagttgaatcagtccccacattctacttgtaatgtcttgtgtaacctcttcacgttcttttgagtttgagannncg

SEQ ID NO: 34550 - DNA, 404 bp, Glycine max
  Clone ID: PAT_MRT3847_131200C.1
gtgtgctataagctaggtaatcgcgaggagattatgaaccctaatggtatattggggggtggactaactttggtagcatggtcatgccatgggacacgctaccaaaggttgagtgtgcgaatgaaaactgggtctggggagcgttattggccggtaaaatgagcaggatgtaaggtggctgcggaagaacacaacatgccagcctttagaaacgcatgactgatgagtgcgctgaaccaacaatagactacattgatggcgatcaatgaacaccagactatagaccagctgaccaacaagatcttttttgtgctggtgaacacgatgaccatgacaacgacatatatatatgtccgatagataacaccgtactatgtaatatccgatactatgaacaacatgga

SEQ ID NO: 34551 - DNA, 134 bp, Glycine max
  Clone ID: PAT_MRT3847_131201C.1
tgaatgagaaaagtacttttaaaatggtaggaagacacagatggtaacaactgaatctgtttatatacaagttaaacaactttattttatgtttaaaataacaagaatacatacattaaaagcattcattcccc

SEQ ID NO: 34552 - DNA, 389 bp, Glycine max
  Clone ID: PAT_MRT3847_131202C.1
tacctttttcgaatcccggtggacccaacgtccgcatttattcaaaacttaagtttattccttgtgtaatgctttcttcctcaataccaaacatttcgaacacatgcggcaacttcaactgcgctgacaagactagctgcaccaatggtaacagctatggtattattgtacagactgagaatacttacatctacactgacatcatggatgttccagcatctgagcatgatcagaagtgcaattgttgcactaactgcacttgcactgactgcacctgtggccattaatgaatatgtattaaaatgtaaatgccatgagtttgtcaatacaaatatccaaataatgtaatcttctatatgaatacactatcgtgcttttatcctaaatat

SEQ ID NO: 34553 - DNA, 436 bp, Glycine max
  Clone ID: PAT_MRT3847_131203C.1
ggcccaacaaacatttgcccactaataataaacaaattactattttttacggtaaatggccccatactacaaagggtaataatttcccaatccctgaacaatgttttttaacaaaaggatcgcccccaaataaaaacaacccaactccaattattatcaccccgtccagcaaaatacattcaaaagctttttaaaaatttgaggaacccacaggggccctttaaaaaccctgcccattaaatttatgaaaaaaattttatgggcaccgggcctttccaacaatcccaaaaacgttgtttaggttttagcaaacccaactctaaaaagcttttggtgagcctcaccgtaatcagcgaaaaaggcatttttctcccatgcatatttttaaacaagagggcggaacacagggtcaaacaaaagttccttttaaaaaggt

SEQ ID NO: 34554 - DNA, 350 bp, Glycine max
  Clone ID: PAT_MRT3847_131204C.1
atcttgttctttttctttttttggaaactaggcaggcatctagcttaatctcaatgtggacttaaattaataaggctaacatagaacacaaatgtcaaatgcgtgttcatacatccttaaatcattattattaacacagtgcaaacaaaataagaagcggcgttactccatcttctcttttcctttatataacatcggcaatccacccagaaagcgattgtaaaagtgcaatgcctatagtggtttatattggggaacagctttcccagatccctttacgggcagaaaagagagagtttcgcggtatccttgtgtatacccagcacctcgaccatgggatgaccaatgtc

SEQ ID NO: 34555 - DNA, 390 bp, Glycine max
  unsure (1)..(390): unsure at all n locations
  Clone ID: PAT_MRT3847_131205C.1
tacggctgcgagagacgacagaaggggccaagcaaaaccctaatccctctttcttcctggtcctcagtagggcgattttcgattctcttctctgcaactatgcctaaccctaaggtcttcttcgacatgaccatcggcggtcaacctgccggccgcatcgtgatggagctctacgccgacgtgactccgagcaccgtcgagaactttcgcgcgctctgcaccggcgagaagggcgccgggcggagcggcaagcccctcactacaaaggtcgtncttcaccggtgatcccgacttatgtgcagggcgcgacttacccgcgaacggcccgaggcgagtgactacgcgcaagtcgcgcgagacttgtgagagcacctggcccggcatcttcat

SEQ ID NO: 34556 - DNA, 343 bp, Glycine max
  Clone ID: PAT_MRT3847_131206C.1
aggcgtccgaacacctccgagaggacatctcatggcgagtgccattgaatgtgaatgggcctagatgcttaatatgtcctctcacttgtgcctagccctatgtcataccatcatcattcattctcacctttctctctgctctctccacccaatccctaactcccgaccctgttcccgtctcgtatccgtcatgaaaggaggaacgttcaagacctcatctaagatagccgatcccaaccttactgtgactaacatggcagacgtcaccaatgctaggaatcccttcggcaacggtaaggctcctcaagaccctaacaagccaaagtggcctccaagtgctttc

SEQ ID NO: 34557 - DNA, 569 bp, Glycine max
  Clone ID: PAT_MRT3847_131207C.1
catgagcacttttttctttttctcttttttatattttttttttctccccccaggaaaaaacaatgttgttatcaccccctgggggccaaaccccgaggggaaaaatttttgaggtccccccccccccaaacactgcgttcccccccccggggggacaaaaaaaagcccccacaaccccaaatatgggggggaaaaaggaaaaaaccccacccccagaaaggccccccccccggggggttaaaaaacccccccggggggggggggaaccccccccggggaaacccaccccccccccaaaggggccccccccaaggagggggcgctcgaaattgcaaactttgcacaaaccacttttgccgcccccccccaggtgaaacccccccctgaagaaggggggaaactaaaccccttccccctttcccgggtaaaaaatgtttccctaatcgggccataaaaaattttcctccccccggggggtaaacacccccccctgaaaacaggcctggggaggaaacccccctccacagccacccttataacaaaaaatggggttaagagggggaaagccc

SEQ ID NO: 34558 - DNA, 116 bp, Glycine max
  Clone ID: PAT_MRT3847_131208C.1
gatcccactctgttaacaactcattaacccttgtcatttctcatcttctcaccttattcaatcactgctcattcctatggttccgtatttgacccttccataatgatcataaacgc

SEQ ID NO: 34559 - DNA, 200 bp, Glycine max
  Clone ID: PAT_MRT3847_131209C.1
cccacgcgtccgaaaaaagttccgcacacaccctacttactctaacgtttctatgggaggggacccattcgatcgtcgacgatgggactgaaggttcaattgcgatatattcctcacctatgcatgttgtaaaagctgcagattctgcttcgagatgatcgatcgtgatggatgtaatcgacaggaactatatatccgta

SEQ ID NO: 34560 - DNA, 1071 bp, Glycine max
  unsure (1)..(1071): unsure at all n locations
  Clone ID: PAT_MRT3847_13120C.1
cccatcttccagggtccggtgatagctgctgcaaaatgaaccttcagtttgtagatcctaattcaagtgttgttggaaaatcttttaaattaaccctacctgaagtgaccagtttcccagattttcttgttgaaagaaccaggtttgacgctgctatgcaaagaaattggacacgcagggataaatgcagggtttggtggaagaatgaggatagttcctctggtaattggtgggatggtcgaattcggactcggaaggataaatctacggtttggtggaagagtgagggggagacctatggtaattggtgggatggtcgaattctgtgaatcacatccacgtcgtctgaattagctttttgatgctgatagtgtatggctgttcggtacaagtgatgattcaatgaaacacaaatgcaaggtccttgtgagcttattgatgcagtcactcaatggagacaagctcacatatgtaatgcatgaagaaataaaaatttcaaataagtcaccattttacagcagtcagcctgttccttccagtattgaattggagtgcttgagttgaaagaacaattacacacgtagtttggaggaactgaagcatgatgtgagtattctactgtctaatgccaccccttttcttgaaaaggatgcagcgctgtcagcaaaaatcaaacgcctttcagaatggttcacacgggcattatcatctctatagctcttggctttctggagtcacaggccagcattatggccgaagcagcctagctggttattcccccccccatacattttttgtagatagatttttaaattatccccttggattcgttttctcttgttcgctgaattagcttctgaggatagagataggaatatcgagataaagtagcattttgctgtggaaaattcatgcggctacattcattgtttgtacagagacaccacattgtggcaaatgtataattcgcattcagcaaagaaaaaaaaaaaaaaacaaatgcataattcgcattcataagtaaaagaacgcaaaagngggngnccnccgantngtgacctgntcgcccgg

SEQ ID NO: 34561 - DNA, 250 bp, Glycine max
  Clone ID: PAT_MRT3847_131210C.1
caaaaactcagaaaacacagggaaagaaagagttgagtgatggacggttgtctggaactgatggaatgcaaaatagcgagaccctttgactcattaccggtgagaaggtcaattcctttgagtctgatgtgttcggccgagacctattcttcaaagccgacgcgcttctaaagcatcactctcatccccggctacggaatcgcggccgagatcattcaggtagacaaagacgttcttgatcatcgacggt

SEQ ID NO: 34562 - DNA, 1071 bp, Glycine max
  Clone ID: PAT_MRT3847_131211C.1
gtaaaaggttcatacatgcgctctttagttgcctttgattttgatgagagtcagattgttggcctaattggtagtcatttatgcatatggaggcggaatgggaaaagaagcatatttccttcactggaaggcaaatttgtaaaaggttcatgcatgcgttactttgatccagaagctgtggttggatgtgatgatggagctgttcgtgtttttgacatgtacagtaggaaatgttctcaaataataagaatgcactatgcaccaataacatgcttatgtttgagtgaagatcaattgatcatgagtggctccacttcagggagtataacaatgtcagatccttcctctgttcagcaggtagcaacacttagatcaagtgatgccagaggcataaggaccttgtgtttcaatccctcctctcagctactgtttgcaggatcagctgttggatatgcatattgttgggaccttagaactaggaaactgctgtggagcaaccgagtgagtcctaatgttatatactccttacagcacatgcatagtgacacatcaacattagctgttggcggaatagatggtatcttaagattgctaaatcagaacgatggcagtgttgtttcgagttgtgttatgggagataaattgttatcaacatttcaaagtccttctgggtccattcaaagaagaaaagggagtaggttgcctgaaaatatctacataaatattgacctcattcctaaaactgcaagaccttctattacatgcctcgctgttggaatgaagaagattgttaccacacacaataccaatgatatcagattatggaaattcaaaagcaagatttctttgtaaaattaagtatttaataccctgtacactgaataatttgttggattattttatagctgacatcatagtgttattatttttcctaaaactcagattaacaggatgtcaaaaatatataaaattatgtggttttattagtcccaattatgtgattattatattaatgtgtattgggattaatattattattattgagcactattagtaatatgttgatgtggc

SEQ ID NO: 34563 - DNA, 310 bp, Glycine max
  Clone ID: PAT_MRT3847_131212C.1
cttgtggctctctctctctcactctctctctgtttcaattccccgttttgttttttacttcttatattctccgccacctgaacattacccatccatctcataacacacaccccagaaaagcaccctcacttgttcgtttcaacgttctttctattgatacgttaatacttttgattcctttcacattcttataactgactaactaacgatctgtgaatcaaagaaaaaggttgttgttgggttctgttcccttttcactgtgagtctcatctgattctttgggagactgcctgagcacgatgggagatgt

SEQ ID NO: 34564 - DNA, 113 bp, Glycine max
  unsure (1)..(113): unsure at all n locations
  Clone ID: PAT_MRT3847_131213C.1
attcaacatttctccccttaagcttggttcaccaaatggctgctgcgggtagtgctgcantctcttttttcatccaccaaatctacctctctttcaagcaggacctccctcat

SEQ ID NO: 34565 - DNA, 571 bp, Glycine max
  Clone ID: PAT_MRT3847_131214C.1
ggaattatacatatgctcacatatttgtcataaaccatgccaacctcctaagcagatatgtatacaacaaattcagctgaaaaagaaaatgtacatactgttcaaagctaacactggtttatatatggcaatccatatgaacatatgtacacacacaaaaaaaaaatcctgtccaggtcctggtagtaggtaccactctcctcattggttacccaagcatttcctcctgccctcaatatatacatggctttttctctgtctccacttcctccacttcaatttagcagggaaattccatgtacggaaaggataaaatggaaaagcaattctaaggacatagttaagccacttaacctgaggatggagcatctaaaaggacaaagattccattacaagtgctgaataggggcaagagttttattaaactcaagatgcctctcattttctttccatttgccaataattttccccttttagaacttacttcctttagaaatgatattatagaaaggatcagtgggctgttaccgttgagagacgaatcccaagaaagaaaagttgaatggcataa

SEQ ID NO: 34566 - DNA, 690 bp, Glycine max
  Clone ID: PAT_MRT3847_131215C.1
gagtcccaagaagagggagagaaagaacaccctgtggctgctgaaggagattcaccagattgagaagtgtgctagggtgatcaatgatttggctgattctgtgcagtttcctttgagtgaggagaagggagaagaggtcagacagagagtgcaagatgtttcaaaggtttgtgaagccttgaaagatggattggaccctcttgaacgccaagtgagggaggtgttccatagaattgtgcgcggcagaaccgaggggcttgactctcatggtagagggtaaaaaataaaaataaaaaactattgtttgtttgttgatgcttaacatttgccatttgagatcgtagcctgattttgctttcttagataagttcgatttgagaatgacctaaagttgactaggaggataaccagggagtggtaagaggatatggtgatttaagttgaggatcatgataatagtatggtatataaaggggaggattcttgtatgtatgaagtatgaagcacaaaataatgtatagagtttaggataatttgaagtggacctttgtggtctgtgttttctttttctcttttttgtgttgtgatgtggcttattgtataatcagttttctcagtgttttgctgcattgctgcatcctcattgtagttgattctgatcgcgagtatgtgtaatgatacattttcctt

SEQ ID NO: 34567 - DNA, 2191 bp, Glycine max
  Clone ID: PAT_MRT3847_131216C.1
gtcactgctctgcttcgcttcactccctctcttgtctcgttcctctcccaagtttctaactttttcacacattctcaatccctctcttcttcccttcactccctcttgagtcttgtctcattcctctctcaagtttctaactttttcccacattctcaatcaactctccaattcccaagtgggtcccaacccaattcggatttcgtttctggatttccccaattcgaagctctgcacttccccttttgaagtggatttttcgttcctgggaagttcaattccaaattcttggaatgggtctctaacacaagcttccaatttggagagaaagtcccaaacttttgggttcaatttttcagttttcgcaactgggtctgtgatcgtgattttggcctcaacttctaaggttttgggagttaccacaacttcaattgtggttgcatccgctgtaatatcaaaggatcgtgacgaaaccacaactgcaacaaccgcaatttaaaacctttgtgtgagaataatgcgtactacagcagaatttcaaggttctgttctgaatcttcgtggggttcaggttcactccatggagggttcaagcatggagcaagagcttgatttgtttcagaagcatgtgacagagcgattcctggagctatctttggctgaaagtggtgaattgctctctctttcatgggttaggaagctgctagattcgttcctgtgttgccaagaggagttcagggtgattctccacaaccacagggctcaggtgatgaagcaccctcccttggatcgcatggcgggcgagtttttagagcgtaatgtgaaggcgcttgatgtgtgcaacgcaatccgtgatggggttgaacagattaggcagtggcagaagctgttggagattgttctctgcgctttggatcaaaagaggagcattggtgagggccaatttcgccgcgccaagaaggcgctggtcgatttggccattgggatgcttgatgacaaggacaccagctccagtggctctatagcacataggaacaggtcatttggtagaaacaatgcttcaaaggatcatcaccacaataattcctttggtcattttaggtcactttcttggagtgtgtcaaggaattggtctgctgctaggcagcttcaagcacttgggaacaacttgtccccacctaaggctaatgatatcgttgccactaatggccttgcattgcctatttatacaatgagttgtgttctggtgtttgtgatgtgggcccttgtggctgcgattccctgccaggaccgtgggctggggctccatttctcgttgccaaggcagctcccatgggcggctccggtggtggcgctgcacgaccggatcttggaggagtccaagaagagggagagaaagaacacctgtggcttgctgaaggagattcaccagattgagaagtgtgctagggtgatcaatgatttggctgattctgtgcagtttcctttgagtgaggagaagggagaagaggtcagacagagagtgcaagatgtttcaaaggtttgtgaagccttgaaagatggattggaccctctagaacgccaagtgagggaggtgttccatagaattgtgcgcagcagaaccgaggggcttgattctcatggtagagggtagcctgttgatgcttaaccttgccatttgagatcgtagcctgattttgctttcttagataagttcgatttgagaatgacctaaagttgactaggaggataaccagggagtggtaagaggatatggtgatttaagttgaggatcatgataatagtatggtatataaaggggaggattcttgtatgtatgaagtatgaagcacaaaataatgtatagagtttaggataatttgaagtggacctttgtggtctgtgttttctttttctcttttttgtgttgtgatgtggcttattgtataatcagttttctcagtgttttgctgcatcctcattgtagttgattctgatcgcgagtatgtgtaattcaatacatttatcttacgcagctcttgtactttcaaacttgtcgttgctgcgattgcagcctttgccttcagaatgcaatcattgtgactaggcctttttttttttttttatgtttagtgtttacataaatgtaaacaaattctattattgtaattatataacccaaacatttttt

SEQ ID NO: 34568 - DNA, 187 bp, Glycine max
  Clone ID: PAT_MRT3847_131217C.1
gcaatcgttaatctacagcttcctttctcaaaacaccaatatcctcacaaagtacaccaacttcaccccatacttaacctccctgtgcgcacaatacctccacaaactcccttcctccaacaacaaatacacctacaactacgatgatcacaccgtaaactccgctggctataacaaattcggttac

SEQ ID NO: 34569 - DNA, 572 bp, Glycine max
  unsure (1)..(572): unsure at all n locations
  Clone ID: PAT_MRT3847_131218C.1
tctccgaacatgttaggtgtgataaatgtaaagtattaacaagacggcaaaagcccctgcgtgggtatcaactgcggtacttcctgtgggctcaacaaccacagctcgaggtggagccgcccgtgtcatcttcttccgaacattattaggtgtgataaatgtaactgaccacacagtcgtataattaggtttattaggcccgggaagcggcaaatgcgccaagataacaatagtactggtatgcgtgcccagcggccgccttaccataacagttcgttgtgcgccacatatgatggttaaaagatttaagcctggagtgggcgccggcagactaagcattcccagtcgcgccggcaactgacccagcactgctataccagcggcaagcaacagcacggcacacagctgcgctggtgacgggggctaaataactaacagtggttaaagctgagcaagctgctgcaaagaatgcagaactggccgtggtaggtgtggtcgtactcgtatgccgagagttacactatagcgcttatagtgccgcaaacctgngagcaaccctggcatgcctgtgt

SEQ ID NO: 34570 - DNA, 1167 bp, Glycine max
  Clone ID: PAT_MRT3847_131219C.1
tggagcagtcttcaaaggaatgctctcccgagaattctcgttgccgtgaagatactcaatgacacagtgggagatggaaaggatttcataaacgaagtgggaaccatgggcaaaattcatcatgttaacgttgttcgcttgcttggattctgtgcagatggattccaccgcgctctcgtctatgatttcttccctaacggatcactgcagagattcttggctccaccggacaacaaggatgttttccttggttgggagaagttgcaacaaattgctcttggtgttgccaaaggggttgagtatctccaccttggctgtgatcaaagacgacttcactttgacatcaatcctcacaatattttaatagatgaccattttgttccaaaaatcactgattttggacttgccaagttgtgtcccaaaaatcaaagtacagtttctataactgctgctaggggaaccttaggctacattgctcctgaagttttctcaagaaactttggtaatgtttcttataagtctgacatttatagttatggaatgttgctcttagagatggtgggaggaagaaagaatacaaatatgtcagcagaggaaagtttccaagttttgtaccctgaatggatccataatttgctcaaaagcagagacgtgcaagttactattgaggatgagggagatgttagaattgccaagaaacttgccattgtaggactttggtgcattgagtggaacccaatagaccgtccatccatgaaaactgtgatacaaatgcttgaaggagatggagacaagttaattgcaccacctactccttttgacaagaccagctcttctagaacaagtgtagttgctccaacaagacgccagaattttgagttggaaattattaatgaaatagaagaataaataaagtctcgtttaggttttcatcaaatgtaatctgtactttatagaaattgtaacacataagtctattacccttatcttgttattaatttgcttgcttattgttttacattttgcttcaacgattatacttatggaattttagctttgagtacttgtccgaataggacatgctctaatggtgcgatgctttttattttttctgcttccactgattgtaattgtgttaaaatacccttatttagccttcacaatgga

SEQ ID NO: 34571 - DNA, 287 bp, Glycine max
  Clone ID: PAT_MRT3847_13121C.1
tcgtttacgcgtccgcactaccattatcaccatgatgatgattatatgggcggtgacgataatgattaggatgacgatggagatagtttggatgaagagcatgcgacatggaactttagcaacaagtttacgaggatcacgatgatgaaaatgttcaaaagggctttttctataatgcgcggctcgactaactctccttatctggttgtgagggctgcacgcgactgcggaatgtatgttttggtcattatgcacattactgactgcgagttagggctacaaattat

SEQ ID NO: 34572 - DNA, 222 bp, Glycine max
  Clone ID: PAT_MRT3847_131220C.1
gcgggagcttattttcatttacttaccccacattgattcccaactttatttttactccttaaacgaccaactcctcggatgacctttctccaaaagagggcggtccatataaaacaacctccaaagaggttatcaacaatacatacgctcccacattttctaacacatttcattctctcccaatccaccacttaaattatattttccaaccaatcaaatttc

SEQ ID NO: 34573 - DNA, 1673 bp, Glycine max
  unsure (1)..(1673): unsure at all n locations
  Clone ID: PAT_MRT3847_131221C.1
ccctctgcccagctcacaacacacaacaataaaagaaacttgtaaacaacaagaacaacggaacatagatccacttaagcatgcaaaggatcaaaacctcagaacgcactttgatcttcccttcccaccctccttttctccaagaccaccccttccctctctcccacctcgacactgatcccaacctccaccttaccttccgctacctccgcgcgtacacctcaacaacaacaacaacctccctcgaccccttccacgtcatctcctcctccctctcccacgccctcccccacttctaccccctcaccgccaccctccgccgccaacaaacctccccccaccgcctccaactctggtgcgtcgccggccagggcatccccctcatccgcgccaccgcggacttcaccctcgagtccgtgaacttcctcgacaacccggcctcgagcttcttggagcagttagtgcccgacccgggacccgaggaggggatggagcacccgtgcatgctccaggtgacggtgttcgcgtgcgggggattcaccctcggcgcggcgatgcaccacgcgctctgcgacggcatgggcgggacgctgttcttcaatgcggtggcggagctggcgcgtggggcgacccggataacgttggacccggtttgggaccgtgcgaggttgctgggtcccagggacccgcccctggtggattcgccgttgattggggagtttctgcgtttggagaagggagttttgccgtaccaacagagtgttggtggggtcgcgagagagtgctttcacgtgaaggatgagtgcttggacaatttcaagaggaccttgttggagcaatctgggttgaacttcaccgtttttgaggctcttggtgcctacatctggagggctaaggtcagggcctcgggaatccaggctgatgaaaaggtgaagtttgcatactcaattaacatacggagactggtaaagccaccactgcctggtggctattggggtaatggttgtgtgccaatgtacgtacaacttagtgccaaagatttgatagagaaacccgtttgcgaaaccgcagagctaataaaaaagagtaaaagcaatgtcactgatgagtatgttaagtcctacatcgattatcaggagctgcattttgctgatggaatcactgcgggaaaagaggttagtgggttcacggattggaggcacttgggccattcaactgtggactttgggtggggtggcccagttactgttttgccccttggaaggaacttacttgggagtgttgagccttgcttttttttgccttattcaacagccacttcagagaagaaagaggggttcaaggttttggtgactttgagagaggctgcgttgcctgctttcagagaagacatgaaagtgttttgcaatagccaagagcagtggctgagccacatatagatgtggcttgagagttgagccattgatttgatgtaaacaagtgaagatgttagttttgccattgaatattagaattcccttcataatcaatggcacccactaacatttccgcccctatcaatattagaattcccttaataatcaaatagtttgtttgttgttataaaacattgttactttccttaatttattattgatttaagtaanacaagtttcttttaatgttgtgtgatg

SEQ ID NO: 34574 - DNA, 244 bp, Glycine max
  Clone ID: PAT_MRT3847_131222C.1
cttccactgtctgtctacactacggacagagcttttttcacaccacagctaaaatcgctgcaatagagcccttcttctcccttcttcttctctacccacacccaaacccaaaccaagttctttctttctaattcccttgataatgtagaatcacagaaaaacatagaaagctactcaaaacttggctccaattagcctttctggttatgttttgaggaaaaacagacaagttccacgcaatgtc

SEQ ID NO: 34575 - DNA, 255 bp, Glycine max
  Clone ID: PAT_MRT3847_131223C.1
gtggtgcttctcacccatcagggggcgattggtgaaattccaggacatgccgaaaaaccaaataaatattgatgcacaatccgtaagtttccgtcacacaccgtaaatcaaattgtatcatcgctgcataattaaatgaagttccctaacattccctaagttaaaaatgggataactatgtaatccccaaggttacgtaacattacggaaagaaaacatttatcatttcgaaattcataagtttacgtaacttta

SEQ ID NO: 34576 - DNA, 389 bp, Glycine max
  unsure (1)..(389): unsure at all n locations
  Clone ID: PAT_MRT3847_131224C.1
tttggttcactgacttctcgacgnanctgggantagttagcaattttcatatgtacaatttaaaagggagaacactaactgtagggttgtatgaactatcttatcagcacaggggagggaagacaaacaggtcaaccaaagcaaaatcccttcttaatatacaattcagccatggatagctgagataacagaaagacaatccagcataagctttctttccctcgtgttgatctggcaatgaagtaaacaataagctggaaaggcatcagtccaattttttctcctctctaaaagtcttgactcctccggaaatagtccttaaaagcttcttagaacacatatcctgtgcctgtgtagtgtgttttgcacggttggctcttacccaagca

SEQ ID NO: 34577 - DNA, 461 bp, Glycine max
  Clone ID: PAT_MRT3847_131225C.1
ggaattcggcacgaggctaaaagattgagtattttgtattatttgggtgttcacgattcttttctcttaacatatattggcatgttcttaatatattgaaagcatgcaaattcagaaattccctatctcaatagtgattttacatgaaatatccttcttcttttaatttgtcctacatgatttttatcaattaatataaccgtatttcttttttctattaacacacctttcttaatttagaacccatgcttgtcttaatttgcaataattcaaaaaaataatattagattaaaaatagaaagacatatcgagtacaatttgaataaaattgagaaagaataaatgtattttgtcctttatatttccagttgtcaatgtcaatgggtaaaagtcttacacgaagaagcatccccgcaatttcctatgtttctatttaactagtttaccaccagctattcttt

SEQ ID NO: 34578 - DNA, 675 bp, Glycine max
  unsure (1)..(675): unsure at all n locations
  Clone ID: PAT_MRT3847_131226C.1
ctgtaagttcacaattgttgggcaggagttacaaaaaagtggctggggatttgcattcaatgctagacatcaaaacctcaacataaggaagctcatcaacaactgctgcaacccctccagctttacggccacgccgaaaggcatcaatataatcctacatgttgaggttgtgatgtctagcattgactgtaagttcacaattgttaggcaagagttcacaaaaagtggctggggatttgcattccaaagggactctccccttgacattgacttgaatactgacatccttcaactctatgagagtggggacctgcaaaagattcatgacaaatggcttaataaaaaggagtgttcaaccgttgatactgattcaaacaaactagctttgacaagcttctggagcctctttctgatatgtggcattgcatgtatcattaccctgaccatttactttgctagaatcttctgtcaatacaacaaattcagcccatagcctgataagatcgacgacaaggaaatgcaaccggacatgactatacttccaagtcgaactcgtaacatcaataagctgatggtgtttgtagatagaagagaagcagatntcacagagatacttagggaaaacaaaaaaaggagactcatcattagataagcattctgtttcatcagtcacct

SEQ ID NO: 34579 - DNA, 221 bp, Glycine max
  unsure (1)..(221): unsure at all n locations
  Clone ID: PAT_MRT3847_131227C.1
acagcccgcttttattttatatataatattattattacatgactgaaaagtagtaactcaggcttctctacttcaaaattatggtgcccttttcttgttcacccatgatcttgtttcgtcaataaagaagctatctttnagctgctcgtaacaggggtggnagnaaaangnnctaggagntngncaaaaaaaaaanaccaaaaagaggggagggagggggg

SEQ ID NO: 34580 - DNA, 384 bp, Glycine max
  Clone ID: PAT_MRT3847_131228C.1
aatcattcttaaaccttcttttgctactcctctggtttgtgacttaatgttggtatctgtggtggggacataggtgggccctgacctgcccagatgacttactcttgagtctagatccagatcctttttctggatgccgaacattccggattataaagcattgcctcttaccagtcatattcttgtcaattgtaaaaattgttaaacgtttcatgcaacactgacaagttcatccctgccttcaccaccttcattatctgtcgaggagccagagcccatgatatttaatatgtccaccacagcttgttggtgttgaagatacttgcgccaaaaaaagatactagcgccttacggttgcgtttttctttgcttactgttgttgtc

SEQ ID NO: 34581 - DNA, 259 bp, Glycine max
  Clone ID: PAT_MRT3847_131229C.1
caattctccaattgacccacccatccaaccattcccatcacacacatataaaaaactttatactcataacacaaaaaaactaaaaaatggtaaattcaaaattctaaaaacacatatatacacacaaaaaataacaaaactcttaaaaattagagatcacatcattcatagacacaaatttatttcatacactacttaaatatgcatgtttcatcaaatctcccaatatgatcattcatcaaactttaataacctaatc

SEQ ID NO: 34582 - DNA, 260 bp, Glycine max
  Clone ID: PAT_MRT3847_13122C.1
tctttttttgtcacaaatgtttttgttattgatccaggcagatgttagatgttgggggacggtgaactaattctgacacaccctcccaatgacgcaatattcgtatcatatgtacatcaacttctctcattaaatcttggaatccccgctttcaatataaagagatagatgacatttttccttaaactcgcctaaccttgcctgaaaatcactatctttccctccaatgatcattcccaagccttttaaacttgaggtac

SEQ ID NO: 34583 - DNA, 1262 bp, Glycine max
  Clone ID: PAT_MRT3847_131230C.1
tacggctgcgagaagacgacagaaggggaggtgacctcatccgtggttgttgagattgagaaaaatacagagaggcactgtagatcagatgccagatcgaaccaccaagacctgcaatttttaattttcattcagattcccttttcacttttaattcaaaaccctaattttcttttttccaccctccagcgtcgccgtttctcaacaagtcttaccctaatcgtcaaccattcaccaataacgattcaaaaacccaaactttgtgtgaagtagttcattccccattactcactcgcttgttttgaattttatttgttgcttcgtttcccactatgaaagaaggtaaatcagttaaactcaaccatcaacaaccgcaccagaacggtcacctctcgccttcaaaattcgccaaattgtttgatccagaagcatcctgggacaaggatcaattgggagacgtattgcattggattagacaagtgctcggccttgcgtgtggattcctttggggttccatacctttggttggaggcatatggtttatcctctttttagcgttatccactggaattatatatagttactatgcagtaatactaaaggttgatgaggaagagtttggcggtcatggagccctccttcaagaggggctatttgcttccataactcttttcctgctttcctggattttagtttacagtttagcacacttctgattggctgggcattgaagcttcaacacagttgaaagatttacttgattacatttgcctgaatcgcaatcatctgctttacttctatgtaaaatgttctgattttgcaatgcatgcatgaacactaccttctgcattccatggtaatggcctcttttagtcaaacgtttccaatgacaccccgtactacagcaaactgtgtggattgcagaactgacgacaatcgaatttctgtttgttgaaccgtgaaataaagttgcttgcgggcaaattctgaaggaccatttatccttgatgtttatgtcataaacatagaattcccgagtgggttcccgcattttgttggagtcttagtgtagctgttaggggatatatattttattgcgggggattttggttacagctgctatcaactgattgttttaaggatccagtgttgtgtatttatgcgtgattatggtaaaagaaacccgaagattttcacgatcatgattatggtttgtttactagataacaaattcattctagtttgcagatttagatcaaaaa

SEQ ID NO: 34584 - DNA, 252 bp, Glycine max
  Clone ID: PAT_MRT3847_131231C.1
agcgggagtcatatcatctcttgtgaattgtgatctccgaatccgaacacaacacaaaataagcttcagaatctttactctctctcacttcccacgcccttcaaggactctgtcctgttcgatctctcactctctctctcttcgtaaatcgtgtgtcttccaccaatcagatggcaatgcccggaaacaatcccctcccactacttcccagtgctcaagttgtcgggcacgccctttgtgggagcaatatta

SEQ ID NO: 34585 - DNA, 139 bp, Glycine max
  Clone ID: PAT_MRT3847_131232C.1
gaacgtatgtggaaacaaaaataaagctctatgtcacgaaaaccaaactctcaatcttgttggtcatgcatggacactctggaaagagcaaaatgctttacaacctattgactcgagcataaaggactcgtgtgttaac

SEQ ID NO: 34586 - DNA, 416 bp, Glycine max
  Clone ID: PAT_MRT3847_131233C.1
tagctcggaattcggctcgagtcgagcttcacactgcataccttatgtcttccgaattcgaaattaatttgcaagatggctcatgaaaaggctcaaatcaacattcgtggtggtctggtcactgtggacccatgaggaggcaaccaccattaactagctgactaagcctgttgtggagaaagaagcttcagggcatgccatatgagggcatgcacgtacggactcggacgggaaccagatacttatgttaacaaaataatctggaaccctaatgtatcagtgtcatcataagtgtgccgataagctagctatgctatggttacgtactctgagatgagagtcttgatgaacagtaccattctgatgtatcgctgcccttgaacgttaatgcgtgcttattatcttctgcctaaaaa

SEQ ID NO: 34587 - DNA, 416 bp, Glycine max
  Clone ID: PAT_MRT3847_131234C.1
gcgtccttccacgcgtccgtacggctgcgagaagacgacagaagggtacggctgcgagaagacgacagaaggggtttttaatctttatctttggtattacaacttgattgtctaagtaactgctagttcttttctggattgtattgcgattactataataatagttttaagaactcagtcattttgtttccgttgaatgaaattgattgtcaaaatcacgtccattaagtatttgaatttttttagacatttttctacttcaaaaaaaaaaaaaaaaaaaaaaaaaaaaaaaaaaaaaaaaaaaaaaaaaaaaaaaattaaaaaaaaaaaaaaaaaaaaaaaaaaaaagggggccgcttaaaaggttggggaatgcaggttcaaaacccttccaaagggcggaaaatgtttttccc

SEQ ID NO: 34588 - DNA, 407 bp, Glycine max
  Clone ID: PAT_MRT3847_131235C.1
ggggaaaacccccaatttggatttttttgaaaaattttcttttttgggctacccaggggggctttgtttcaaaaaaaaaattttttaaccgagcccggagcccttttaaggacctggtgccccctggcagggaaaatggggggggcccttccccgggggggtttccccttgggcccccagaaaattgatttccctcccctttgggggatcctttacccgggggcccctttttttgggaaaaatccattaattccttcaaggggatttccccccttagttttggtcctttccccacgggggatgaccctggggggttccgcaacagttggtgcttaaaaaaaaaccggggctttggggagaagcaccaggggacctcccttttttaacaaagggggatcgggttgggg

SEQ ID NO: 34589 - DNA, 168 bp, Glycine max
  unsure (1)..(168): unsure at all n locations
  Clone ID: PAT_MRT3847_131236C.1
ggcaaanncnnncaaaggaagnagcaaaaagnanggcngaggaaggaggcnngccnncaacaccngnngcnncncagncngcccagggggnnaaagggcnnccagaagncaagaccaangaagngccaaaagaaaacacncnggagaagccagaaaagccngagagca

SEQ ID NO: 34590 - DNA, 411 bp, Glycine max
  Clone ID: PAT_MRT3847_131237C.1
gggcgttgggggcgggggtgctgattataataaaggggagactatagcttgggtttagcgcaaactggagacctacactgtgcgatgagagagtgagaggaagcgaacgaggccaatcatcacggttcgggtgtaagtgggcgtgggggaactgaagctttgaagaggcggagctaaaactgcctttacggggctgcactgcatagccgctggcatgatggggctaatgacgagctgcgactgctactgtgtgcaattgacccattggcaagcgaggctagggagggggaaatgcgggctgcaggtgaacatgcagattctgggcagacgctgttaaagtacctgtcctcttggcaacctgatgcttcatttcatggtcatgagtcaggagcagagcagagcatgaacatc

SEQ ID NO: 34591 - DNA, 1902 bp, Glycine max
  Clone ID: PAT_MRT3847_131238C.1
cgcagttatcttctcagctgtgtctgtttgcaatatataactctcacctttctaccattgctgtgcacctctttctccttttgtcagtttcttcttttcaacaagtatttgtcaatggatactaagtcggctgtagaattaatggagtcctctgcatagttacacttttctggatttcacagagtttgttttgaacaatgattgtttagcatagaacatcgatgaacctgagaaacggaaatgtataaacaaccaatcgtcatagttgtcacctgacatgtataatctaccttttgtgatgattgttgtaggaggtgcagcatccggtaagacatcagtttgtgatatgatttttaagcagcttcatgatcaacgagttgtacttgttaatcaggattctttttacaataatttgactgaggaggaacttacaagagtacaagattacaactttgaccatcctgaagcttttgatactgagtcaattgctacgtgttatggacaagttgaagcatagccaagcagtagatattccaaagtatgattttaagggttacaagagtccaacattatatttcttaatgatgtttttgcacctaaaggtgtgcagatgttataattttggaaggataaagatagtaacatccgagattgagattggttgttgtgacggtttccgtgacccacgtggcatgcgggagttgatgaatatggatattttgacacagatgctgatgttcgtttcttcccatagttagactacggcaagaagaattaggcgtgacactactgagaaggtcgggatattggagcagttcttgattattcaaaatttgtacttttgatgacatgtagctgaataataccccgtggaggagaaaatcatgtggccattgatttgattgtacagcatatccgcacaaagcttggtcagcatgacctgtgtaaaatatatcctaatttgtatgtcattcagtcaacttttcagatacggggtatgcataccctgatacgtgatgccaagacaacaaagcatgattttatattttactctgatcgtttgattcgattggttgtggaacatggtttggggcatctgccatttacagaaaagcaagtaatcactcccactggttctgtatacactggtgtggatttttgcaaaaggttgtgtggtgtctctatcatccggagtggggagagtatggaaaatgctctacgagcatgctgcaaaggtatcaagattgggaaaattcttattcatagagaaggtgacaatggtcaacagctaatatatgagaagttgcctaatgacatctcagataggcatgtattactgttggatcccatccttggcacagggaattcggctgttcaagcaatttctttgctcataaaaaagggtgtaccagagtccaacattatatttctcaatctcgtatcagcacctcaaggtgttcatgtggtatgcaaaagttttccaagaataaaaatcctgacatctgagattgagattggtttgaatgaagatttccgtgtcatacctggcatgggcgagtttggagatcggtactttggaacagatgatgatgatgagcaagtggtagtttcttcccagtagttatagtagggcagaaatccacaataattttagttgttcatcgttactagtgagacttcctctggaaaataggtttaaatttgttttatcactacgtgttggggtctgaattttagttctaaatcaattttgattatattggaccttaaaataccattacattatccttttgtttatgaaaattttatattacctttttaaattacataatttttctttgaaagaaattctttgaccggacactggcttatcaagatacatatagtcatgttgtctgtcct

SEQ ID NO: 34592 - DNA, 679 bp, Glycine max
  Clone ID: PAT_MRT3847_131239C.1
tgcaaaggtatcaagattgggaaaattcttattcatagagaaggtgacaatggtcaacagctaatatatgagaagttgcctaatgacatctcagataggcatgtattactgctggatcccatcttaggcacaggtaattcagctgttcaagcaatttctttgcttttaaagaagggtgtaccagagtccaacattatatttctcaatctcgtatcagcacctcaaggtgttcatgtggtctgtaaaagatttccaagaataaaaatcctgacatctgagattgagattggtttgaatgaagatttccgtgtcatacctggcatgggtgagtttggggaccggtactttggaacagataatgatgaccagcaggtggtacccccttcacagtagttatacttgggaggaaattcacaatattttttggttcgtcatcattaatgagacctttactgcggaagggggaaataaaatttgctgaattaagattctgctgggctccgagttattgttctaaatcaattttgatcataatattttgtttgattttacaaacatatgcataatcggaatattccaaggcaaattttgtattaccttttattattataccggaatttttctttgaacttattctttgccggacactggcttatcaagatacatgtttaccgtcccc

SEQ ID NO: 34593 - DNA, 292 bp, Glycine max
  unsure (1)..(292): unsure at all n locations
  Clone ID: PAT_MRT3847_13123C.1
gtgaaaatatgcattatntcgaaaggttcatataattggctggggtattaattntgnnncnagaagatagnaatgccataacanaagtttgatgttgaaaggtctggattgttcacttaggccatgagtaatacatacacaagaaggcacgaggagcctccaccaacgccatatcanaggggagaaatagaaagggacaagcacacattggggcaataacatgtgcacattancagtaaagtgacaagggacaaggncacatgtgctgnccaatcagaagcgtgctcatcgt

SEQ ID NO: 34594 - DNA, 432 bp, Glycine max
  Clone ID: PAT_MRT3847_131240C.1
aaagccaaaacccccgcatgaacctttccggatttccctttaagacccacgctgatcacttttcgcaagcggagacacagcaactccaggggtgtgttatgttcggtaaagcgactgactgtccattgtgagctattccagattggatctgtcactattatcatcacgtcaactcacccgcaatataaagagttgagggatgaaaactgatgcatcgatttgcaatctcgctctcgatagttaaaaagcccattccactaaagctcattgtcgttgacgaaaaaccttctagtacgacataagcggtgcctggctagcatgctttacaagaacttcctgtaataataagatcaagaaaaacccaaaaaagagtgatgccagattgagacatagaatcaccctacaacacgtggatcacgctcatattgaaac

SEQ ID NO: 34595 - DNA, 1006 bp, Glycine max
  Clone ID: PAT_MRT3847_131241C.1
ggctcgagtgagttagtaattggccatttaccttgccggtgagcgttggtgaagaaaaggttgaggctgagtgttattcttccctaaccttcgtctgaaaccctaaaacattgaatcttaagaatggaactgtcatggttgagtgccattctggtgggggctggttatctcgctttgggctacttcattggttctcagtatccccctcgtttcctcttctcacataaattatcgactaaacaaaaagatgcttcacttctcaatgacagcgacaataagaagaggaatactaagtccaaactcgaagacccccttgagattgaacaactcgctgaaattctcgatgattttaagatgatacttgttgtcaggaatgatcttaaaatgggtaaagggaagattgctgctcaatgcagtcatgcaacgttaggtctctataaaaagatccttcgtcgagcaccaaaggctttgaataggtgggagatgtctgcacagcctaaggtggttctcaaaattgaatgtgaagaagatatgctggctttgcaagaaagagctaaatctctgaagttacctacccatatcacaattgatgctgggagaacacagattgcaccaaattccagaacagtgatggcaattcttggacctgttgaagtggtagatgaggtaacaggtggactgaaactactatagttttctgtcggatcaacttggtacattgcttaccatgaacctgagtgagtgttcatgaaggataacagattgaactaattatgggcctcgtgaagatttacgattaaatctttagttgacagtatgatgatgatgatgaaaacttctcttaggagatctggaatcatgtgcaattcagtttgtacgagatatattacggtgattctaggctcagtgcccaaaacttttattcatggtggtttcatgattggttttggaaggtatgtgaatttttttagccatcgaaataaaatttggatatgccatttgcaat

SEQ ID NO: 34596 - DNA, 163 bp, Glycine max
  Clone ID: PAT_MRT3847_131242C.1
gggagaaaaacacagagaactaaactgcggaaggcggcttactgttagggccaagcgttagtttgtggtattgagcaataagctaaaagctaaaactaatatcacatctaacattaggactacataattactatgcatatatctatgcgtgataaataacaaa

SEQ ID NO: 34597 - DNA, 134 bp, Glycine max
  Clone ID: PAT_MRT3847_131243C.1
cacggctctgctccttaccactttcactgcttaaatttcacagaaaactctgggaacatgtgtcatttatcacaaacgctccttacagcctgatgcagcttctactcgcacctccttcctatacaatagaaatt

SEQ ID NO: 34598 - DNA, 112 bp, Glycine max
  Clone ID: PAT_MRT3847_131244C.1
ggagttagatctaaactctatggcatcggtaacgaaatttgcagcagattttaattcctctggtcttccaatcaatagcctatcgtaagaacttgcaactcgaactgtactt

SEQ ID NO: 34599 - DNA, 352 bp, Glycine max
  Clone ID: PAT_MRT3847_131245C.1
gtcctatgttggacatatataggtatatgtatattccaattaaaaacaagctactctttgcgaccaatgatagtttctgacgaccctcttaattagcaccattccatttccatatatacattgactcgatacgacaagacacatatgacacacataaaaccaggcctagcttcctacgctttccacgtttccatgcctgccactcatcatgctcttagggctagccgggaatgatcacaacaaggagatacgcctgttatataatgttggcgttacattgagttttgtgattatcgtatgtgtacaacacagcacatacatacatacgttaatattcgccacatcaacgaca

SEQ ID NO: 34600 - DNA, 259 bp, Glycine max
  Clone ID: PAT_MRT3847_131246C.1
cacaaaagcacatcaatatgactaccaatggaaaattaatgatggcggatatctgtactaatgcagaggatctggttgggagaattgtaactgctgctcattcagggaagaggttttatgttgattcaatatgctatgacatgtcagcagagaactctttccctaggaaagaaggttatcttggtcctctggagtacagttcatatgctgattactacaagcaaaagtatggggttaatttgatttacaagcagcaacc

SEQ ID NO: 34601 - DNA, 640 bp, Glycine max
  unsure (1)..(640): unsure at all n locations
  Clone ID: PAT_MRT3847_131247C.1
cgttctgttacttcagctgtatatcttttctattccatcttcaactccactttaaccttcagcttctatacgacgatcgccggctaaaataatatgatgatcacggcggcgccgactgtgaatgacgagtgccttacggtgaggggcagggcggttttgacccatgtccccggaaacattgttgtttctccggttggaacagagtccgctttcttgggtgcaacttcaagcatttcaagttcacgtcatggtttttgttcttggaattcttcagggatataagttgctatctttgttcagagttaaaatctgggtggatgataccacgtatagggagatctgcaagtgatgttccaatggaaactcaatttctgctccttgaagcaagagaagagtctgcccttnaggatgagctttcttctgactctgaagagccaactacagagaacagttgctacattctcttcttgcctgttttggatgggacagtttcgcgcaactttgcagggaactcaatcaaatgagctccagttctgcattgaaagtgggagatgctcatgttcaaacttcccaatcactagaagcagtatttgtaaattcaggggacaatccatttgagttaatcagggattctatcaag

SEQ ID NO: 34602 - DNA, 1337 bp, Glycine max
  Clone ID: PAT_MRT3847_131248C.1
gtgtatgtggagaagcaacactctcacccttggaagcatcaacaatatccacttcctcatgtggagaagcaacactctcacccatggaagcagcaactatatcaacttcctccctaaccaaagtaatttcagatttcctttgttgaggagtaatttcagcattcaaattaccacatgtagtttcgacagatttagattctccatcatgttccccactttctttttctgttgagcaattagcctgctcttggcaatcaccatcgtccaacaatcttgtcccttgcatcaattgtggggttgaaggagctggatatttatcatttccaggagacagctcatgatcattatcaacaaagctggatactttctctatatcaatggatactctactttcatgttgttcattgtctgtttggagctgcaacatggacactactgattctttgacaggtttaagtgattcagacaggatgcttgccccggcattgaatgccttgtgaaccacatgctgccagatatttctgagcttgtcctcagatagtggttttctgaggaactcaactgcaccaagcgctatgcacttcatcatggtgttcaagcaatgattgtttgaagtcataatggttggcaagtccttggcattctcaagaaatttgaaacctccctggccactgcttgaactcacctccactatggcaatgtggaagctttcgagtccacttgagattgctgacaaggcttcattctcctcacagaatgtagaaacattgtagtccatggcttcaagctttgcccttatctcggcagcagaaatgttgtctctctcaaggagaagaaccttgagccctttgggaaaatctttccattcttgtaaatcattggcagagaaaaccatagctggcttggcatcgtttctcagtctcccacagaaaataacagatcaatcgataccacttatcagcatccaattccttcttggcataaaagaaaatgcttcttcaattccattgctaattaaactgagtgttctttctcctcttattgaattgttaataaaacagaagggtaaagaagagagacggaagagaaggaaaggttttaagtgctggctttggagggtggtgcttcctgtgaccactgaacagttgcaatcagcagtttcggaccacaaacaagtaagtctgccaaaaaagggtcaatgatttctgccactacttcaaagttcaaagcttaactataatattcaacactaccccttcttctggggtcaccagcaacatcaccaatcaaccgacgaaggaagaaaatggttgcaggaaaacacctcgagccgaatt

SEQ ID NO: 34603 - DNA, 477 bp, Glycine max
  unsure (1)..(477): unsure at all n locations
  Clone ID: PAT_MRT3847_131249C.1
ggctcgagtcctgctaatggctttgatcatttggtgcatctatagcaaaatggatgatgacactaaagtccgaaggaaagaggttttgggtagcctctgtgatcaaagggcaagaatgttgcaagaccagtttagtgttagtgttaaccatgtccatgcccttgccatccttggttcaaccttccattactacagatacccttctgccattgaccaggaaacctttgctgagtacactgcccggacagcatttgaacggccgttactgagtggtgtggcctatgcgcaaagagttgttaactctgagagggagagatttgagaaagaacatggatgggttataaaaacaatggaaagaaagtcttcactggttagagatgagtatgcaccggtgatattcgcgcaagatactgtctcatatcttgagtctcttgatatgattcttggngaggaggaccgagaaaacaatttaagggc

SEQ ID NO: 34604 - DNA, 113 bp, Glycine max
  unsure (1)..(113): unsure at all n locations
  Clone ID: PAT_MRT3847_13124C.1
cacctttctcctaaaacatctccagtggggtcttnntcttgtattaacanncaacggtcgngccaaagacccatgaancaatgggccaatgggccaacgantccntgcttcct

SEQ ID NO: 34605 - DNA, 378 bp, Glycine max
  Clone ID: PAT_MRT3847_131250C.1
tttttgcacagtaaaccattgcagacaattacttcaatagctcttttacaataataaatcctctcttcccattacacaacaactgtttatctctctccatcaataagcaagcaattgaacagcaacagttatcacttccaaatctaacagtcaataagcaaattaacaataacaagcctataatacaaaaccacagcatatacaaagcaaaaccaaccaacaccaacaccaagaatgtttacctgtcgcctgcccagaagaccaatagacccaaggttaaaccctccaccaccctcttccttcgcgcttccaccaccactgccactaacactttcagcaaacccacgattcttcaacctttcactaagcaattcctaa

SEQ ID NO: 34606 - DNA, 278 bp, Glycine max
  Clone ID: PAT_MRT3847_131251C.1
tcaggcgtgcgaagacgagtaagagaggttccgttaagcagcagaaggcaagttgggtctggtataaagttgtcctacaacccactgacagtctctcctgagttattgattctccacaactcttcatttttagattatagcatcatatcagacaaattggacttgatcccatccagaaataaccgtatctagctcccatggcgtccaagatgtatcactgatattgcatcaccttgttgttcatgtacaacgacgaggtagacgacgtactgggggtc

SEQ ID NO: 34607 - DNA, 113 bp, Glycine max
  Clone ID: PAT_MRT3847_131252C.1
gaaagatgggcgaagtagacttaaaagccaagagtaaagcttcccttggttcactctcattggctgtctcattcatcacgggtatggccatggattctattcacatcgaagga

SEQ ID NO: 34608 - DNA, 557 bp, Glycine max
  unsure (1)..(557): unsure at all n locations
  Clone ID: PAT_MRT3847_131253C.1
ccacgcgtccggttccaggaattttcactgttacacgtaattgagtattcttaattacgttttgtaaaatgaaaatctcagttatgtcacgtgaagattatttgaaacaaaaaaacatgtggtggttagggatcttgtaataatttatcgcaattgggacacaacactaataatggacgcccatttattccttttccaggtacaagtatgattttcccttccttgaaaccaatggggaggtgactgtagatgacaaccgtgtaggaccactctacaaacatgttttcccaccagccttggctccatggctttcttttgttgggttgccttggaaggttgttccccatgtcaatagttcttcatcgcccttgcattgaaaaagaaaaatcgcaaacctgtttatttgcataaattgctttaatgctaatgcatgtatgatggcaggttgctcccttctccttgttcgaactgcagagcangtggatagctggaatcttgnctaatcgcattgnacttncttcnaaagaggagatggctaangacgntgatgcttttta

SEQ ID NO: 34609 - DNA, 270 bp, Glycine max
  Clone ID: PAT_MRT3847_131254C.1
cttgaaggttgagggaatgtgttttttttttgttggccttgaagagttgtatttgtgtgcttgtatttttctctccctctcttgctttttcttttctctttggtttatgtactctttctgtctgaacaatcaagacttttaattcatttaagttaaaggagaattagcattgtggtgtgatatgaatgtttggaatttggaattgtatgaatcaagaatatgtatgtcatttacaagagcaataaaggagaacactatctttacttttct

SEQ ID NO: 34610 - DNA, 219 bp, Glycine max
  Clone ID: PAT_MRT3847_131255C.1
gtgctggcaatgctagccatacaaaaagcctactatgaatgcaatgctggcgatatttcttcgccatttgcaggaaataccacacacacctcctgctagccctgagaatgaggtatataaaggctatgtggcgaatgtgatagatcctttccccatgcttgaaggggaaaggactcacgaaaaaccaaatcatattcatttacttatgtgtgaaagaaa

SEQ ID NO: 34611 - DNA, 207 bp, Glycine max
  Clone ID: PAT_MRT3847_131256C.1
gaccaacacaaaactttatcgaatataggacactcatttcacatatttgctcaacatctaaccattcaatcatcccatttgctcttcaaatttaactttttctacttcccgagaaatgacattcctacattttccaatctttttgcccaaattatcattccatagggaaggaagcttatatatttaatctgactccctgcttactca

SEQ ID NO: 34612 - DNA, 431 bp, Glycine max
  Clone ID: PAT_MRT3847_131257C.1
cggacgcgtgggcggacgcgtgggcggacgcgtgggcggacgcgtgggtttttctcttggcacaaccaaaagatacccttaactcaagttctatatcattcaagttcttggttaattctcaattccatctacctattgatgtaaattgtcatgagattaatgattcttcgtagttgcaaaattttgaatgatctgaactatggtttatactgtttactgcccattccttcccccaattatgtatttctttttggaatatcagatgattattggacagagatattaatatttgattattatatgtctacaaccctaaagtagttatgaaaatctgttgctcgagttatataaatcattttttatcacgtgcttcttcagcagttttttatggttattcaactggttttgctgactgcatatatcaacttttt

SEQ ID NO: 34613 - DNA, 508 bp, Glycine max
  Clone ID: PAT_MRT3847_131258C.1
tccaaggagaggtttcccgatcatcacgtgtatgacgtcctcctgtctttggggggggggggggggggcaaataacaaagggcgaggcgaggggaatgaaatagacgaggggaaagagaagaccaaggaaaggtataggtataggtatgtgaaaggttgggcaaggggcaaagtttggaacgtgggttgaaagcgcgaaacaagacagggagtacgtgggttgaaagataatatgttgggtgtgtggcgatgtgagggtcgtgtgtgcgctaggaggagaacagtgtggtggataagacaggtaggtagttttaggtgcgtgcaccgtagtaagtacttggtgggtgcagagcgccgggttaagtttaaggtggtgtgggagtgcacgggtagtggctgggagtgtagggcttagagtaccgcgaacagggagggcggccgggaggtttcatggactgctagttaggcgccatatccgcaaaacttggatgctggtggctataggtgt

SEQ ID NO: 34614 - DNA, 533 bp, Glycine max
  Clone ID: PAT_MRT3847_131259C.1
aaacaaaaaaagccaccactttttttcccacgggaaacaagttcaacctggccaatccaccaaacaaaggacatgctagtaatttcaaaccgggaaaaataaaactaataataggaataataacctgttcccccaaaaatagaaacaaaaacccttccaataaaaaaagataaaaaaaaagctttccgaaagatttcctttttttttaattttcaatttcgaacctttttttttttttcttggggtttggggcgcgcaaactatgatttattacccttaccggcaccgtcaccgtcaccggcaccgcacattcctttgttgacagaccccagcttttgcaaattcagcttcacaacagtttcagcaaacagacccgggtcctcctggggggtcccttggggcacgtccacgacgtacgattccaaaacaacgggccaaatttttccgtcgcactcaaacccgggcaccgaggggactgaccggtagttcctgagcctgtggccccccccgacgatggggaaacccatgacgtg

SEQ ID NO: 34615 - DNA, 676 bp, Glycine max
  Clone ID: PAT_MRT3847_13125C.1
ggatgtaaaagtagggggcatatcatattataggttcttttggacagtggtctagggttgtgtggacaattagacattgtgaaaattgtgataggtttggtcaaaacacttctgcaagggttgataaccagggctggcatatgctggtttaaatttgggtgtcatatgcagttaacaaaaggggcataggcagagaagatttaagctaaactactagcaagctatcatggtggtgcccaagtataaacacccaaagagaaactcatcctgatacaataattcaacaacaaaaaaataattcatgcataaaagttaaatattttacttgagttcatgtctctattgttcttcaaaaaggaatgcacctgttttaatttatgtaaggttggaattagttatgtgtagatcatgcatgcgatatgtgtaatttactctcaagttactgctaaatgtctacagccataaaagtatgatccaaaatgtcattaataaatcctcagaacttttctaattctttctttttttccatttgttagctcccataattccaaactaatgtaactttcggagtgcatggccacgacctgttgacttgaatgtgaataattttcagtcttcgttccattttttctattcatcaagaggaaaaggcagagcaatagaaacctaaatttaa

SEQ ID NO: 34616 - DNA, 693 bp, Glycine max
  unsure (1)..(693): unsure at all n locations
  Clone ID: PAT_MRT3847_131260C.1
gcagcgttaattgcaggagtggggctgccttgcttggggatgtgcctttctgtgctcttcactcttggggttgcgagagagagccatgccagagaccaagatttttggggtgcggtgtgggcaaacactcccattccaagtgcattgcgagagcttctaaagcctgggcctgggagtgtggaaatcgatgatcaccctatgcgaatggaggaaacacaggacccgagaaaccttcttctataaagaagaccttcatccaggcgaaacaatgagagtgcaattcagcgagcgctccctttcaacaaccgtggggtgtgggggcatggggaaaggagattaaagacactactaaagaaggagataggtttgaggagctatgcgtcaagaaagaagccattgagggggaagagaaggtttgtgcgaaatccttgggaacagtgatgtggtttgccatttcaaaggtgggaaagaacattcaagtgctttcaaggtcctttgtgaataagcaagaccaatacactgtggaaggagtgcgnaatcttggggacaaagcggtgatgtgtgataggcgtaaatttcagaactgcggtgttttactgccatgaagtgcgtgaaacaacaggtgtcatgggtccattgggggggtggggagggggccaaaactcaggcacttgctatttgccactcaaatac

SEQ ID NO: 34617 - DNA, 461 bp, Glycine max
  Clone ID: PAT_MRT3847_131261C.1
aatgttcatcgaagatgaaccataaccatgtcactttaccagaccacttcgagaaaaggctgatgctgcagcatcaaagacatttccccaggaagctgcaaccatccgtaaaacactgctacattgtcatcaagaacagctcatgcaaggctgtggaggcttcaacttccaaaacctggcaagcatgtgacacgctaaagtgtcgacttatgtatgcaattgtacatctatcactggcgaaaaagcttgaggatattgccccatcttcccataactgtgatgttccccatgctaatcacattgactaccacctcattgacatctcagaggatgtattagtgatgctgctgactgacactggcgacactaacgatgaccttaggcttccaaccgatgaaaatctgctttcacacatcaacgatgtcatttgctgagggaaaagatctggttgtgtatgttat

SEQ ID NO: 34618 - DNA, 436 bp, Glycine max
  Clone ID: PAT_MRT3847_131262C.1
ggttgacccacgcgactcgctgtttttcatgtgtggttgaaagttaaaaaaaacgaacatgtgttcatttgggcacaagggtgaatagataacagggactatggaggttacgcaaaaaaatgtgcaggttatcaacagcctctccagtgttgtcagtatcgaaggaaccttctcaaacataaaacgcagagctcgcggtacatttacaagttgagcctgctacatacatatacgacccataattgctcccaatgatcatggtgggattcgaaaatgtgcaaaagtgaccatacataattgaaagacaacattacaccctatttgagcgattgaagaaggaatctaagatcgacatgatggtgtctaagacttatgctatccctgcggccttcattgactgaacttgaggcattacttgatttacccataccatttt

SEQ ID NO: 34619 - DNA, 450 bp, Glycine max
  Clone ID: PAT_MRT3847_131263C.1
tctcgtgcggattacttctcttccggctatgcaataacaacgaaaagggcaacattgagggtcggtctggtgtgcaccagactggaccagggaacgaatagagatgccaggcttgcggttgaagagaactgacctcagcggctaagccaaacgcataatcggtggcagaaattgccaccggaagcacgtcgaagacgggtgaaccaaacacaaaattccatccaccacttatgttttataatccccaactaaaatccgtgaagaacatcttacttgctaaatggtaatccttagcactactgttagcagggggaaaaatacacatttagtaaggtacagaggtgcttcctttccttatggtcgcttgttgcactaccaagaggggtgagaagagcaccgttggccgcgacgggattatcactactctgcttcacggaagtaccaccttgg

SEQ ID NO: 34620 - DNA, 472 bp, Glycine max
  Clone ID: PAT_MRT3847_131264C.1
cttatatgctcgttcctctctaaaatttcggcagctaccctcagtgtgtcacagtatgtcacagacggtgagaccttggtgtccaacagtggagtttttgagcttggttttttcagcccgggaaaatccacaaagcgttacctggggatttggtataaaaatattactagtgatagagctgtttgggttgcaaaccgggaaaaccctatcaatgattcctcaggcatcttaacattcagcaccacaggcaatcttgagctcagacaaaatgactccgttgtttggtctactaactataaaaaacaagcacagaatccagtagcagagctcttagacactggaaattttgtggtaagaaatgagggagacacagatccagaaacgtactcgtggcaaagctttgactatccttcagatacacttttgcccggaatgaagttgggatgggacctcagaaccggtctggaacgca

SEQ ID NO: 34621 - DNA, 573 bp, Glycine max
  Clone ID: PAT_MRT3847_131265C.1
cctgaatacatgcgcttaatgaaaggtatcttgctaaattataatgaatgtccttagaactcaaacaacatccttttagcgaggtaagggtgcgccgtgtccgacgcctactgattttataaagcaaccccacacaccaggctatgctggatagccgagcaataagcgaccatttggcccgtgtaagacaggacgtcgtagtagaccggccatgccggacagtgtgaagaccactgtgcctattcttgcgccactaacgggttgctcctagcaaaggatctgatcatagacgaatccattcttgctagtggagccgttaccaaactactatcctatattgtatactacttcatgtgcgcttgaaacgcctaatgtatttacctacttgatcaaattcttgcgacatctacaacacaagtcctaatcttaacctacatgtcttgcttctggactccacgccacacatatcgtcaacatgtgattgactatatcgacagctaggaactgactcacatgtatgcaacctcatcagaagccctagacgtgtgtacagagataatatcagacccttat

SEQ ID NO: 34622 - DNA, 479 bp, Glycine max
  Clone ID: PAT_MRT3847_131266C.1
gccgtcaggcgagacagccacaattgtgaacacgtcatcgctctcaaatgagttcttgtccttacctgtggcagcatcccagattttgactgcctcggaggagcaggagacgatctgcctgttgtctagtgaaaagaccaccttctctactgagtctagatgccctgttagggttttctggagatcgcccgttgcagcatcccaaagcttgatagtcttgtcagcagagcctgacgcaatcaccttgccgtctggtgaaaggaccatagttgtaacatgctttgagtggcctacagcttcctgaacgccacctatggtaatatcccaacgcttgattgtcgaatcagtagagcatgttacaagctggttgacgtcttgggaagaaggcgatagacataattgcccctggatggcgctctagcgtcttctgaagagtgcccgcagcatcccaaataaagattttgccatctttaaagcct

SEQ ID NO: 34623 - DNA, 257 bp, Glycine max
  Clone ID: PAT_MRT3847_131267C.1
ctcgccccctccatcagtcacgctgtctatcaccgtgtatattcgcggcttgtttgggtgccctaattagggtttagaatgcttagtatttgggaacgtaccacgaatggtttatttggcattgagattctgtgagcaatgtcaacatagaccatttcgtggactttgagttgctgtacacattgctacacaccctaatgccattagggtaacttgtatgttcctgcgatgaagttttgtttaaccagattctttga

SEQ ID NO: 34624 - DNA, 447 bp, Glycine max
  Clone ID: PAT_MRT3847_131268C.1
agcgggcagaaaattggttttataactggtcgggccttggggttatttgaacccccccccaaaaaaaaccgaagattaaaacccgggggaaatggaaaacctggtccggccaaaaacaaaaaaccatttagtgccaaaagccatgaaacaggaacggggtccccaaaaaattagagacccccggggcccacccttaaattgccgccggggcccccccgggaaaccccgaccggcccccggggggcgccccactttccgtaaaaagaagggtaaaaaaagggggccgaagaaagggcaaaaccgctccctgggggaaaatgtttacccgccccaatcccaaacaaaaaacccgcggggggcaaaaaggggaaaccccggggggccaaaggagggggcccaccgcccttttttggggggggcccccgggccggcctacaggggggaaaa

SEQ ID NO: 34625 - DNA, 177 bp, Glycine max
  Clone ID: PAT_MRT3847_131269C.1
aactctccaatctccatgattaaagcttttatgccatttactaacctatcgctaaacgattctaaatactttatctaaaggtttcctaataaattcaacgaatttatttcaaaagactaatcttaatatgccaataatcaactctataaaacttttaccaaagttaccatttcttaa

SEQ ID NO: 34626 - DNA, 1684 bp, Glycine max
  Clone ID: PAT_MRT3847_13126C.1
aatttgatttcaaagtatattatgtgctttagtatagttcatgtgatattgaaaaataataaatttggtagctttgtgtttaattttcttataatcagcagtatgcaacttggattcaaaaattaaatttcaatttcttgttggttgtaattgatatggttaaggacactagcataactcctatcttataactgtgaattctctacttgttataagttcttctatcgtcatgttggataagtaatggcatgtttatagtgtctatatattatacatgaagttttaatttgttatttaaaagtgttctcttagcaatccaaaagaatctttgctcgatgactagttaacacttaacaccttatattaattgtaacgtaggtgttcttgcgttcgttataaaaattcaatttgaatatattactcacatacaaatggcagactggaagtagttattgtccattaacattagcatttaacaataattactgcagttttgaacagtgaattcaattatctcatgatttcaagttgattggttttgatggacattattgatcatgttgatactaaaagtcttgaaagaattaatttaaaatgcagcagagtctattgatgttgttaaggtaactgactaattcatgtacctttttatatttttattttattgatggtctatatttctattttgtttatgcactttcgtgaaaaataaacagattagcagttaataaatgatgtaagactctattttttttttatattttttctgtagttactttttcttgcacctttatctatataatgtatcagcagttttttacatttgtattttatagttattatttcatagtactttttgttggaagtagtctatataatttcatttatgattgcagtaattataatagaggttccgtttttgagagatctagttccatgtttgactattatgctctatgaattattcttaattagtaaaaataccgaaatgattggatgttccttcttcacaattcagaatgttcgttgcttaattttatgcttgttttttctgccatcaacctggaaatgacgtgttcgtgattttcactattttattcacatctagattaagttcatgccaattcgcaatcaacaaaatttaaaggctctatttctttcccaattgctttattaggttatcaattaatatatcaaatacaatctatatattagttgtgaatagtgttaattgtttgtgatttgctttagtttttaatccagaaagtagccttttcgaattttgaaattattaactgaagttatgactcttgtgatcacctgatgttatatggatcaatcacaaccgtagtttcgatgaatggattgttgatgtaggagaagtgtgatatatatattctttttcatcaatgttacaaatctcattatgttaattttgttgagaagaattatctatgatcgacttgtatactgatgtaactatatttacaaaaatatatataatgcttttataatatattttttttgctggactaatgcttttaaaatatagttatattagtatacaagtcagtttaatttgtgttgtcagtttcatggatcacctaaagaaggtatcctacaatcataaagacattaggtgatccatgtctttaggctcaattatagaacatgcctttaaaga

SEQ ID NO: 34627 - DNA, 330 bp, Glycine max
  Clone ID: PAT_MRT3847_131270C.1
ttgttcgcgtgggcggacgcgtgggctcaactgggtgtggttgagacccaagatgagtctgaggacattaacggttcagggcgtggaccgtaacatctactacccttggatcggagacatcagagacattgctacaatgagtgaccaccaacaatgcatacctatggatgctcactttaatgacattgaaatcaacttgatcagtaacaacagcttacaccatcaatgaatacagcaagagcgcatagatgttgttgtgtcacaaacactaagggtacaacatattgaagaactatcggaaagatggcacagtgtgtgcccagtgtcata

SEQ ID NO: 34628 - DNA, 463 bp, Glycine max
  unsure (1)..(463): unsure at all n locations
  Clone ID: PAT_MRT3847_131271C.1
aaaaaattcaattccaattctaaggagaacaggtatcttccccaactctcacatcacatacctgttctccttttttttcccctttccaccaaagccagggtttttctctttcaattttcatgccactcagattcacgggattatgtttcttctgccacacaaaccctttttcgtcttcggtgtaaactcctcttccttgttgcaattgaaaagggtccctttgcttgctcttgtctgctgttgctgatgtctattattgttgctgaagggaattggcttgtgattgtgaacacacccaattcctcgccattgcaacacacccacttgtctttctctaaacgcagatgggataaggcgtcttctgagcttcagagtggatagtatctgaatcagattcatagctataacaattaacttgcggtntttaatattttggaatcaatggattcttcacagggtctac

SEQ ID NO: 34629 - DNA, 1241 bp, Glycine max
  Clone ID: PAT_MRT3847_131272C.1
ccacgcgtccgattaagttcactgtcgacaagtttcgccccaacactcaactcagctcgctcttgttcttcttctccattatcaaacgaagtatagatatcatatcattgcagcttcattttcatccaccaattaactaacaatggcgcacacatcccttttcactccctcttcctctcttaggttcaaccctcttcttcttacctccaccccctcttcttcttcttcttctcgctccaacaacctttctttccccgctctctccagccttgctttgatttgcaggaacctaaggaaatcggtagaagatagaaagattaacaaaaaatctgctgtgaaagcagtgtatggtgatgaattttggacacctgagaggagttcacgtccgggtatttggtctataaggagtgatttgcaagtcccatcttccccttatttccctacctatgcacaagggcaagggccaccccccatggttgccgagcgtttccagagtgttataagtcagctttttcaatatagaataattcggtgtggtggagcagttgatgacgatatggcaaacatcatagttgctcagctcctgtaccttgatgctgttgatcctaacaaggatattgtcatgtatgtaaattctccaggagggtcagttacagctggaatggcaatatttgatacaatgaggcatatccgacctgatgtgtctactggtttgtgttggattagcggctagtatgggaagctattctgcttagcgcagggactaaaggaaatagatatagcttgccaaattcaaggataatgattcaccaaccgcttggtggagctcaaggaggacaaactgacatagatatacaggtataggctccattttcatttttccaccttatttttttacataaacatctttttttgtttctaatagtttatatactatgatcatttgaaattaaagcatgtctaggtatttgaagccgagtaagtgttctggtagaaagacccaatttcttttttaattgcgcttgatgaaattccaaaatagaagtgcattttgtttatgtagcaaatggaccaaattggtccttagcagtatttaagttctgatgttttcaatcagaaatgacttgacactgtgccagagttattctctttgtgacagctcactttaaattacaatttacaactctgaggtttgttcctgtggttctagtacaataagctaaaatgctgagtattggatt

SEQ ID NO: 34630 - DNA, 1725 bp, Glycine max
  Clone ID: PAT_MRT3847_131273C.1
actcgagccgaatcggctcgagtacggctgcgagaagacgacagaagggggacgatacaagggtagggtattaagccgtatggcttgagcctttcccataaacacaaacacaagcactgaattgagttcactgtccacaagtttcgccccaacactcaactcggctcgtcgctattgttgttgttcttcttctccatatcaaacaaagtatagataaaatatcattgcagcttcattttcatcctccaattaattagcaatggggcacacatcccttttcactccctcttcctctcttaggttcaactctcttcttgtttcctccaccccctcttcttcttcacgctccaacagcgtttctttccccgccctctccaggaacataaggaaatcggtagaagatagaaagattaataaaaattctgctgtgaaagcagtgtatggtgatgaattttggacacctgcgaggagttcacctcaggatatttggtccataaggagtgatttgcaagtcccatcttccccttatttccctacctatgcacaaggacaagggccaccccccatggttgcggagcgtttccagagtgttataagtcagcttttccaatacaggataatccgttgtggtggagcagttgatgacgatatggcaaacatcatagttgctcagctcctgtacctcgacgctgttgatcctaacaaggatattgtcatgtatgtaaattctccaggagggtcagttacagctggaatggctatatttgatacaatgaggcatatccgacctgatgtgtctactgtttgtgttggattagcagctagtatgggagcttttctgctgagcgcagggacaaaaggaaagagatacagcttgccaaattcaaggataatgattcatcaaccgcttggtggtgctcaaggagggcaaactgacatagatattcaggctaatgaaatgctgcatcataaggcaaatctgaatggatatctcgcctatcacactggccaaagtttagacaagatcaaccaggatacagaccgtgactttttcatgagtgcaaaagaagccaaggaatatggactcatagatggtgtcattatgaatcctctcaaagctctccagccattagaggctgcagcagaaggtaaagaccgggctagtgtttgaacatgagaatgttgcactttaatttccaaggtataaaaaatcatagtgttagactgtaaaatgtttttggttgctgagtccaacttaatttttttttacggatgttgatacctgtgtccatgtaccaaaaatgaggcgaaattgatactatttatttaatattcactgctttagagtttatactgacagaaggttctttaatggatcctgcatttgcttttaccttcaagcattctttttacaaatgggacaatagtgttaactgttgaaaaagaaatgtttgctttacacaaggtagtgaaaatggtacgaaccaacaatgattagttacatgtactcactgttttgtttaaataacgaaactataggccgcatttcttgttaactttacgatactaatatcagatagtggtagcattgactttgaattttagctagtagtgatttattgatatattatttgttggaactaggaatatatcgtgtcaaatagtgtgaatcaaattttgtacactttttgaacttttgattttatcgaagtgcagaattttctc

SEQ ID NO: 34631 - DNA, 372 bp, Glycine max
  Clone ID: PAT_MRT3847_131274C.1
gacgctggacgcctgaggcaccgtgtccggaattgcccgacgcacccacgcgtacgtggtcacgtgggcggtcgcgtggggcagaactatcacattactgctattgctggggctcataatgggagctctcttaaggcgctgacaaaaggggcacagtctgccgacgatgatccaaatgaagttgctcagccccatgctagtgtctctacaaaaaaagctgagatgggcactgtgctacttgaacggctaccgccggaagacgatggggtgttgctatagtacgacccggtatattcaacgattcaggaggaggtagttgcttgcctgtctgctcgcgagggaactgacacacggagagctgatggttatagg

SEQ ID NO: 34632 - DNA, 473 bp, Glycine max
  Clone ID: PAT_MRT3847_131275C.1
aacctttgggctgatttatgtgcttggaagatgatagaagggtattacaccttccaccgcacgagctaggacctttgggcggtaaagatagcttgcatcgaattctgcgacgtagacagaagactcttctcctacatagcgcactggacgttattactcctaaacgacctctacgtagactacttcaccggattcgagaataggacagaactcagggaccccaaggagagcagagacttttggcccgagaactgcgacatgaagatagagaagaaggaaccgtacggcgaagttagaagggacctctagaccgtaaagagcgagaaggacgcgtgagccgacggtagagaagatgataataaggacactagacacgaatgggacagttacaacgacctaaaaggcgataccaagatagataaagacggtcacggcacggcaagtagtagtagttattcgagccggaaagaact

SEQ ID NO: 34633 - DNA, 239 bp, Glycine max
  Clone ID: PAT_MRT3847_131276C.1
atctgaagttaattgctttctctttggttcctagctcgcgctctctctacgcacgcctcatcatcccttctcttttcacttgctttgcaggctccattcatgaggtctccgtcgttggctcttcgccccattggtggcctcagttttgatctgtgccggagggacgctatgcttctgaacaagggccttttagcgccagcctctctcataactggcacctctagtgtcgcgttagtttt

SEQ ID NO: 34634 - DNA, 484 bp, Glycine max
  unsure (1)..(484): unsure at all n locations
  Clone ID: PAT_MRT3847_131277C.1
ggtttggcttttttttttttttttccgcatataaatatcgtctggagtgataagtgcatatatttcacactaattaagggaggtaaaatcatatgcatcccggctctagaattannnncccttntnnnggactggnaggggnactantagcaccacaagccacacaaggggttctagagattggattactgggtatatacaatacacatatatatatatatacgccttttttctttagagaaagcatgtcttccatcttccattagggaagctagagatcaaagctgtgactggggaaatggaaaatggaaagaaggcgctgtcttggcatactgggggacctgatttcttcaacaacacttgtctgaaggggtgaagggcgccaaactatgacacccacatcaacaagggcccatttttttgatatcgaggcataaatttctttaaaggttgggctggaacccaaagaatgaacggtggcttt

SEQ ID NO: 34635 - DNA, 2009 bp, Glycine max
  Clone ID: PAT_MRT3847_131278C.1
cacctactcaatcacgtttcttcctccctccattgaggggagcaacagaggtcatatatcaccaactgtactggcaatggagaaaggaagtatggagaacaatgagaaacatgtgacagagaatgatcctaagattgactacagaggatggaaggccatgccctttatcataggaaatgaaacttttgagaaattgggagccattggcaccttagccaatctcttagtctatctcactactgtattcaacctgaagaacatcacagccacaaatataatcaacatcttcaacggcagcaccaactttgctaccttcataggtgccttcttatcagacacctactttggccgctacaagacaataggattctgcacattcacttcatttctgggattgctagtgatacaacttacagcagtatttaagaatctgcatccacctcactgtggaaaggagatgaaaacatgcaaaggaccaactgcagggcaaatggcttttctagtgagtggatttggtttgctgctgattggtgctgctggagtcagaccatgtaacttggcttttggagctgatcaattcaatcccaatacagattcaggaaaaaaagggatcaacagtttcttcaattggtatttttttaccttcacttttgctcagatggtgtctttgacactgattgtgtatgtacagtcaaatgtgagctgggcaatagggttgggaattcctgctgctttgatgctcatatcttgtgtggtgtatttcatgggctccaaaatctatgtcaaagttgaacctagtggtagtcccatagctggtattgtgcaagtttttgtggttgcagtaaaaaaaaggagtataaaactacctgcagagcatccaatgctttccctcttcaactacgtgccgcctatgagtgttaactctaagcttccttacacgtttcaattcaggttattggacaaagcagccattgtgaccccaaaagataaaataaaaccagatggatctgcagcagatccatggaatctttgcagcatacagcaagtggaggaggcaaaatgtgtggtgagagtattgccaatatggtttgcagccatagtgtaccacttagtcattgtccaaatgcacacccttctagtgttccaagcccttcaatccgataggcgtcttggaagcagcaacttcaagatccctggtgcatcctttaatgtgttcttgatgttgagcatgaccttgtggctaccaatctatgacagaatagtggtccctttttctctgtcgaatacaccggaaaagagtggtggcatcacactccttcagagtgatggaattggcatttttatctctgcattgtgcatgatagtagccggtgtagttgaagagcatagaagaagtttggctctgacaaatcctattggagtgcaaccaagaaaaggtgctatttcatcaatgtcaggtctatggttaattcctcagttaagtctagccggtctatctgaatctttcactgctgttggacaagttgaattttactataagcaattccctgagaacatgagaagcattgcagggtcactattctactgtggcatggcagggtctagttatttgagcactcttctgatttcaattgttcacaatactagtgagaaatctgcgactgggaattggttaccagaagatcttaataaggggagattggatttcttttattacatgattgctgctctagaaatcatgaatttggggtactttctgttgtgttcaaaatggtacaagtataaggaaattggcagcagtgaccttgaactcaaccaagtacccaaacaatctgaaacatccaccattggtgtttaaaaaaaaaaactaagttaatgtatggaactataaagtagtgaaacaatttagacaaaagtattgtaacatggattaggaaacttttggtgtaatattcttaattagaaagactggaacaagggttactatgcaaaaaaaaaaaaaaaaaaaa

SEQ ID NO: 34636 - DNA, 662 bp, Glycine max
  Clone ID: PAT_MRT3847_131279C.1
atgatgatgatgaagatgttgggtacacgagacaacctattgaggatagggcctggtttttggcacatgaaatagattaccctagtgacaatgaaaaggggactgggcatggaagtgttccagatccgcaggaaagaggtccagccaaagatgaggaggatgatcaatcttttgctgaggaggattcttacttctctggtgagcaatatattctaccaaaaaatgttgagccggtcactgcttcagatgatcctattggtctaacggtcactgaaatgtatggaagaactaatggcgatgatgtaatggctcaatttgatagacaattgatggatgttgaagaactgaatctgatgcatatggaacctgtcaggcagggctttgtcactcacaaaaatgatctcatcatgctaggagatgggaaggttctgaatcatagtgcgaggtcacgaattgaggacatggaagatgatcagcatggttcagttagatcaataggggtgggtatcaacagcgatgctgctgatattggcagtgaagtgcatggaagtttggttggtggtagtagtgagggggatttagaatatttccgtgatcatgatactactacacacagtggctccaaacactctcatcatgatttggataagaattctattaac

SEQ ID NO: 34637 - DNA, 414 bp, Glycine max
  unsure (1)..(414): unsure at all n locations
  Clone ID: PAT_MRT3847_13127C.1
ctcgagccgggtcggctcgtaggttaaacttcctttagtgggccattcggatactttatctttcaagaatgtgttatccaactttcctagcgggtgctgtgctgctgctacagttagcgacatctttcctggtttgtgcttcatatgtttcttgcctttggccgatgggaggggattgaccgttccaaactcctgctgctgggatgatgttgccttgcggttgctccaggttgctgtttctcttcggggagcagttgtgattcctcttcgctcggtggttgttcagctcgggcatctttgttgctggggactgtttcactgctgagtgacggggccttgtncgcgttggggcgcgttacatgtccgtctttgtggttggcgtctctggtctcggtctgcttttggtggtttgaa

SEQ ID NO: 34638 - DNA, 963 bp, Glycine max
  Clone ID: PAT_MRT3847_131280C.1
ctcacacgttgatagtgaaatggaggctataattttttctccttctctctaacgcttggaaacccaatagaggaaaagcttgaggaatcttaaggaaccgctagagacgatgatatcattatcgaactacatgcgtgagccctcttaagggaatgaacatgtgtggagatccttaggaaatcaaattgagatttattttgggatgtttattgtattgtaattcttcacgtgtgattataattatgagattgtaatattgagatcatgaaattgtattgtaattcttcacgtgtgattataattatgatattgtaatattgagatcatgaaattgcgattaaaattatgtgtaagtgataaattgaatatgtgatgaattgtgagataacatgttactttgagatcataacattgttattgggattgagtataagtataaagttgaacatgcattgatttgtggatgtatgagtataagtgtaatcaattgtgaatgtatgaatacatgattttgatgatgccaaagaataatcaaacaaggttgctttcaagattacttcaacaaacattcaaaggctaagcattgcttcaagaataatacaaggttgcttcaataaacaagcattacttcaagattcattcaagcttttgcctcaaaacaaattgtttccaatatatcaaggctctggtaattgattaccaggtagtgtaatcgattaccagaagacaagtttgtaaaatcagctttttgaagggttttgaaattttaatttaaaagctataatcgattaccattgatgtgtaatcgattaccagtaacagaactctttgaaattcaatttgaaaagtcatgacccttgttagttgctattcacgactaagttttgtattgaacatttgcacaaaaatagctctttacctccaatttatagttcattttgtaggaattgtacatattttcat

SEQ ID NO: 34639 - DNA, 508 bp, Glycine max
  Clone ID: PAT_MRT3847_131281C.1
gatttgttataggtattcaaattaacaattatattgtcttatgtacgtacgtaaatcattcatatataatgtgttatatgggttagtggtggtgtaatattatactagttagtcgtgtaattttaaacctgtaagtttcagttatttttgtttatcaagttaaatatatgttgttggttattgttattcagttaaaattaatagttcagcggcaggactcgtgtgatgtaaactcattaattagaactatcagatttgcttgatctcaaacacctacctttcaatatggtacgagagattggaggaatagagtccattggcagaagttgaccataaaattgagaaaagaaaggctcaacaccaccacatgtgcatttgcaggattaatgtttgtactcaaccaattcttctcaattgcctttaatttggtgaaattgtttgtagggcatgaattatacactatcagtcattgactcgtgtagtactgtatttatacgtatattggaaa

SEQ ID NO: 34640 - DNA, 548 bp, Glycine max
  Clone ID: PAT_MRT3847_131282C.1
actaatggcaacgtcatcgtcactattatcattatcatcttaaaagatgatacaaaactcagactaacaaatatgattatatcttgaatttaaaaatattcaaatacttctcaaatgggtgtataaaaattccaaactatcaatttatgttaaaagagaccaatgactggttactcctctttttttttttatcaaaaattaagttggcttataacgggactgccgcaagtccaaaaaaaaaaaaaaaaaaaactttacagaaatagaaatcaaagaggatccttaccctattgagcttagtcctcgaatgcaaatataaataaaaataggggtaattaatcatgaaagtcccttgcaaagatcaaagtacttggccccaggtggggatgagcagtgattgttatgagtgaaacgccaaagcttgaaaaccccatcaaggctcccagtgcaaatggggcagcaaccattctttattattttccagtaatctccctcctaagaatgctggcacacacctgattggccctctatggccccctaaaactgcc

SEQ ID NO: 34641 - DNA, 307 bp, Glycine max
  Clone ID: PAT_MRT3847_131283C.1
ggctcgagcataaatttccctttaagcacttatgagaaggaacttgaagagatgaagcacatgaccaggcaagaatttgtcgccaatttaagaaggaagagcagcggattttcaagaggggcatctgtgtatagaggtgtgacaagacaccatcaacatggaaggtggcaggcccgaataggaagggttgcaggaaacaagacacaccctttaggagagacccacaacatatcaatcccgcatgattatatgactatgatacaccttcagaggggtgaaaaaagaaatggaaaatataaataaatag

SEQ ID NO: 34642 - DNA, 237 bp, Glycine max
  Clone ID: PAT_MRT3847_131284C.1
cacacgatcatgggcaaatttcgctgattattttggcagatgctgacatttgaaagttcgatcaggttacttgtgattgaaacaatacaaaatttttaaaaagaatcaaagctgaagcaagttatttgtaatccgactctttcatactttgcttttgctttctacaacctattcaaactaatactcttttcccgaaccgccccataaacaacatcagagcacagataaaaatctggg

SEQ ID NO: 34643 - DNA, 919 bp, Glycine max
  Clone ID: PAT_MRT3847_131285C.1
acttcattatcagtttccaaaggctagcaaacgaccaattctgcaatgcaaatcactgtattgtcatcactggaagaggttacccggatattcctacaagaaggtttttgcgtcttctggttgagaatttgtgcctacctgcttattgcttggtagattgtgatccctatggctttgacatcttaaccacttacagatttggttcaatgcaaatggcctatgacacgaaacatcttcgtgtcccagagatacaatggcttggagcttttccttctgattctgagagatattttgttccgaatcagtgtctccttccattgactgctgaagacaaaagaaaagttgaagccatgctacttagatgctaccttgaaagggaggtaccacaatggaggttggagctacagttgattctgcaaagaggagtaaagtttgagattgaagccttatctgtgcacgcactttcattcttgtcagagtcttacataccatctaaaattgaaggtaaattgataatgtagcatgctggacatttatgtgtcaagctctatacaagcaactggactagggcataatcagaacatgccatttgttacgctttctggaagattaaacatttaaacgatttcctgctgactcacgtccccccccaaagttattactcgtggctttgtgttgccttgccggttttcccctcgtctggctgagggtatgtgcctacccgctgggggcttgggctcttttggcatggcggggtcgaaatgggtgtttagtttaggactactgctgcctgcatttttttcagttgctgcctgcattctctatcaagtgaaacatgtgagcagatgaaattattctcacattttgttaaatttgcacttcatgtgtttttttatttacatctgatattctctttgta

SEQ ID NO: 34644 - DNA, 352 bp, Glycine max
  Clone ID: PAT_MRT3847_131286C.1
cgacaagaaggggatctacactcagaaccacattacactggtcaaagtgctacagataactaaccattcacaccacaactccacactacttagcacaattcacttatgctgggattggcagctttgaaatcaactagaacaatcaacagtcgattccgtgtctcacaggtggacgaggaggatgttgaccttcaactacgacagctttgagtcaaaagaatactcacgaatcgacctccttttgagtcagatgaagagtacgtggctctttgcctcagtcagtcttacacataaccgtaacgataacaacacaccaataccgtcgtcctcacagtcacactgataagcctca

SEQ ID NO: 34645 - DNA, 485 bp, Glycine max
  Clone ID: PAT_MRT3847_131287C.1
cggttgtattcttgttattgacgttcaagtgcaagactgtgagggccagttctcttgaaagccataattcatcgttttatcctgttccttccattcaatgggagggaactgggaaaaacgcctttgtgacccgagggaccatagaccgggggaacagatcctttagccaatacctaatgcttaaggttaaattgaacaaaggaaattttctcaagttttgatttcctcctatacaatagaaaaacttggggagcgttatgaaaaacttaaaaaactattgggaattgacggtttttttactgcttcacctaaaatccgacctcttgaggatggtttacccatggaccattcccgggcccaaattgataaccaaatctttctaaaccgccttttctcaggaaaaaagggaacccccaatttggacattttggaagattcctcactaaaaggggggggacctggacagacaaaaggcctctaaattc

SEQ ID NO: 34646 - DNA, 369 bp, Glycine max
  unsure (1)..(369): unsure at all n locations
  Clone ID: PAT_MRT3847_131288C.1
aaggtaataaataattggttgatcatgtaactttttttagagattaacaaatgtgcacatcatttgtccattgtgtatgcgctgccctatcttcttctacgcttctctttcgttttagttcaccaattagagctaaactcagatgtctttgtttgaaaggcaatgtattnnagttcttttgttgcaagtatctaagcctaactcaggatgaagctagtcatcacacacctcgccggggcccttatatatcctaattaacgtagtcataaagcaatatttatatatantgtttgngcagcanttcttcagaataatttcctatgatccaaatggtgccacatttcctccatttccctcatctgatggact

SEQ ID NO: 34647 - DNA, 312 bp, Glycine max
  Clone ID: PAT_MRT3847_131289C.1
ctaaaggccaaaataaaaaaaataatttaaaccaccccgggggcgtaaaaaaaaaaaccaactttttttttaaaaaaaaaatgggttaagggggttttaaaaaatattgattccccataagagaagggggcagaaaattaaaaaaaattttcccaccacttttatatgaattcaaactgggtttctcaagggcccttttttttgggcccttttttttgtttgggggccttctttagggcccccccaattggggttcttgtggggcctctaaaaagaatctttaaatttagtctttaaatgcccctatttata

SEQ ID NO: 34648 - DNA, 1243 bp, Glycine max
  Clone ID: PAT_MRT3847_13128C.1
gtaaacgtcctttttgccctattcactctatccgcgatgggaagaccatcctccaccatcgaaacgcggcccacgcgtctgaagggttctgggtcttgaggaaatcatatacgagagtgaacagattctgagtcagaagaagaggaacgtgacggagaaagagtaggaagaatagaagaaaaagaagtaacaggagcaggaagaagagaagatatagcgattcagatgagagtgaagagagcgagagcgatgactctgaaagcagtggaagaaagaagaagaaacgttcctcttcttctaggtctcgatcgaagcgtatcagaaggagcagcaaaagaacaaagggaagctctgaaactgagagcgcgggttctggttcggaggaggaggagaatggttctggtgatgccaagagtaaagcaatggttgatgaggtgaagatgacggagattaacgcggaggctataaagttgaaggaattgtttgagtctcagaagaaacccgcattggataacgaacccgcggttgggccaatgccgttgcctagagccgagggacatatcagctatggtggagcgcttaggcccggtgaaggtgatgccattgcacagtatgttcaacaagggaagcgtattccgcgaagaggagaagtgggtctttctgcggaggagattcagaagtttgagagccttggttatgtgatgagtggtagtaggcatcagaggatgaatgccattcgtattaggaaagaaaaccaggtttatagtgctgaggataagcgcgctttggctatgtttaactatgaagagaaggctaaaagggagcacaaggttatggctgatttgcagcgcctcgtgcagcggcacattggccaggatgttggcccaactcatgatccttttgctgcaaaagcctctgatggtgctgatgcatgatccttaattttgatgtatgttttgctcctgttctgtgctttttcttttcttttgctggctatatttgaacttttctatgggatttatagacatggagaatagatatagatggcatactaagactgagaaaatagagagattagtgaactttgttttctttaacttggtgagttggtggggcatatgctttacactgttagctaacagcagcagattatatcttatattacaagttaaccaaactgcctactagtttaatagcatgtctaatttaactgctttaatagcatgtctaatttaactgcttt

SEQ ID NO: 34649 - DNA, 454 bp, Glycine max
  Clone ID: PAT_MRT3847_131290C.1
ggctcgagattatgctgatgtcagttttttgaggattgctatcttaaatgcccttggagcttactacagctaccttggaaaaatagagacaaaacaaagagaaaaggaggagcatttcattttggcaacacagtattacaataaagcatctaggattgacatgcacgagccctccacttgggttgggaaaggtgacttttgcttatgtttttctgaagtatgtctaattgaaactagattgtggtcagtaatttcacaacaatgaaaaggacacttgattacttgttagagttatctaggattgggttatagcaatgactttaggtagcctatagatatcttagcaaaatatccaatatcccttttgtggttgattcataaaactcaaattcttagaatttggacttttcttcttgatattttgaaaggagttcactagattatggtgtatatc

SEQ ID NO: 34650 - DNA, 494 bp, Glycine max
  Clone ID: PAT_MRT3847_131291C.1
ggtgttttttttttttttttgaagaaaactctttgcatatatataatttgaattctttaactgtactacctaacatgggtaaattcataaatcctcacaaagcacacttaggaaaacagctcaatggattttttatcgtgaatatttattggaagaggcggaactttaaatcaaactggaacgtctgctagataaaccatattgaattatctcacatgagggaaagcatttggggcgtgatcattaacgctgtcatacccaatgtattagatgggtgccgatatcacctgatacccacaggctagatgaccccttttaaatcaactgatcctcctagggatttaggaatgcatttatccaaggatgtctttcgggtagtgtaattgactccaactaactagccacttgcttaatgctaggcctttcctcccaattgaagtataaacacttcgcagcaagattagccccctccatgatctgctttttatgttgtt

SEQ ID NO: 34651 - DNA, 1212 bp, Glycine max
  Clone ID: PAT_MRT3847_131292C.1
cttacgcgtgggcggacgcgtgggtgaacataacttcttcactttgtttcctcaccagcttgcaaaaacatggcttttccaaaccaatccatgtcatcagagtctccccagagaaagatgggaagagggaagattgagatcaagaggattgagaacaccaccagtcgacaagttaccttctgcaagcgcagaaatggcttgctcaagaaggcatatgagttatctgtgctttgtgatgcagaggttgctctaattgtcttttcaaaccgtggccgcctctatgaatatgctaataacagcgtcaaagcttcaattgagaggtacaagaaagcaagttcagattcatctagtggtggacgatctgcttctgaggctaatgctcagttttatcagcaagaagcagccaaactgcgtgtgcagatcagcaatctgcagaatcacaataggcaaatgatgcgagagggtttgagcaccatgaatggcaaggatctcaaaaacctagagactaaattagaaaaaggaatcagcagaattcgttccaagaagaatgagaggctatttgcagaaattgagcacatgaagaagagggagatacacttgaacaatgacaatcagcttcttagagcaaagatagcagcaggtgagaggagtcaccataatgttaacgggttgtctggaagcataagctatgaatcgatgcaatctcagtttgactcccgcggcttcttccaagtaactggattacaacctaataataatcagtatgccggacaagacaacatgtcccttcaatttgtttgaagagtttaagcttaagaaggagaaagacttagatttcctattgtttgtatttgacatctagaatgatatataggaatgctaaagcctatgaagtatgcagaattcaatggagggaattcatttaagtattcccctcagtactatgttatggactatttagtatgcatacaggtactctgagtacagagattgcaccctgccatattttgtcaacttttgtttactttccctatttctcctgtaagataggcttctatatatgtctattaatttcatacttcacttactatgaattcaaggtcctactcatacatgcaactgttcttgagtatgattttttctcgggggatcattgttattggtgcaaagtattcccatcttttttagtatgattaatttaagatttaaaaa

SEQ ID NO: 34652 - DNA, 318 bp, Glycine max
  Clone ID: PAT_MRT3847_131293C.1
gcgaatcgtgaattagatcaggaattcatgatttagatcaagaaggatacatgtggataggcctgactattgacgaagtggagaacagtgaagacaggatggccagagaggagctgactgatacactgatcaacccaggattgacagtgacttcctgcttgaggggcatggcttgttcacattcatgatccatgctctgaacgaagagctcaacatggacctagttaggaagcgcatggagcccagcgagaatggttagtggaagagctcgatggacaagatcaccgtacatgatggctgcatgtctaggggatatac

SEQ ID NO: 34653 - DNA, 318 bp, Glycine max
  unsure (1)..(318): unsure at all n locations
  Clone ID: PAT_MRT3847_131294C.1
nncacgcntacgtaagctcggaattcggctngagntcanaatcaatngtntnntnctgtcgngctgntcnccngaagcgcnaatggcgnacgtagangatcnnangnagnngaacgtngtanngcgttcnangtagnatgcattcannantcgnnntngggncaancganncnnaggncgngngnacnccnagaacganntgcagcctgtcagatcaaaaggcacaccatntggggtttgannttgcnnaccanancgcattnggagnaanatgatanagcncngnaangctncatgatggtgngnagcactgcttnn

SEQ ID NO: 34654 - DNA, 392 bp, Glycine max
  Clone ID: PAT_MRT3847_131295C.1
ggaattcggcacgaggacagcggctcctccaagttaactgaaatgaagaatatgttttagaggatgggattcctctatcaccttgatcaattttcaccttttgtagctcctttcttaatctggttgtgttgttctttctatgctgcttcaatctccaagttcagtggagctaagtactccattggatttttaccttgcatacaagaagcaagctacaacagaacaattaaccaggacaaaggattaaattaacaataagaatggaattaaataatcaaagaataaagaataattgcttcaagattgaaatatgcaacaactaagtacaaaaagcaaaatccccgacaacaatgccaaaaacttgttaactcattggcaagtgcaccaaattg

SEQ ID NO: 34655 - DNA, 498 bp, Glycine max
  Clone ID: PAT_MRT3847_131296C.1
cgtaagctcggaattcggctcgagcggctgcagaagacgacagaaggggtggagggcccaacaaaaaggctgaagtaaaggtactaaactactaaaaaaaattcatttgaaattaaagtaaggtttttttttcctccagctaacagccatttagggtgtgattaagcatttacaggtgtgctagcaagtgtaaggggaaggggatttggattgaagcctgatttataactaagtttgattccgttcacaccaaagagataagtataaatttaattaattttggaggaaccaatatgaattatgaaattgttacaaaagtgagaatcttattggcttgaagctagatttcactacacattcagttctatagtggaacatattagctggaattagtaattattaccttattctgataactgattttcaattcgcatttcatgctggttgcatttacaaggcaatttaagcacgccatgacaataactaatgatcccaaat

SEQ ID NO: 34656 - DNA, 1433 bp, Glycine max
  unsure (1)..(1433): unsure at all n locations
  Clone ID: PAT_MRT3847_131297C.1
aagagcttgacggcgatgccccccgtccgtaggctcggatttcggttcggggcagaatcaagcgaaaaagtatctaccaatagtggtgactcatctaatatccctgaaatttttagaaaccctattagtaagtttatattttctgatgaaagaaaaggtgaagcaaggaaaaataagaagttctgcattgctcagatttcaaatactaattccattagtgtagattttcgactctcgaggggtatagcttaggttaatgaaggaaaatatgctcatgccatatccatttttgaccagatactgaaaaaggacccagcttatcctgaagcactaataggaagaggtacagcatatgcattccagagggaacttgatgctgctatagctgattttacaaaggctatacaatttaatccattggctggtgaggcatggaaacggagaggtcaggccagggcagccttgggagagtttgttgaggctattgaagacttgaccaaggcattagagtttgaacctgacacagcagatattttacatgagagaggaattgtcaatttcaaatttaaagagtttgatgcagctgttgaagacctttcagcttgcgtgaagctagataaggataatacgtctgcctacacatatttgggtttagcattatcttcaattggtgaatataaggaagctgaggaagctcatctcaaatcacttcaacttgacaaaaatttccttgaagcatgggcacatctgactcagttctatcaagatttagctaagccaacaaaggctcaggaatgtataaataggatgctacatattgatgggaggtttgcaagagcttatcatttgcgtggccttctgttccatgcaatgggtgaacacaggaaggctatcaaggatttgacaatggggttgagcattgatggcagcaacattgaatgcttgtatttacgtgcttcctgctaccatgctgttggacaatacaaagaagcggtcaaggactatgatgctgcattggatttggagctggattcaatggacaagttcgtgcttcagtgccttgtcttttatcagaaagagattgccctgtacacagcctcaaaatttaatggtgatttttgctggtttgatattgacggggatattgatgctctttttaaggaatactggtgcaagaaattgcatccaaagaatgtatgcgaaaaggttttcaggcaacctcctttacgcgagtctttaagaaagggaaagcttaaaaagcaagagtttactattaccaagcagaaggctgctcttctacaggcttcagactccattggcatgaaaatccaatatgattgtccaggattcctacctaatagacgccagcatcgaatggctggacttgctgctattgaaatnncncaaaaagtgncggaggnnnngcgttccca

SEQ ID NO: 34657 - DNA, 1236 bp, Glycine max
  Clone ID: PAT_MRT3847_131298C.1
gacatcacaaactccttatcctcctcttctgccaacttcaacaacacagacactacctcctctcctctcctcgctcttccaatgccgtcttctcagatctagttactttctattctgcgagctttcactactgcttcattcggaaaacgacagcgtttttggtagggttgttgtattccattggacatgcggccgagagtaaattactccttccccgaggaggtgctggagcacgtgttctccttcatcgagtgcgacaaggaccgaggctcgatctccctcgtctgcaagtcctggtacgagatcgagcgctggtgtcgccggagagtcttcgtcggaaactgctacgccgtctctccggccaccgtcgtcaaccgcttccccaaggttagatccatcgccatcaaggggaagccgcacttcctggaactccaggactgtccctgaggtgtggggcgcttatgtgccaatgctgctaagctggaggcaatgcgatcccccctgatgtcatcatgcttggcgagttatggagcatgtaaattgctgggtcagaaaatgccaagacttaatgttgaagtcattgatgaaagaggccctccagattcaaggccggaaagtagtcctgttgagaagttatacatatacaggactgtttttgggccaagattggacatgccaggctatgtatggagaatgcaagatgattctgcattaaggatttcttgagtgattgtgctgtggaatgagccgtggaatttatgaagcatttgatgtgagaattgttagtgcaggtacatgcccagaatgctactcaataatgaattaaaactgtttacggcctatgctgttgtggttggtgtttgagctataaggtacaggaggatatataaaggcttgagctcgattgccattcattttacactttggctgagctacgagacaccaattctgatagagatcgtaaccttgttctatgttgcataggatagttactatttttcgtatcattattataatattttatggacttgtgcataattttatatgcatgttacccctgctctttcgtagtaagatatcggtggacttgttatcattaaccgtgggaaggaataaaaatcgtatttatattctagtgcatcctgatttgttgatgcatctgatggaattatgccttgttttcttttgttctattcagagtcgattggtgctgtggaataaacattcggaatgact

SEQ ID NO: 34658 - DNA, 801 bp, Glycine max
  Clone ID: PAT_MRT3847_131299C.1
cacgcgtccggcaagaagcttgagatgctttctgtggctttcgcgggagatagcgatctgggactccatcatgtgctgtctgggtgtgacaaccttaggaagctggagatcagggactgcccctttggtgacaaagccctcttggccaatgctgcaaagctggagacaatgcgatccctttggatgtcctcttgcttggtgagttatggagcatgtaaactgctgggtcagaaactgccaagacttaatgtcgaagtcattgatgaaagaggacctccagattcaaggccggagagtagtcctgttgagaagttatacatgtacaggactgtttctgggccaagattggacatgccaggctatgtatggagaatgcaagatgattctgcattaaggatttcttgagtgattgtgctgtggaatgaatgagccgtggaatttatgagcatttgatgtgggaattgttggtgcaggtacatcaataatgaattaaaactgtttaggcctatgctgttgctgttgtggttggtgtttgagcttagtaaggtacaggaggctatataaaggcttgagctcgattgccattcattttacactttggctgagctacttgacaccaattctgataaagagatcggaaccttgttgtatgttgcataggatagttacactatttttcgtatcattataatattttatggacttgtgcataatttatatgcatgttacgtagtaagatatcggtggacttgttatcattaaccgtgggaaggaataaaattcgtatttatattctagtgc

SEQ ID NO: 34659 - DNA, 485 bp, Glycine max
  Clone ID: PAT_MRT3847_13129C.1
ttgccgaaaaggaaaaggccaaaacactcacaacagctgttaacgttcaaggagtgtttttgaaattccaaaaattgaacacactcgttttttcttaatacatagtcacatttaggatcttttatgttgataaaaagaatattatgaaactatcactggatgtgcagcatcttctatgaaattcactagagtcaagcatcaacatttcaataccaaaaccaaaaccaaatatttcgaagccattgttagtgatccagctactatacccaactatatgacagtataataaataatactgtagtagctaaccacataaatccccccatcctgtaaacatgaccttgggtaagtcctacttacataggttattggaaacccaaatcatccaaaatagtatcacagaattgcaagtccaacacgagttactgtaagtccaaagcatgttatcatctttacataggaaaagttccagaaccaatattgac

SEQ ID NO: 34660 - DNA, 207 bp, Glycine max
  Clone ID: PAT_MRT3847_1312C.1
gaagaaaaaaagaaggggggaaacctttccttttttcaatcgtttggggggaatacaaaataattttcttccctaaactgataatttttttagtaaagccccccaagtaaattgcctagctttccttattgctcatcttcaggtttaacttattgggcacacatcactcggttggggctcttacatacagattttgtttgggttctg

SEQ ID NO: 34661 - DNA, 777 bp, Glycine max
  unsure (1)..(777): unsure at all n locations
  Clone ID: PAT_MRT3847_131300C.1
cggacgcgtgggcggacgcgtgggcggacgcgtgggcccaatttgagacgtttggatgtctcttactgcaaaaatctaatcgaggtgccaaattttggtgaggccctaaatcttgaagagctaaatctcaaaggatgtatacgactcaggcggttccatccatccattggttttcctagaaatcttacctatctgaatttaagtggctgcaacagtcttgtcgagttaccacattttgaacaggccctaaatcttgaagtgctaaatctgaaaggatgtggaaaactaaggcagctacatctatccgttggctttcctagaaatcttacccatatgaatttaagtggctgcaacagtcttgtcgagttaccacattttgaacaggccctaagtcttaaagtgctaaatctcaaaggatgtggaaaactaaggcagctacatctatccgttggctttcctagaaatcttacctatttgaaattaagtggctgcaacagtcttatcgagttaccacattttgaacaggccctaaatcttgaacggctaaatttgagagattgcaaaagtctcgtaaacttgccacattttgtagaggacctaaatcttaaagagttaaatcttgaaggatgtgtacaactaaggcagatacatccttccattggtcatctaagaaagctttactgttttaaatttgaaagattgcaaaagtctagtaagcttacctagntacatatggngactcagttctctcagatacttaaatctttttgggatgtc

SEQ ID NO: 34662 - DNA, 1410 bp, Glycine max
  unsure (1)..(1410): unsure at all n locations
  Clone ID: PAT_MRT3847_131301C.1
gagaagtatcctgtgtacaaagatcgccacaagttggccctggcaagggaaaaacaacttaaagaaaaggctgagaaagccacagggcggcggtgtcgtgacaattcaggtttgaatatgaccaatcctgaaagcggaagtacaacatctttgccacctcagcttcctcaaataaaggagaaaccagttgtttctggcactccaaatgatcaacctgatgatccaaagaatcctggaagtcaaacaattgggagaagaggagagttagctggtgataaagttcaccgtgctccagagctagttgaattttatcaaacattgatgaaactggaggcaaagaaggatacttcattaataacatcagcaagtaatgcatctgatgctaggagcaacatgattggggaaattgagaatagatcatcattcctcttagctgtgaaagctgatgtagaaacacaaggtgattttgtcatgtccttggcagctgaagttcgagcagcctccttctcagatattaatgacttggtggcctttgtgaactggctagatgaggaactttccttcttggttgatgaacgagccgtcctcaagcactttgactggcctgaaggaaaagcagatgcactaagggaggcagcttttgaatatcaggatttgatgaaattggagaaccgagtctccactttcgttgatgatcccaatctcccatgtgaagctgcactgaagaaaatgtattcattgcttgaaaaagtggagcaaagcgtatatgctctcctgcggacaagagatatggccatttcacggtacaaggaatttggaatcccagtgaactggctaatggattcaggggttgtaggcaagatcaagctttcttctgtacaactggcaaagaagtatatgaaacgtgttgcatctgaacttgatgaactatctggtcctgataaagaaccagctagagagtttttggttctgcaaggtgtgcgtttcgctttccgtgtccatcagtttgcaggaggctttgatgcagagagcatgaaggcttttgaagaactaaggagccgcatccaaacctctcaagctggtgaagatagcaaatcagaaacttaggctatcccatcagaagtttttctcttctttttttccctttgtagctgtgtctctcatatatatgttgccttttcagctgtatatttcattttgcttcaatttgaatagcctatacatattgcatgctacacgatgatacgagaatcatattgtaattgtaactttgtactccaacatgatccctacctctgccttgtttttccctataataagaaattcaactgaacagtattcaatactcttcaanngggaacgaaaaaaaactggcctttttattggaagggtttaagggggggccccttt

SEQ ID NO: 34663 - DNA, 711 bp, Glycine max
  Clone ID: PAT_MRT3847_131302C.1
gacaacacaaactccttatccttctctctctctctccttctctctctctctggcaacttcacacatcaacaactagttcacaataacacaatctcttcgctcttccgatggtgtcttctcagatctaactctctaagcgctgctgctttactgcgaggtttcactactgattcatttggaaaacgacggcgttttgggtagggttgtacttgtatttcattgaacatgcggccgagagtagcgtactcgttccctgaggaggtgctggagcacgtgttctccttcattgagtgcgacaaggaccgcggctcgatctccctcgtctgcaagtcctggtacgagatcgagcgctggtgtcgccggagagtcttcgtcggaaactgctacgcggtctctccggccaccgtcgtcaaccgcttccccaaggttagatccatcgccatcaaggggaagccgcacttcgccgacttcaatttggtccccgagggttggggcgcttatgtgggcccctggatcaaggccatggccgctgcctacccctggcttcaggagatcaggctcaagaggatggtcatcgccgacgaatgcttggaactcatcgccaaatcgtttaagaactttcaagtcttggtcctcacctcttgcgagggcttcaccactgatggacttgcagccattgccgccaaatgcaagattttgagggagttggag

SEQ ID NO: 34664 - DNA, 573 bp, Glycine max
  Clone ID: PAT_MRT3847_131303C.1
tgatagtgctatatcagacggggttgatgttctttccttgtcatttggttttgatgatgtacccttgtacgaagaccctgttgctatagccacgttttcagcaatggagaaaggaatttttgtgtccacgtcagcaggaaacgaagggcctttccttggaagacttcacaatggaataccatgggtcataaccgtggctgctggcaccttggaccgtgaatttcatggtactcttacacttggcaatggtgtccaaataactggcatgtctctctatcatggaaacttctcttccagcaatgttccaattgttttcatgggcttgtgcgacaacgtgaaggaactagccaaggtgaaaagcaagattgtggtgtgtgaagacaagaatggaactatcattgatgttcaggcggctaagctgattgatgcaaatgttgtcgcggctgtgttaatttcaaacagctcttacagttcgtttttcttagacaatagctttgcgtctattattgtttccccaataaacggggaaactgtcaaagcttacattaagagtactaactatggcacaaaagg

SEQ ID NO: 34665 - DNA, 467 bp, Glycine max
  Clone ID: PAT_MRT3847_131304C.1
agggatcaaattttcaattttcagtttacccctaaaagattatccctctattattaatatagggggaaaaataataagggcttgtttggataccctattggaatcaattttggcccccaaaatcgggctattgattaaaaagtttaggctattccggcattttaacagggactacatgcaattgggattcatattatccatttttataaaattgcttggctcaaaaatgtgattagcataagttggtgtaccccttgaattaattaaaactcctgttccttgatatacataaaatattccttaaaacaatacaaaaatggggggggagcggggagtatgtttctatgttgaaattgacacatctttcagctggtggggatccacctcaaatggggatctcttgagggcccactgcgcaagggatgcttttggaaaagccatgacctctttgatggaattagcccccg

SEQ ID NO: 34666 - DNA, 773 bp, Glycine max
  unsure (1)..(773): unsure at all n locations
  Clone ID: PAT_MRT3847_131305C.1
ccccccccccccccaggttactttggcaatgtcatcttcacncaccactcgcatagcagtggctggtgatctcatgtcaaaaccaacatggtatgctgctagcagaatccacgacgcattaatacgaatggacaatgaatatttgagatcggctcttgactatctagagctgcagcctgatctaaaatcccttgttcgtggagcacatacttttagatgtccaaatcttggtatcactagctgggcaaggcttccaatccatgatgctgactttggttggggaagacccattttcatgggacctggtgggattgcatacgaggggctatctttcataatcccaagctcaacaaatgatgggagcctgtcgttggcaattgctctgccgcctgagcaaatgaaagtgtttcaggaattgttttatgatgacatttgaagtgttttttcatttctcagttttttttaaagtattttttcacgaaccctataaatatctccggttacccaatattgatgatagtctatgccttggcaaagcgtgataatcagtaagcacaaatgaactttgaatcaagtgtatcatcgacttgatgtcacatttgtggacaagatttgtgagtcagtgcaagccgtctccccttcaccatcccaggatatttgattgcatttctgaatgcttggtgtctttttttctctatatagtcatgagtaatgaagaacggtattaattatggagtttgaagcccccatatataggttcaactttctttgtt

SEQ ID NO: 34667 - DNA, 506 bp, Glycine max
  unsure (1)..(506): unsure at all n locations
  Clone ID: PAT_MRT3847_131306C.1
tatgactgtcgcatgcaccgcgttnacgtaagctctnggaattcggcttcgagcggattcgcttgtcttggatatttcgagtatggagccacggttgtcgtggtgaccgtgagtcacaacgaggtcaccagtgatacctacgatggacgcttactggaccatgtcggaagctgcactatgttatggttgcacctgatgcattctcaaggtgttgaagagagccttcaaagaggcttaagactggcatactcccaacgtgcttcattccgtatcatcnggattcgacaacggttcgccaagtgcagtgcatcagcttcatcgtctacaagcccccaggcttctaagtgtgaaaaatttgcaaagcattagtagccgncaccccactttgtttgtttgtacttaaactacattcccatttgtatttgctttctgagatttcatcatcctgtatttttggattctggaatcggactttaatggacattaatggatgagaactaatgaat

SEQ ID NO: 34668 - DNA, 406 bp, Glycine max
  Clone ID: PAT_MRT3847_131307C.1
gtagaaaaagtcggtcacaattgtttatgtgtaaggatgtgcacgaggattataagaaaacccaacttttaaaaactatgggcttagaatcagcttaactacggaaagatacaactacgatagttgacgtatcctggacacggggagggcttcgggacgcagaactagttactaactgcaggtacgctacgacggctcgtaagcataacattgataattggtttcatggggtacaacggatcagaaattctaaactccagaggcattttaacctatgctcatgagtcctggacatatcctctcgaccctggcttggtgggaaaagatggggcttccatatatggtcggttgaatgtcttcagccaccacaaggcttgagctctctgtatattgggacaggcattac

SEQ ID NO: 34669 - DNA, 462 bp, Glycine max
  Clone ID: PAT_MRT3847_131308C.1
ggggaaacacccataatttttcatttcaagatcaaatcgggaaaaaatttacccttaatttaaaagaaaaaatttaaaaaaaattaaccgccccgagtttggtcgatgaaccccaaaaaaattcagaaaaattttttttcctcttttttttaacaacaagttttttttttcggtctctctttgaaactaaaaccccacactctctttctttttctttctaaaacctggtatcgggaactttttttttcttccctctataaaaaaaaccgaaaaaaaaaaaagcgaaacccgggacccgaacccgatggcgcaaaaggtcaaccgtcaaccaccccgttttgaaattcccttccgcccgggtttttcccttcttttttggtttttttcacactttcgcgaccttcgcgggtctaacccccgggttctccctcccgagggcttttcttccggcggctttgtaat

SEQ ID NO: 34670 - DNA, 473 bp, Glycine max
  Clone ID: PAT_MRT3847_131309C.1
ggctcgagctcgagccgtggttatatagctgggggattaattgtatttcactgttggctctcaacacattccttttggtgcatctccacaggatgtctggactgagcttggacgtccctgtggcattcatcaaaagcaggtagccataccatgaattactaattcttaaatggaacatgattaatctgtcgtatttttgtggaactagactgatatcatatgtaatggatcatatagggacctaggcacttgattgcatcatgttttagactatgcctttagtttggtaatttggttaaggagacaagagtgaggaaataaatagggggtgggaaaattaatgaatagaggaatttttgctgtttggatgaatgagtgcaaaatgaacactgaaaacaaagggtcaatggagaaagaaaattgaatcaagaaggtacatatgatccacccaaatcttgttccattttgagcgt

SEQ ID NO: 34671 - DNA, 154 bp, Glycine max
  Clone ID: PAT_MRT3847_13130C.1
aacaggagggtttattgagccgaaatggctaccatatggcgagataatcaatggacgctatgcaatgttgggtgcagttggtgcaatagcacctgaaattctatgcaaggctagtctgatccctcaggagacagcactcccatggttcataact

SEQ ID NO: 34672 - DNA, 290 bp, Glycine max
  Clone ID: PAT_MRT3847_131310C.1
aaaaggatcaaaattgaaggacttcttggccacaattcagtcatcttcttactttcagtcagagattgcaaagcttcgccatgatgtttaggagtacgcaaaacaatttccacccattggttttgataaagaacccatgaagtacaacaaatgagaggaaaattttccattagacatttatgtcaaatcatatcatgtttcatttcccggaaaagctacgctagtaagctggctacgctagtaagctggcttgatcagcacaataaaagaaaaatttccattgctaaaaa

SEQ ID NO: 34673 - DNA, 205 bp, Glycine max
  unsure (1)..(205): unsure at all n locations
  Clone ID: PAT_MRT3847_131311C.1
gacggganagtgccngagagtagttccagactgcagcctcaatcgcctgagctgcattatcngatggnaatgcaaggnttggtgctcatcatgttcccccacnngatgctgtngtcganaagggaaagaaacctanatcacctcaagttactcccagaaggagnaggtnccttnctgnancactaaagagtcnngagttgnaggc

SEQ ID NO: 34674 - DNA, 316 bp, Glycine max
  Clone ID: PAT_MRT3847_131312C.1
cccacgcgttctactacttcaaaaagaccacataatggtttcctgttttttaaaaaacttattggaattggtataatatcgtttgattataacttataatcaatttattaaattttaaataaactttctaatatatgtcaaaaattcttaaaaacatataatcttatttacaattttttttcttatttttttaataaattaattcaatattaattcttaaataaattattaaatgtttggacttatttaaatattcttaattgaactcttattaaacaataatgatttaattatatcccccttctattatcttata

SEQ ID NO: 34675 - DNA, 694 bp, Glycine max
  unsure (1)..(694): unsure at all n locations
  Clone ID: PAT_MRT3847_131313C.1
gccgggggaggaggatagtaatagaactccaacaatgtaagaatgtgagacagtttctctcactttacccttactgaaaagtggcagcaatgaatgatgacatgcctattggttggccatttgggcttggcttcttgaacatgagacttagagttggggaatccctcccagcagcttcagtggcaccataccaactgcacgtgccatccaccagtttctcttcattttcatcctctaaccttgatactgagtctacagcatcgtttttccaagacaacagtgtatcccttgcgcagctaattggaattagaccaggtgacagagggcgcctgtattatccaaactcattgaggtttgaagaaaggaagaagaaattagcaaagagttccggttctgatggctctaaagtacaaggaatggatacgtctcgagtcatttgcatacccttgctaaagattagaaagagtaagaagagttcaaggaactagaacatgattgtaccattgagagaacacgaattaatgattctattgttgccccttgtcaaaattcacttatgctttcgagttatttcaaccagtttttcttacatggcccgttttaactttccccaagcttggtctgtcttttgntttacttcataggtcatactatgggaatataataaaagaaggttaacttgtattttcttact

SEQ ID NO: 34676 - DNA, 1025 bp, Glycine max
  Clone ID: PAT_MRT3847_131314C.1
tttttataataaataaccaaaaagctatcaggatcaaacaaaatctccacttctcgatcccttttgtttcagtaacctcctgcattagcatacatatttatcacggaaattttgccatgaagaaacagaaaggtgggtattttcatgccaaacctattttgcattaacctcatggactgttaaatgctttcatattcgactagcatccacagccatatcaattgataaaactaattagtgatatgagctatgaaagactccatttccaggtgagaaactccaccttcatctttggacctatggatggcatttttaagcctcactgctctctgtcgtatctcatcaccttcctctgtttcaatcaaccttctgacaaccttctcaacaactgacgcagtcaccaatgcattcctttgtgcccaatccttcacaaccaaaccaaccttgagcacctgtgttatcaaaacagggtttcttggctggtcagagtgcataggccatgatgctattggcacccccatggttatgctctctaagcaggagttccatccacaatgactcataaacccccctgttgaagtgtggctcagaatttccaattggggtgcccaatctctcacaattagccctatgcctttaactctctcctcaaacccattcggaaactcataccattttgcttcacttccatcaaatatgtctcctttatcagcatctctcagcacccagatgaacttctgcttgctttgttccaacccagttgcaatcttttttatttgttcctctttaaaagttgttgtggtcccaaaagacacgtataggactgaatttggatcttgtttatcaagccactccaagcaaaagtgcctttctttggaatctttcttctcaaaagctaaagggttgaatggtcccaatgcccaaagcttcttgccaccagtgaaacgctccatccactcaatgtaagcaccttcaattgctctgcttgtgttgtagatgtttccatcattgactttgcggaaatc

SEQ ID NO: 34677 - DNA, 410 bp, Glycine max
  Clone ID: PAT_MRT3847_131315C.1
gtttatattgacatctgaatatgccaactagggacaacctgacaagctgagctagcagatctttgatgcagtacttgatgcaagccttgaacaggaccctgacagcaaggttgcctgtgagacatgcgccaacagcaacatggccatggtcttctgagagatcacaaccaaagccaacggatactatgaaaagattgtacatgacacatggcgagaaattggattcatatgtgatgatgatggacttgaagctgacaacagcaacgagtgagtgaacattatgcaacagagcccgggtatcgaccaacgtgcgcacggtcactttaccaagcgctcagaggaggttgatgctggtgaccactgtaacatgtccgtatatgccaccaatgaaaccagctagtacatgccca

SEQ ID NO: 34678 - DNA, 280 bp, Glycine max
  Clone ID: PAT_MRT3847_131316C.1
acttaacaactcactcaccgctctgggaaactcgtatactaactatgactggaacagcttcacggacgtggggcccactcagcaggacgaggtgtacgggctctaccagtgccgcggcgacctctccttttttgactgcgccgcctgcgtggcccgagccgacacgcgcgccggcgacatctgccgcggcacgtgcggcggcgcggagcaactccacggctgcttcccgaagtacgacaacgccaccttcctcggcgcggcggacaacacagtgggggtg

SEQ ID NO: 34679 - DNA, 442 bp, Glycine max
  unsure (1)..(442): unsure at all n locations
  Clone ID: PAT_MRT3847_131317C.1
cggctcgagcggctcgaggctgcgagaagacgacagaaggggtaaaattttattatgacgataacaacaggtccgcttacctgtttcactcttgcctaatcccttaaaaggcactatctggctttgctaagctctacaacaattatcacaaataaatctccaatccactagctagtgtcgtttgagaccactttgaatagtttcacggtccacatgtctaatcatgttggttgttgaaataaaaaagtttcattaactactcattaaaagtttatttaagctagatcaaactagctggggtcaaaaaattaaatatagggttaaaaacacgtatacaacacttttccacaactctntttttttttttttttaattttatcgttctaagttacaccattaatcttatctcacatnttactctttttctattggtatctctctc

SEQ ID NO: 34680 - DNA, 455 bp, Glycine max
  Clone ID: PAT_MRT3847_131318C.1
tacggctgcgagaagacgacagaaggggatacttcatattttaggtttttgagattctgttaggacaaccctttgtcgctgggatcttcaacaaacacatacccttgggattttgctaccatggttctcttaggtcttggaaacataaaccatataacatctcatccataaaagagcgctccttctggatccaagggtgctcaacttcagaaacacatagatgccacggtgagtagtgagaactggagggaggctgttcaactgcctcccggtgaagatattaatgtttggctagctgcgaacaccgtggacttctataactcatgaattatcctgtctgggactctcacaaaatgctgtacgccaagtatctgcccttgaatgactgcatgaccataccatcaacatcgatgggctcatcgtggtactgtacagaaaccaatatgcgggtgtgc

SEQ ID NO: 34681 - DNA, 188 bp, Glycine max
  Clone ID: PAT_MRT3847_131319C.1
cataaacagtataaaatattcaaaataggtcaagaaaagtgacattgatgatgtgcctaatctaagttctcttcttgtcttaaaatttcaaatgtacagtttactacacttagacggcaaggtctgagttgctctgattgattgtctaatgtctaatattattggtgcaacagtcacaattagcatgc

SEQ ID NO: 34682 - DNA, 748 bp, Glycine max
  unsure (1)..(748): unsure at all n locations
  Clone ID: PAT_MRT3847_13131C.1
ccgaattctgacccttcaatggaggagcacccgaagaagaagaagaaaggctgccgaaaccccgagaccaagttccaattcgagttgaactcatgttccaaagccaaggacctccgcggcgcgatatccctctatgacgatgccgtttcgaacaacacccgcctcaaccagcaccacttcaacgccctcctctacctctgctccaactccgtcgccgacccctcccttaagcccactgcccttgactacggcttccgcgccttccgccacatgtccgcactcgccgtcctccccaacgaggccaccgtcaccgccgtcgcgcgcctcgctgcggcgaaaggcgacgcggattacgccttcgagttggtgaagagcatgggcaagaactataacaacgctttgccgaggctaagaacctacgatcctgctctgttctgtttctgtgaaatgcttgacgcggataaggtctatgaggtggaggagcatatgaatggggttggagtgagcttagaagaggcagaactcgccgcgcttttgaaggtgagtgcgcgttgtggtagagtggataaggtgtatgagtatttgcacaggcttaggagctctgtgaggtgtgttagtgagtccactgcggtggttattgaggagtggtttcggggcagcaaggcctctgaggttggtgaggcagaattcgatgccgggcgagttaaagagggagtttngaggaatgggggagggtggcattgtcagg

SEQ ID NO: 34683 - DNA, 304 bp, Glycine max
  Clone ID: PAT_MRT3847_131320C.1
cggatactgccgtggattttgaggtttaccttttcctaaacctaaattagggcttcttttgacctggctaaagagaagaccttaattgttgttgaacttctggttaacaaccacagaaaagccacttgcaaaggcacaagtggtggggtggcaccaatgagggttttcaaaaaggacacttgtgtaaagggagtacacaccattgagggcgaaaacgccgccacatgttgtcgccacagtgagacacacgggcagctttcgtgaaagtgagcatgaatggtgctccttatatacacaaggggga

SEQ ID NO: 34684 - DNA, 286 bp, Glycine max
  Clone ID: PAT_MRT3847_131321C.1
gttcatctccaccttgatcttcgtgttcgccggttcaggttccggcatctcctacaacaagctcaccgactacggtgccgacactcccgccggcctcatctccgcttccatcgcccatgcttacgccctcttcgttgccgtctccgtctgcgccaacatctccggcggccacattaaccccgccgtcaccttccgcgccttcgtgggcggtaacatcaccttactccgcggcattctctacgtcatcttccagctacttggttccatcgtggcctgcctcctactc

SEQ ID NO: 34685 - DNA, 498 bp, Glycine max
  Clone ID: PAT_MRT3847_131322C.1
ccacgcgtccgggccgccctttttttttttttttttttttttgaatataatataatatactaaaccaacatcgcgggcgtgttattgccaaacattttttttgggttcggcaaatgctccaaactaggttttagcctgctcttcttcaccttcaaaattgtacttacacaatagacacagatggctgaacctgatgattgcggataccagagcggaacaatgcccttcttaccttctataggcttcagccttcagatgtcaccacctccgcaccagcgatgtgagtagctcaaaaagctcaaaaggacttccacgcccgtagacatcatcctgctgcttttgctggttggaaaacaggtgggataccaaagcacgccatgcagttaacaagacccctgtactttccatgggtaccaagataaaaggagttggtggaagatgaccaaacctcactgctcggatagcaagtcccaacggtattccaacagcccatgattt

SEQ ID NO: 34686 - DNA, 577 bp, Glycine max
  Clone ID: PAT_MRT3847_131323C.1
attcgagctctgtacccggggatcctctagagtcgacctgcagtgatagtgtcgtttctagagagaccgctcgagaatttggaacggtgagaggctgcaaactgctgtgtgtttttggtattgttgagtgtggatggaaagaaaagaattggaagacttacttatttgtgtgtttttaattgtttgtttacagtggcacgtttagtgaggatgattggaaattggtacagctagtgcttacgttatttagaaatatcctagctgttcaagagattccgactcaccagaagtcagggggacttgctactcagttgttatcaatgagagaccggtttctggaacttttgtttcgggagaatgtaatggatataatgctggttatatctcaatgtgttggtagttctaatgtttatctccgtcaggataacttgcttctactggaaatttttcattacattttgatgggtcaggacccggagttaattgttagggcacatttgaaggaatcaaaggttaggcctctcattgtgactaatgtcaattttttccatgcttgcaaagagcaccctactaattt

SEQ ID NO: 34687 - DNA, 1042 bp, Glycine max
  Clone ID: PAT_MRT3847_131324C.1
cccacgtgtttgattacccttaccttagcgcttatggtgcattctataaactctaaaattttgcattttgatagcagccctggtgaagaaggtttcaagttttgaaacccccatacatatcctaacccacttcgttgattacgttacaaaagaagtgactgtgaatccgaatccaaatctgaatgggttatcttcaatttggcagacatggtgttaggcaggtccttagatttagagatgctagttgtgataatgttgtggtaaacccactcttatatgcttcccaaggacttcgttacaagaggaagctccaagtcatccttacaactgacatagataagctgggaaaggcaggtgacactgtcaaagttgcccctggatattttcgcaaccacctaatgcccaagctccttgctttccctaacattgataagtttgcttatctcctcaatgagcagcgcaagatctatcaaccaactgaagaagaaaaacaagaagatgtcactctagttaaagagtccaaggaagatatgatgaaagagtatgaaaaggcagcattacgtcttgataaagctcagctggttttgcggaggttaattaatgttcaaaaagccaagtcacgtgaatcaaaagaagaccccttggagttacgttatcctgtgacaaaagatactcttgtggctgaggtggcaagacaactttgtgtgaacgttgcacctgataacctgcatcttccatcacctctatccacattaggagaatatgaggtgccactgcgtataccaaggtccatcccgttgccagagggcaaggttaactggagtttgaaagttaaagtcaggagtaaataaatcactcatcttgttgaattcaagttcacaagggatggaatagtggttttatgctaataaatcattaaattgaatccgaggattataagattttgacattgcttttatttatagaaacagaaacgccactcatttaacaatgtctcttgaatagtctgtttttattgagtggagtctcatgtgttattgac

SEQ ID NO: 34688 - DNA, 822 bp, Glycine max
  Clone ID: PAT_MRT3847_131325C.1
aaaatccaaaaaaaatgacccagatcatgttcgagaccttcaacacccccgccatgtacgtcgccatccaggccgtgctctccctctacgcctctggccgtaccaccggaatcgtgctcgactctggtgatggtgtcacccacaccgtccccatctacgagggttacgctctcccccacgccatcctccgtctcgatcttgccggccgtgacctcactgactacctcatgaagatcctcaccgagcgtggttactctttcaccaccaccgccgagcgtgagatcgtccgtgacatcaaggagaagctcgcctacgtcgccctcgacttcgagcaggaaatgcaaaccgctgcttcttcctccgccctcgagaagtcttacgagcttcccgacggtcaggtcatcaccatcggaaacgagcgattccgtggccccgaggccctcttccagccctctttcttgggtatggaggctgctggagtccacgagaccacctacaactccatcatgaagtgcgatgtcgatatccgtaaggatctctacggaaacgtcgtcctctctggaggaaccaccatgttccccggtattgctgacagaatgcagaaggagctcactgccctcgctccctccaccatgaagatcaagatcatcgctccccccgagagaaagtactccgtctggatcggaggatctatcctcgcctccctctccaccttccaacagatgtggatctccaaggaggagtacgacgagtctggaccctccatcgtccacagaaagtgcttctaaatgcattactggatcctataaaattgttcgttat

SEQ ID NO: 34689 - DNA, 327 bp, Glycine max
  Clone ID: PAT_MRT3847_131326C.1
atcaatggtagatgactgaaactgcttaacttttatattcagcacgaggggcaaaactaacctggatgatggggggggattggattccatgggcagatgcagagcgatgaacgggacttgactgggatatcatgctgaatactactctcaaagatcaacaccagagggattattcataattgaatgcacgtataactatcaaactgctcatgagcttgctcaaggaactggaatatactaagatgaacaggtcgaggcttgaaaaaatgtacatgtcctcaaacatgcagacgctggatgaatattctagcaactgtgcatatgtgg

SEQ ID NO: 34690 - DNA, 305 bp, Glycine max
  Clone ID: PAT_MRT3847_131327C.1
cccaaaaagaatttttgccccttttacatttcaggtaaacaaaaccggttttagacaactgccgaaattttgaaaaagataaaacattgagggaaaccaaaattaccttctgggcattggtttcagcgacaatttaaaactgttagacccctatgtgatgcttcccaaagggcaaaaaaacaatccttcattccttttcctaccaatactccgttggctaaaatcagctccacacctcggggtttgttgccctggtgtaaatttgctggctttgatgggcaaaccccattctgattgaaccccta

SEQ ID NO: 34691 - DNA, 573 bp, Glycine max
  Clone ID: PAT_MRT3847_131328C.1
cttttaggactgacagtgctttgaattttggatggtttttcttgttttacctgcttcacctaggattctgtatcttagctgcagttgctcctcccatagttttcaaaggaaaatccttgacaggcattctgtcagccatagatgtggtgggtaaccatgcagtgattggaattttctactttgttggatttggattgttctgcattgaaacattgatcagtgtctgggttattcagcaagtatatatgtacttccgtggcagtggtaaggctgctgagatgaagcaggaggctgcaagaggagcattgagggatgcaagatgataaattaccttgtgaatccctgtgtttgaattgctattgtaaattagtatacatatatattgcggatgaagttattttactgaggtcttttttgtttttaattgtttctctattgtctaaaacatgctacctgttcacctcgtctgttaaatgtatttgttgatgtatattttaagtagaaagcatacacatagtacagtggttggaagaaaaaaaaaaaaaaagggcgccgctcgcgatctctcgagcc

SEQ ID NO: 34692 - DNA, 258 bp, Glycine max
  Clone ID: PAT_MRT3847_131329C.1
cttcacttttcacaaaacgacgtacagtcatatcctaaatcaccgaggagattatataggtagtcttgccacttttaccgaccgaccttgataatcgggtgcgcacacggcgtcgtaccacacaccagcctcggcaacaaccgcacgaacaacgcaaacacgaatcatggaggaagagcgtctctggaagttccgcaagcccgagtggctcaatagcgtctgggctagaaactctggcgtgtacgctctggcgctctg

SEQ ID NO: 34693 - DNA, 612 bp, Glycine max
  Clone ID: PAT_MRT3847_13132C.1
aacggccgttgcacgccactcctaacgcttttgataacgacttgcctctctctctttgtcccctcgtttgttcctacgtttctctctctctctctctctctctctctctctctctctctctctctctctctctatgcgtgtctctgtctgcggctccggcgtgtttctgttacgaagagaggggggcgccatttttcgatctcacacagaagcaaattccttgtttgctcttttcctctctcgctcttgtttcgattaggaggcaatctaggtggaaattacttgcgtcttgaatagaatgccaggagaagaagtattagctcaacaagatgagaggggtagatgttttgagcccgaaatctctgaggatgagtggcggaagtctcgagctagatctcttaggagaaaagcaatgactgcttcaaccagactcacttatagtctcaggaagcgtaatacacgtgtagcagatagtgactttgcttcaattttcatagaagatgtccgtgatgctaacgaggaaaaagctgtgaattcatttcgtcaggtgctacttacaagagatctgcttccagattccatgatgatatcatgaaatgctgagtttctgaa

SEQ ID NO: 34694 - DNA, 1121 bp, Glycine max
  Clone ID: PAT_MRT3847_131330C.1
ggggaaatcattacacctgtggaactcattaggaagggagacaaggttggatcttctgaagctgcattgcttgccaagctaggcataaggcccttctcatatgggcttgtggttctctctgtttatgataatggttcagtgttcagccctgaggttcttgatcttactgaggatgacctcattgggaagtttgctgctggtgtctcaatggttacttcactttcattggctatttcatatccaacacttgctgcagcccacgcgtccgcccacgcgtccgcccacgcgtccgcccacgcgtccgcccacgtgtccggaagttttcactgtcttatcattatgcagttcccctgctaacaaagacacacaaagtgtagaaccaagtaatgccaagtgcaaattaacaaatccttctgctctggttcgtcattcatgtctccttgttgcagtaattgctcagtgtttgaagtcatctggaagaaattcagcaatttttatgctcactacctcaccaaagaagcagtttgctcgactatcagtgcttgctcaccaaatttcttctgatgataaaataaaagcctctattgagcctcaaagtgcatcagccatgttggctctggcatccattctatccctcgaatctggggctttggttgagtctccaatatctgaaattgctatgcctttaattcctcgaacttctacactaagtgaccatcttaaattttcatctagcaatgtaaatgaattggacccttgcaacatcagtgggaagttctcatattggcaaggggtaagagatgggtttgttggtcttttagattccagactcaagtggggaggaccattagctgttcaacagttgtgtgcaagtggcactcctctacttcttatgggcctattaggcaatgatgtcttaaatgcttctcatggaaatgaccatgtaaatgatagagttggattgtctcctattgggtgtgtatggacaatttcatcattatgtcattgtctttctgggggggctttgactcatcgtcaaattttgattaggaatgaacatattaagctcttttcccacttgatatgtgatgttcatataaagttggtaaaatgttggatcg

SEQ ID NO: 34695 - DNA, 208 bp, Glycine max
  Clone ID: PAT_MRT3847_131331C.1
gccttctttcttttttttttaggaaatttaaggtttatctgggaaaaaaacaaacctggggatgggacaatttatactacattaaccctcaaatcattataatacatataaaaatcctttggctgaaaacccgaatcatgtatattctgacaccaactgacacagggtttttatccacgacataacactcaaacttgattggaaataa

SEQ ID NO: 34696 - DNA, 1819 bp, Glycine max
  Clone ID: PAT_MRT3847_131332C.1
cgcactagtacatatactaaatacaacattgatgaatttccaacaggcacaaatgctatagtcgcagttctggcatatacaggatatgatatggaggatgccatgattctaaataagtcatcagtggaacgtggaatgtttcatggacaaatatatcagacagaaactattgacttaactgaacaagggggaaggttagaccgatcttcaagaatgttcagaaaaagtaatttagagaaatcagcttgtccctcaatcgattcagatggacttccacatgttggtcagatgatacggccagatgaaccctattgtagcatttataatgaagtaacaagttccatacacaccttaaaaagaaagggttctgaagctgtttatgttgactatgttgctgttgatgtcaaaaacaagaagcaccttcaaaaggttaacatacgctttcgacatcctcggaaccctgttattggtgataaatttagcagtagacatgggcagaaaggcgtttgctctcagttgtggccagacgttgatatgccattttctggaaatactgggatgcgcccagatctcattatcaatcctcatgcattcccttccaggatgacaattgctatgcttttggaatctgttgctgctaagggaggtagcttgcgtggagaatttgtagatgcaactccatttcgaagttcagtgaagaaagacagtggggagtctgattcaatgtcaggttcaattgtcgatgatcttggccttctgctaagagaaaaaggatttaattatcacggtttggaggttctatatagtggtgtttatggaacggaactaacatgtgagatatttattggacctgtttattatcaacggctgcgtcacatggtttcagacaaatttcaggttcgatctactggcacaattgaccaggtcacccggcagccaataaaaggacgaaagcgtggtgggggaattcgatttggagaaatggaacgcgactctctgcttgcacatggagctgcatatcttctgcatgataggttgcacacctgttctgattatcacattgctgatgtttgttcactttgtggaagcatgcttacaacaacattcacccaacctcaaaagcggccagttcgggagattggtggtctacccccgggaagagctccgaaaaaggtcacttgtcatgcttgccaaacgagtaagggcatggagacagttgccatgccctatgtatttagatatttggctgccgagttagcagcaatgaatataaaaatgactcttaagctcagtgatggagctggagccggagcctgatatgttatacttaaattgattggatgtgttaagtttgtgatttgtatcacaacaggaatgttcaatggaggctcagatgcttgctcacatcatggggagttaaaaaatttccaggccatgcattcatataggtgacatcacagactaatctgaattgctggctgcttttaacagatcctgatagtcgtgcaaggattgaagttagtcatgtgaaaatattgtttaatggattcaaatggtgggaggagataggtagattttataatgtcgtaaattgtatcataatcttgagttgtggtgatagcacccttaatcattgcttgaggacaaatacaattgtctattgtttttcgtattaaattatgttgtatccacctttagtaaaagtaaattcatacaatatagtttaattttgatactcttactcagcataaagatttttatgtcctcaactaattagaaattattctagttgcaaaaaaaaaaaaaaaaaaaaaaaaaa

SEQ ID NO: 34697 - DNA, 896 bp, Glycine max
  Clone ID: PAT_MRT3847_131333C.1
cttcatgctgttgaagttttcttaggcttaatgccttataagacgagttttggaatgagtccatttatgaaatgaatgaaggactacgagtagtgtatacctagggtggaggcaaattgagataatgcgttaatgcagtcctaggataacctggatgctctttgcgaagactcttacggcgagatgcctcacagtccaagtctgccaaggtttacacccgggctctcctaacagacgtgctgtttccctattcattgccctctcactgtccaattactggtgccggcgtccggttgcgatagtcctgaagtcctgctaatcataagtttattgatctggcaagcaaagcaaatcgttatgttattggagtgcaaggatgaatagagtgtcgtatttacttggagtttaatagcaagattacattcatctccatctatcaaacaatggctacgaaatgctatgaagactggcaggcaagatcctagtcttgtcatttctgtagagaaagtatctaatgagtggacgatgatgatctttggatctgcattagcaacagtgagattaatgacttggcttcgatcaacaaggagaatttcaaaagactatttatgtacatagaaagtttgcctctcactgccagaccccatattcagcatgtcatatcatcccccccagtgattgccaattagtagaagatcattcaaacttataaaatttctttttttttttttatgattctcagtttgtgcagcaatttatccatttgtaaatacatgttaccttgtgatcccagcccatattattgattttttatgtatgtttggaaaaaaaaattctattattctcgttttcattggaattaattgaaggtccaaccagtgttccttgttttcccc

SEQ ID NO: 34698 - DNA, 232 bp, Glycine max
  unsure (1)..(232): unsure at all n locations
  Clone ID: PAT_MRT3847_131334C.1
nagnatannccccatccttannctactgancccttatccaaanaaccttggcnccgtttctggtaccaaattcattgntgataanatntnggnngnnnatcgaaatncggtttgccggttgangagnaagagcgtgctcagantggtgacgnaacatatgcngcncttcagtntctgagaatgnnccnacagacaagacgcttttggagnagancaattnangnnngnacnc

SEQ ID NO: 34699 - DNA, 310 bp, Glycine max
  unsure (1)..(310): unsure at all n locations
  Clone ID: PAT_MRT3847_131335C.1
ccttncttcaaggcaataaaatttatgtcaaggggcctatgggttgcacccttgatatgaaaagattgtgccaggggaggaaaaaaatacattttattgtctaagccagtccaaagatggaaaatagaaacatgtcattttatagcttgctccacattacatgcataacgggcaccgactagtgttctttatacacattggacagtttgtttacatttgaaatattatacgcccaaattggtttctataaagggtacctgtaaccaacaaatgaacctcatttcccctattgcttgtcctattctgggga

SEQ ID NO: 34700 - DNA, 390 bp, Glycine max
  Clone ID: PAT_MRT3847_131336C.1
ggctgaaacaaagaagtgaaaataacagcaaaaagtagcagctgctgcagctcccccgaagcttatctcagcagcagatactcaaccctgtttgagtagccgagaataacaccaatgggagaggtgttatctcaatacacgctttctctacctttctttctcaaatcactattatatcatagcatagatatttttgttgttgttattattcttattactattattcctggttctgattttcaggttattgttttgtgtttcaggaggaaaagaaaccagaggaacaacccaaggcagaggagaaaaaaccagaggaagagaagaagaaagaagaagcagcagcagcggaaaaaccaagcgaagagaaaaaaccggaacaagagtcgaaag

SEQ ID NO: 34701 - DNA, 488 bp, Glycine max
  unsure (1)..(488): unsure at all n locations
  Clone ID: PAT_MRT3847_131337C.1
ttcttgttctttgatctctgtgttttagagagacgacctttattttctttttatgtgcttgtgtgtctatactcatgtgcgtgtgaggggtcatttcattcgattcgcgaccttgtaacttcccggtcaaaatcaaaggaaagaggaaaagatagactaaaattagggcaaatatattcccttctacagttacatatagttgaagttaatacaaaatagaatctttggtattttttttttttttgttattttgtttcaattgctcttttgttaagttagattgaggactaacaaaatcaggtttaaaacttgtttctgacaaaaggatggaattttaggttgttttaacctttaggtccatgtgggcgctttctttttatgagaatctttagttttattttttattcattccactttgtgctttaccctatctgncttccttctcttttggttcttgatcactaagcattgaagatggaatttaaaat

SEQ ID NO: 34702 - DNA, 703 bp, Glycine max
  Clone ID: PAT_MRT3847_131338C.1
aaaaaataaaataagaaactatttctatattttagcaattattgtatacataaaaacctcaagctctaacaagccctcttgagtcttgaatatcctattaaaatttttatggagcccctacactagacatgaatgcaagatttttaagtatcacaaacttgctaaaactaaaacgtatagcacaattaagtgaattaacataacaacacagtggatatgcttattccttcacaagtttgacatctggatttctcatggttttgagccacatgtcagccatgattcttgatgaaatgctccacaacaaatctggcccttttaccaatgcatgcttgcctttcttccctgcctttcccaacccatattcaatcaaccactgcattgcagttagcctttgcttctcactgtcccatgcattctttgtaacactcctcactttcaaacttcccacatgcatgcttgttaccttgaactctttctcttcctcattatcttggtagtgatcacattcactcccttttgtgtgttcttcacttgttgcatgaatgagcaccatcataggacctccaactgcttcaaatctccttattggatccctcagttggacaacaaatataagtgtgatgtttgatgtctcatcatcagaacttgaagcagtgtcactgtagcttttgtctctgatccaatcctcaagtgaaacagc

SEQ ID NO: 34703 - DNA, 510 bp, Glycine max
  Clone ID: PAT_MRT3847_131339C.1
ccacgcgtccgcagaagatgaagccgtgtggcttagaaactcgatcacagagcaaaggaggaacccgattggacaagcgactagttgcagaatttcaagttctcaactacagattatgagtcaacaagtttcagaattcaaaatcttgaacaagaactcgtgtccttgaaaagaagccttcaattgcacaacattgtaacaaaagcagaaccaaatttgatcaaaagccagaagatgaagccgtgtggcttagaaactcgatcacagagcaaaaggaggaacccgattggacaagcgactagttgcatcagttctgtaaactttgcttcacaaagaaggaatgccagcaggctactccaggtctttcgccgcataactttgtttggaagtaggaaattgaagagaaaaccgggaactcctagtcaattgtccaagtaaatgtagcataagaacttcattattgatgtgtatgaatatggatacaaatagaaccatggagagttggagact

SEQ ID NO: 34704 - DNA, 476 bp, Glycine max
  Clone ID: PAT_MRT3847_13133C.1
ggggctccatctcggaattcggctcgagcacgcggctggccccgaccgcgtacgccgcgctccggtcggcatttcggcagggtatggagaagtaccccattgccaacgaggacggcctatttgacacgtgttatgatttcagtgggtataaggagatttcagttccgaagatagattttgaatttgccggtggcgtcacggtggagttgccattggtggggatattctatgtggtaagtgcgcaacaagtgtgtttggcttttgctgcaaatgggaatgagaatgatattacgatatttgggaatgtgcaacaaaaaacactagaggtcgtgtatgatgttgagggtgggaggatagggtttggtgctgctgggtgcaactgaagttagtttgattaatagtggtgttaattaaacatgctttgggcttgttagggagcaagaaatcttaattggctctggcatttttaattacta

SEQ ID NO: 34705 - DNA, 293 bp, Glycine max
  Clone ID: PAT_MRT3847_131340C.1
attccctccttcttggaaaacatttgccctcaaatgtccaggatcatcaccgggttcaagtaccacttccttgcttttcttgtaggcttgcttggcgtagctttcattcttctttgcaatttgcaccttcacttggtcatacaatcttttcacatactcaactttggcctgtgcatccttatgctgagtctcttggggcttgttgttgtaagttggcctgttacgcaatgaagcttttagaaggacatgagacatcttcttaggatagacatctttaaatccctgctttaagg

SEQ ID NO: 34706 - DNA, 679 bp, Glycine max
  unsure (1)..(679): unsure at all n locations
  Clone ID: PAT_MRT3847_131341C.1
gattttagaggaaattagaaagaagatatagtaaaaaaacaaaaattgatctctcaaatgtcaaacaaactagaaggtttatagctccaagttccaacctctatagctaggtagagtgctagctagagccagtatggtgaatagtagtaatgatacacaaaaaggtatgatctatctttggcgcagattgcacgactaatatttatttaattccagacactgcaaaactggtcagagtcagaagattgatcagttatcnnntaattattattgcaacaacgttactcnnngaagaaaataagaaaaaaaagagcatgacacaaaggtagattacctgtctataaacagcttattcacaagtagtagtcacaaaatatttgttccaaatattagattatattctgtgaaagaatcatgctcttccattaataaaattacagcatttatgcccttccattaaaaaatttacagcattatccaatcataactctatatatgaaaaatttattaattttaaaaaaattatctttaaataattcaaacaataatatataattaaataacaaaattatattatattatcatgcacattnnnctcataacctatgcatttactaggttgcttccttcatcttttgacactgttctggtaacaacactacactacccggtaatgaca

SEQ ID NO: 34707 - DNA, 631 bp, Glycine max
  Clone ID: PAT_MRT3847_131342C.1
tttgttttttcatgcatttaaatcatttggaacttgctatataatttgtacataggagtatatcaaccaatctttgaatgtttaacataagggtttcaatttcttgaataaggactaaaaaaataacttagaaatttttttctgaaaaatagtcctttcgctaagcgcaagcctcgcgctaagcgcatctttgttcatgcactaagtcacgagtctcacgcacttagcgtccaacccttgcatctgaggctgatttggtccgctaagctggccaaggttgagctaagctaactttgattcgatctgaattcagctaagcttcagtctgatcgctaagcgacaacttatccgtggctaagtgtgacctattgtcgccaagcgcaattccttacagccataattgaggtccatgaagctaagcgccagtcatggcagctaagcgagattcattgcggcaatatgagcgctaagcgtccctcttaactaagcgcatgctcctctgtacttaagatgcatcattttagctaagctggctagagcctggcttagtgagagttgcaacttttctaatctgcagacctcgctaagcggacttacccttgcgctaagccaagtctttgcggacgcgtgg

SEQ ID NO: 34708 - DNA, 280 bp, Glycine max
  unsure (1)..(280): unsure at all n locations
  Clone ID: PAT_MRT3847_131343C.1
gagaacagcnacnacatgnatggnnggnnagttccgatcgatntngganggnctcnncgaggaagggtgtgncgaagaancggggnntcanatctgagaagacngcgtcgactaagtgtggnacaagtganngctttggagaagaactttgaggttgaaancaagcttgaacctgagaggnaggtcaagcttgcccaagancttgggttgcagcctagcacaagtagccgtttggttccanaaccgccgagccncatggaaaaccagacantggagagag

SEQ ID NO: 34709 - DNA, 380 bp, Glycine max
  Clone ID: PAT_MRT3847_131344C.1
aactctcccggatcgctgttcacgcacgcatctcggaacgcttcgaaggcttctcttgtctctctggagtcgaccagcagctaccgtaacccatggaacgacagcggcattaacctgcctgatgatgaacattcgcacaatggttggcccgtagcacccgcgcccggcttcggcatccactcgaactcttccaaactttcttttcacggcacccccactacgtcggcggcgcccggggatatgacaccgcggtacgacccccgtgcgtcggtcgacagtggacgcccgagcacttcccattctgcttctggatacccggccccgattgggcctcctcgttgaaccacaaaaaagaatttagccgtgcagcccacaaaagc

SEQ ID NO: 34710 - DNA, 322 bp, Glycine max
  Clone ID: PAT_MRT3847_131345C.1
ggaagagaaaaaactcgggtcattgacttaaaaaaaaaaaaaatccaacgttgttctcgtcaataaaaaaggggcacctcctttgcaacaataaaaaattttttaatcactaaacccccaagccccattgttttcgtcaattaaacccatccccgactgaaacattggaaatttcaagcgccccccgcatttgaaatcccgaaactctttaattcccagttcccctttgggaagccacattggatgtttattattgggaatacatatcccattaactactggcattgccttttcacctggggtggtggttaaaggtttcctt

SEQ ID NO: 34711 - DNA, 200 bp, Glycine max
  unsure (1)..(200): unsure at all n locations
  Clone ID: PAT_MRT3847_131346C.1
cgggggggagggtanctgttnnaactctccctttcccttttttcttacccccacacacactttggacagtggattttaaaaagcaagaggaccccaacactatcgcttccttactcttacctacagcctatgctttacttaccatcaacttcgctgattacgatccttctcatgttggactccttttgaccaacatttac

SEQ ID NO: 34712 - DNA, 179 bp, Glycine max
  Clone ID: PAT_MRT3847_131347C.1
aggaacttgattcaaatattcacaaagccttgcaatgccttgggaaataacaatttaaaaaccaccagaccaacaatggtaaactttgggccggggaaaaaaatttgtttgattttcttgctgaacccattcaagttagttcagactcaaaggtggtaaaaataggcggtggcactctt

SEQ ID NO: 34713 - DNA, 2237 bp, Glycine max
  Clone ID: PAT_MRT3847_131348C.1
aaaagctgttaagttaaacccatctcttgcagatgcttggctatgcttaggaaattgcatttggaagaaaggagatttaactgctgcaaaaaactgcctcagtcttgcattaggcaagggtcctaacaaaaagatactttgtcaattatcaatgcttaaaagaaaaatgtctcaaggtgcagagaatcaagcagagctggttgaggaaagcattcaacatgccaaggaagcaatcactttggatgtcaaggatgggaatgcttggtataatcttggaaatgcatgccttacaagtttttttgtcaccggagcttgggatcataccaaacttttacattctttaaaagcatatcaaaatgctgagaaagatgaaagcatgaagtccaatccagattgtctttttaatgtgtaataggttaacaaatatctagagaactaccagagggcccttagtggatttgaggctgctgctttaaaggatccaggtctcaatgctgtagaggaggttcagaagatagtcaatttacttgacaaggtggacaatcttttgaagggacatgtaagagctaagcgaatggcatctttggcatcatcattggttgctgttgattatcatcttcttcttcttcagtgagtgagatgagtaatcccagcgaggaaccgttatccaaagttgcaagagcagcagaagatctttaccatcttcgagacgcttatttcccacccaaccccgatgacagaatctctaagttgcaacaagagtccgatctcgctcttcaactcctcgattccattccctcagaacaaagaaaatcacctatgcaacgtgcaacatttgaatatcttagagggaagatattggatgtatttcctgactataggagagaagctgaggatcatctatcaaatgaaatcatcatacagaagagttaccatagaccttttatcagagggtccaaatagagctcttgcagttgaggggtaaagtttttttctttgttagtagtgagagcgttgctcccctatactatttgctttatgattcaaatcaatcttgctttgtactctcgatttattggtgtacgtactgatgtgattaaagaaggagatcagctaacactgcttgtccgttattttcgtgatgtttatttgtcctggaaggagaagcattaccagttcaaatctatacgcctggatttctatgaacaagtgcttgtaaatggaaaagctttgactcctcaacaagctgttggtacctcaatatatgctcaacataaaccctgaaaaggccactgctgaattagatgagttctacgtgtcttctggctgttggtgttggatgctgtgtattcattgagtaaatagattagttgatacattttatacatgtgaatttcttgcccaagtcatgggtcacaatcagataataggaaaagaaaaaaacttgagaggaaagttttacatttggttttctattttgtccatcaagtttttgcatttgttgaatattatagtttgaagattctcctgggatgttttctacttttctatgcttttaacagcatgcttatgtaaaaatcttgtttgttgttgtgtcccacatgatcatcttgcccttgtcttcgcgcagatactatttgctttgtgattcaaatcaatcttgctttgtactctcgatttatggtgtacgtactgatgtgattaaagaaggagatcagctaacattgcttgacccttattttcgtgatgttgatttgtcctggaaggagaagcgttaccagttcaaatctatacgcctggatttctatgaacaagtgcttgtaaatggaaaagctttgactcctcaacaagctattcgtacctcaatatatgctcaacataaaccctgaaaaggccactgctgaattagatgagttctacatgtcttccggctattggtgttggatgctgtgtattcattgagtaaatagattagttgatacattttatacatgtgaattttcttgcccaagtcatgggcccctatcagataataggaaaagaaaaaacttgagaggaaacttttacatttggtttttttattttgtccgtcaagtttttgcatttgttgaatatgatagtttaagattctcctgtgatgttttctatgcttttaacagcatgcttatgtaaaaatcttgtttgttgtgtatcaaactctaatcttgcacatgcttcatcttttttaaaaaaaaaaa

SEQ ID NO: 34714 - DNA, 221 bp, Glycine max
  unsure (1)..(221): unsure at all n locations
  Clone ID: PAT_MRT3847_131349C.1
atcaaatttgttagagataaaaatgctttcttgaaaactttgtcaaaaatttcttataaccaaattctaatatactgatttgatagaatatataaaatgaagnaatnttttggtcaagaatatgattaaagaaggttaattatttatagaggttgtggatctgagtagtattaattttgtgtcgaggtgggggtagattgattgaggtagatctaaggaaa

SEQ ID NO: 34715 - DNA, 382 bp, Glycine max
  Clone ID: PAT_MRT3847_13134C.1
attatttttcactctctgcctctctctactctgtcgcgttcgacatcccgtggggcagccacatcctgagagacaaatggtgatgacatgcaccaggctctttctgccccattgtcgctcttaagggagtgcgagtcctagcggaggccctgcctgcagatggcaggacctccatcctgatcaggctctgactggaagagatcggtaccaccatccccagcatctagctcagtgtgccgactgtcgtactcaacagcaatagtatgactctctgggatggtggtggcctctgcactatcaccccgttgtggacgcactccttgtgacacgcacagggatacactcgtgctttcgacagcagcaacagtgacagagctgttga

SEQ ID NO: 34716 - DNA, 131 bp, Glycine max
  Clone ID: PAT_MRT3847_131350C.1
acgcgtactcacactcttactatacctttcacatctactctctatcttattcatacactactcataaccggttcagttaaatttacaaccaacactatccactcacttatatcattctactttcttcacta

SEQ ID NO: 34717 - DNA, 112 bp, Glycine max
  Clone ID: PAT_MRT3847_131351C.1
tgtgtcgcggcgctatctctacatgattagtctatttagattatgggtgaaggttgcggagtagacagaggctgcaattcgcgattatggtatgagtggcagacatgcagaa

SEQ ID NO: 34718 - DNA, 231 bp, Glycine max
  Clone ID: PAT_MRT3847_131352C.1
tcgggactgtctttttttagcttgaatagcatgttctcacagactgaaaaagatgccaaacattcccttctccttcaatcaagagttgaaataatttttaatctgatcattcatttatttgcagactgcaaagtaccagttaattaattcttttaacttgcaacatggttttgtttttagtcggcattatatataactttaaacgagtgagtgatacttcaagttttcagt

SEQ ID NO: 34719 - DNA, 475 bp, Glycine max
  Clone ID: PAT_MRT3847_131353C.1
aatatgtggctgttagatgaatatcttgcatttttcttttgaaattaagatgtcaaatatatcgatgacagtattcaaaagtggtgtatattttatagaggtggttggcttaagaggtgtagctcaaaaagtaagtgaaccgaatctaatctacttttttgttgagccaaaaaatcgatactgcatacctcttgcacaattcattatagcttgttgcattggttaagggagttgatactcctaataagaaaattaacaaaaaaaaatgaaatttttttttttactaaaccaattttatcatcattattattatattaaaaaaaagttattaaaatataactaaaaatattattttagtctattatatttttgcatttttcaattaaaaatcgtctaaaattgctataccttagatctaataaaattatttaatatatatatatatatatatatatatatatatatatatcaaatg

SEQ ID NO: 34720 - DNA, 147 bp, Glycine max
  unsure (1)..(147): unsure at all n locations
  Clone ID: PAT_MRT3847_131354C.1
ttagagcaatacttcaattcatatacaccaaacacatatactatcttcataagcacattactcaaactaatagttttctacaataaaatttaactattantcnnaatctacatctccataagattaacactatccgtactctcatca

SEQ ID NO: 34721 - DNA, 287 bp, Glycine max
  unsure (1)..(287): unsure at all n locations
  Clone ID: PAT_MRT3847_131355C.1
cggcacttccaaggntattaaccctgtngtttgantttngnagcntgtatcanagcagtggttcatcaanacaaaggtttaanaggatgtaccatgcncaaggtaaatgagtactgtaaganngcngtttganagacnttacggccatccccatgggttgncagcccnnccnnanngggttccaagatttncccaccagantgaaganattgttcgactcgtcaaacttatcattacctntgtnctccgncagtntccanaanngggcctatggnttatggctgcng

SEQ ID NO: 34722 - DNA, 541 bp, Glycine max
  Clone ID: PAT_MRT3847_131356C.1
ccaccattccgttcttgatggtaaatcttcaactcttttcatcaaagcttggtcttctttatgccaaaccaacgatgatgagtcttcagagtcatcatcaccatctttggcaccaaagttggttcctttctttaacagatcagtcatcagaaccccaagggagttgggacttaacttcccaaccaattggaccgaggccttaaccaaattgttccctactggaaacagcgacgggagatgcttgaagctactacctttccctccaagactcgaggatgaggttcgagccaggttcgtgctcacaggagcagatttggagaagttaaggaaaggtgtcttgtccaaatgggacatcgttgaaagaggaacagaatcagaggcacctaggttgtcgtcctttgttctcacatgtgcttatgcggtagtttgcattgctaaggccattcatggagttgaaaaggagaaagagaagtttgcttttgcattcacggtggattgcagggccaggttggagcctccaatccctgagaactatttcggc

SEQ ID NO: 34723 - DNA, 429 bp, Glycine max
  unsure (1)..(429): unsure at all n locations
  Clone ID: PAT_MRT3847_131357C.1
tagaaaatttcatgattttattttctcctatcaatgtcttcatanccgggtcactctttttaagcttggcagcggtgaaatcaaaatttttctctttaaacaatcataattttaaacttacatttgaatattttcctccttttattattaatctaaacgcattcagaaatatttacactttattattacattaatggtatcttatgtgaatcaagcacttattttaccaattacattcattttaaaaccttcttataaacatattttaattttcataaccaatcttctactaaacactttgatttttaaacactcctttttattcctcaaatcaaacccaaaccacccttctttacacaatcattgaatcataaaagtccttctaattttatcccataaacatataccttttttataattcatttttta

SEQ ID NO: 34724 - DNA, 464 bp, Glycine max
  Clone ID: PAT_MRT3847_131358C.1
tgcagtaccggtccggaattcccgggcttgagaaataactgagaaaatcgtaatcgatgggcacgacttcatctttctcgtttccgcttcttatcggaacccccatttctcgttcctcaaaaccgcgtctggtcgtggcggcggcggcttcttccgagggcggcgccacttcttcttcagcaaccaaattgctcacttttctcggcaaaggtggctctggcaaaaccactgccgctattctcgcggctcagcattatgcaatggctggtttgaatacatgtttggtaatacatggccaagacacgactgctgactatcttctcaattgtaagattggaacttcccatgtcacatgtggcaagaacctttctgctgttaggttggaaacaaccaaaatgcttcttgaacctttaaaacttctgaagcaagcagatgcccaactcaatatgactcagggcacactt

SEQ ID NO: 34725 - DNA, 1906 bp, Glycine max
  Clone ID: PAT_MRT3847_131359C.1
cttgagaaataactgagaaaatcgtaatcgatgggcacgacttcatctttctcgtttccgcttcttatcggaacggccatttctcgttcctcaaaaccgcgtctggtcgtggcggcggcggcttcttccgagggcggcgccacttcttcttcagcaaccaaattgctcacttttctcggcaaaggtggctctggcaaaaccactgccgctattctcgcggcataattatcaagttcaacagtagaaaagtaattaatctcactgttttgaaaaccggaccggccatttcagcaggttcaagaaccggtcacgcgttgggtccaatgcttcatgaaaaccagtgcatcataaaaccggctaaaaaccgttgaaccaatcttttttacccgatggtttaactggttttgcttaaaaccttttttttttttactttcaaaacaacatcgtcttggttaaaaagaaagaaatattattacttatgacacttttaagtgaagtttactttttattattatcaatttatgcgcattatgttatttttgttcaatattactaggatattatattaaaatattaaaaaatatatattttattaaaattggttcaattccggttgaaccattaacccttgaaccagtgtcttcaccggtttgatgactggtctggttctgagaacattgattgattaactcaagggtgtctaatttagttggttgagtagtgtccgtgagttattgtaaaccccttgctacccaggttcgattcctttgttgataaaaaaaagtaattaatctcacttttttttctttaatttcagcattatgcaatggctggtttgaatacatgttttggtaatacatggccaagacacgactgctgactatcttctcaattgtaagattggaacttcccatgtcacatgtggcaagaaccctgctccttctctactgagacttgcggatgaggccatgttaattagttgctcctgatcttatttcaacgcgaaaatgagttcagaaatatgggaaacgaatttctgtatgctggaacaagtgcagactgcttttgaacctttaaaactactgaagcaagcagttgcccaactcactaacaatcagggcacgattagaggggtggttcgataatgggggttcacaatccagcttggcgctcgggtttctggtgcttttggaagcacctctcagctagaaaatttagaatcattggaaagagcaaagaaagaattttctcctttgccgtctgcttccatttcaagattgtcaatgaataattctatagattggagcagagttctactggataccggaaatgaagatgctaggcatcttcttaattcgctatcaagtcaaggtggtgatatgccatcaccagttagatttgataaaaaaggaaaattggttactctcttcatgccaggttttgacaaatcagagatcaagctttaccaatataggggaggatctgagctgttggtagaagcaggagaccaaagacgtgtcattcctttgcctccagaaattcaaggaaaggttggcggagccaaatttggggacagaagtcttgttattacgttgctgtgaccctgttattctttttttattttcttcctttatgcttgctgataattatcaatgtttcggcagaggcaatttttttttcaatgtaaaaaaagtagaatggggaggtaccccattacagcagaggcaatttttcttacacctgattttttgtgtcacttgctttcatcagtgactatgcaatggaacaagaatagcacattattgctattctgttttatgcctgttctgttttatgctggtgcaggaaataagtctctttttttttaaaaaaaaaaaaaacaaggccgcccgctctagaggatcca

SEQ ID NO: 34726 - DNA, 274 bp, Glycine max
  Clone ID: PAT_MRT3847_13135C.1
ctactattgaataatcaaaacgattttacccacttttcaaacatcaaaccaatagaacccttatgaaatctttccaaacattcaaatacttttctaatcttattcataatttacttcctatatttaattctttatccatctctcttaaaccaattattatcatatatctttttattatttttacaatctatttcctatacttttatatcaacaattattttcctcttcctactcacatcaaataacaataattataatcccaaaattttaacaa

SEQ ID NO: 34727 - DNA, 372 bp, Glycine max
  Clone ID: PAT_MRT3847_131360C.1
gtcggggaacttctccctgacgcggcagccgtcggtgtactcactgacgttcgacgagttcatgaacagcatgggaggttcggggaaggattttgggtccatgaacatggacgagttgctgaagaacatttggaccgcggaggaggttcagacaatggcgtcggcgggagtcgccgccgacgatggcggtgccggcgctagtcatttgcagcggcaggggtcgctgacgctgccgcggaccctaagccagaagaccgtggatgaggtttggaaggacatttcgaaggaatacggtggcctcggtgggcccaacttggcggcccagactcagaggcagccaacgtttagagagatgacgtttgtatgagtttt

SEQ ID NO: 34728 - DNA, 375 bp, Glycine max
  Clone ID: PAT_MRT3847_131361C.1
tttttatctactaatttttatacactaccatattacatatttaaaagaggatttctcttctttttaaaatataccataagaaatgatacccagtattatgccccttatatatctcacatactaacccagcatgaaatttatcaaatctatcatgacttttgcataaaatttctaaattttacccttaatattctctttcaagtctgggaatactcaaaccttaacatctctttaccaaatggagcctgaaaaacagcatttctaaaacgctcgtatgaatgcgcctacatcattcgcccactaagtcactgtttgttaacaccctcactacatacatgatttactcctgttgtgccaaaacgaccccttattggg

SEQ ID NO: 34729 - DNA, 268 bp, Glycine max
  Clone ID: PAT_MRT3847_131362C.1
agaataaaaattttacttttttacttttgtttttaggtttggggaaaaaacacggggaccccatttaccatgggcttacatttgccatttgggggggaaaaaaacattcctttaagtttaacattatacattgttaaaaaccaaattctcccccatgaattctttctcatttggtgaatcctttttttttttcctccttaccaacatttaactggtcaaaaagaaagaaatgtctctgggcttgaaccaaaacctttttgttggtttt

SEQ ID NO: 34730 - DNA, 212 bp, Glycine max
  Clone ID: PAT_MRT3847_131363C.1
cgcacgcgtcctcctacgcgtccgtcaatctcatcctctagctagcattgagaagcaatatcttcgaattgaggagagcgcttttaatggcggtggagtaccattgttgtgaaactcattttttcatacgcttattgataattttgctgcttgtgttgttttctggatttatgtcttgtctcactttatgactcatatactttattcttttt

SEQ ID NO: 34731 - DNA, 361 bp, Glycine max
  Clone ID: PAT_MRT3847_131364C.1
aacaaaaaccccacccaaggcccgatttttcccctttttaaaaaggaatggctcattttgttaaaaaaatttttcaaataaaaccaaactccccagataatgccaggtctctcccacaaaaacaaaacccctcataaatataaaactttttgagagcaatgaacaccatttctttcagacatatagggatcgttccaactattcgccccggaatcccttaattacacccccattcccagggacctcccgacaagttaaaaccaaaaccccctttttttcttccccctcccataatataccatctgacaaatccacgtggacttttacacattttgggacaccaccaaatacaagggccttt

SEQ ID NO: 34732 - DNA, 163 bp, Glycine max
  Clone ID: PAT_MRT3847_131365C.1
tatacattacaagccacccaagggtgcatttaggactaaagttgtccacccaaatatcaacagccgtggcagctatctgcttgatatcttaaaggagcagtggagccccggcatgacaatatctaaagttgtgctcacatcttgctcattattgtgtgatcca

SEQ ID NO: 34733 - DNA, 304 bp, Glycine max
  Clone ID: PAT_MRT3847_131366C.1
atcacacgttaccactaatacaactttgttttttccttacaaagaacttctccaaggtacggttttttattcaaccagcgtttttccttttcatgatgtctagactaaaaaactccattccaatataaatgttagagaattgacgaaaaaaatattactttaggtacacctaatctgaatattttttattcctttttaaaatgaatttccattcacattttcaatttttattcacaattttaattcaacttaatttatttttcttaaacaaaatcctcttatatacctttaaaacaaaaggctt

SEQ ID NO: 34734 - DNA, 1202 bp, Glycine max
  Clone ID: PAT_MRT3847_131367C.1
ctaggaagagagaaagaaggaaaatattgaagctcttgcaattctcatgaactgtggagtcgtgttgggtttctattgttggggttgggagttcttaactgcccttcttctcttctcttctcatcaaccttattgatcattctcttcatcctcctcttcttcttcaaaaaccaatttctttttatatatatacaaataaggaagacatcaaagaaaaaaatagcaaaatatttttttaaaaatatggaaggaacaagtgaaaaggggttgtgggaatgtggaaggaagtgcactccaccaccgtttttgttgaagacttatatgctcgtggacgatccggccacggacgacgtcgtttcatggaattccgaagggacggcgttcgtggtgtggcagccagcggagtttgctcgtgatctcctcccaacactcttcaaacacagcaacttctctagctttgtgcgccagctcaatacttatggatttcgtaaaattgcaacaagcagatgggagtttttcaatgaaaggttcaagaaaggtgaaagagaacttctacatgagattcggcgaagaaaagcttggaccagcaagcaacaaccaaatgcaccaaaccaagcaacactccaagactctgatgaagatcaaaggtcctcatcaatctcatcatcttctggttacactacccttgtggatgaaaacaagcgactcaagaaggagaatggggtgttgaactctgagctcacaagtatgaaaaggaagtgcaaggaacttcttgatttggttgccaaatattcatcacatgcaaaagaggagaaagaggatgaaaggccaatgctgtttggagtgagattagatgttcaaggagagagggagatgaagaggcatagagctgagatgagtgaaagcgcaagcattatgttgtctcagtcatgcaaatagctagacatgttattatacatagaagcttaagagtattcagtatagatactgaaaaagtaataatcaaatatttggaagtcataatttattgattaattaatggatagttaggcttgcaaagagtattttcgccctagtttgtagttactttggatatcatattggatgcatcaaggaactaattaagacacctcaagcatatatagcatatgctgtaattatatatgtagtgtgattcagaaccgatgaaacataatttatgt

SEQ ID NO: 34735 - DNA, 240 bp, Glycine max
  Clone ID: PAT_MRT3847_131368C.1
tcctaccattccagatccccatctataactataccatttaatctttatcttcttgccctccggcccggtaaaaaaccaaaaccgggattatctacccaccgacgcacttatataaccaaattcaacacatttaacaagttcttatattctatattttcctaccacaatcaacatttactttttgtccaccacttttttttaaccctattacaacctatatgtcttcaaaaacaacctttc

SEQ ID NO: 34736 - DNA, 234 bp, Glycine max
  Clone ID: PAT_MRT3847_131369C.1
gacccacaacgaccgctttaccttatcctacataaacacctttctatacctcacctaacactcatctatcaccgccatttttacacattaggagcgcctaacctacaactaccttcaatacattctcccccaacaaagccttcatttctacctcttcactccctcgaaccttcttatccattcccttattggcttaacaaccttcatcaaaacaatactcctttattccaacca

SEQ ID NO: 34737 - DNA, 181 bp, Glycine max
  Clone ID: PAT_MRT3847_13136C.1
agagatcgtgaagactcttcaagaaacttgggacagagttgatgatacgtatgcagtgagttcactagcctgggttggggtgatagcattgtgtggctcaattggattgatctcatcaatggataggcttactctgatacctgagattcttgagattgtatgcataggatacgcatggtgg

SEQ ID NO: 34738 - DNA, 511 bp, Glycine max
  Clone ID: PAT_MRT3847_131370C.1
cccacgcgtacgctggacaacctggacgcaacagcggacaaggcccgcctggacctcccggaccccagggaggagctggccaacctggtcgccctggaggacctggccaacccggacagcccggagcaccaggagttatcaccacctccgtgcccggaccgaagggacccccgggcgcacccggccaacctggacaacccggagcgcctggacagcccggcaaacccggaaacgctggtcagcccggggcacagggcccgcccggacatccaggacagcccggatctcctggccaacctggaagccccggacctgctggacctcccggaggcgacgcggcttactgtgcttgccctcctcgcaacgctgtgctcatgaagaagatgaagaaggcatgagcaagccgatgaagagggatgaaaagcagacgagcagcaaaaagagattggtgatcaaaactgatggatgaacaaagaaagtgttgaaagttcatttggagaaatgattattt

SEQ ID NO: 34739 - DNA, 300 bp, Glycine max
  unsure (1)..(300): unsure at all n locations
  Clone ID: PAT_MRT3847_131371C.1
cccacgcatgcgactagaaccagggnaacgacaaggaacgcacaagcnngccgggacatgcaatttagctagcacggcaagggcatgccgcaagacctattgaacctgccagtgaacactggctatggctgcaagcactgagtatatgaaatacgccatgtgagtcggcatgctaactaatgccagcacacatcatcctcctagacgcatagctgaaggctggatcggatcatcacttgctgactcaaaaaactagatagactgatcaaactcgagagaaactaagttgctgcatacaga

SEQ ID NO: 34740 - DNA, 1881 bp, Glycine max
  Clone ID: PAT_MRT3847_131372C.1
ggggtggttggtgctgttgtcttggctggacttttctttgtactatgcaggaaaagaagaaggttggtgcaaaggcagtcaaagacatgggttcctctatccataaatgatggaactacttctcataccatgggaagtaaatattctaatggcacaacactgagtgctgcttcaaactttgagtaccgtgtcccttttgtggcggttcaggaggctacaaataatttcgatgagagttgggttattgggataggtggtttcggaaaagtgtacaagggagagttgagtgatggcacaaaagtggcagttaagagggggaatccacggtcccagcagggtcttgcagaattccgaactgaaattgaaatgctgtctcagttccgtcatcgccatctggtgtctttgattggatattgtgatgaaagaaatgaaatgatcttgatatatgaatatatggagaagggaactctcaagggtcatttatatggttcaggtctgccaagcttaagctggaaggagaggcttgaaatatgcattggatcagctagagggcttcattaccttcacactggctatgctaaagctgtcattcatcgcgatgtgaagtctgcaaatatcctacttgatgagaacctaatggctaaagttgctgattttggattatcaaagacggggcctgaaatcgaccagacacatgtgagcacagctgtcaaaggtagttttgggtaccttgatccggagtatttcaggaggcaacaactaacagaaaagtcagatgtgtattcatttggggtagttctgtttgaagttctttgcgcaaggcccgtcatagatccaacacttcctagagaaatggtaaacttggcggaatgggcgttgaaatggcagaagaaaggacagttggagcaaatcatagatcaaacacttgcaggcaaaatcagaccagattctctgaggaagtttggagaaactgctgagaaatgcttggctgactatggtgtggacaggccttctatgggagatgtcttgtggaatttggagtatgctctccaacttcaagaggcagtggttcaaggcgaccctgaagaaaacagcaccaatatgattggtgaactctctcctcaggtcaacaatttcaaccaggatgcaagtgcttcggttacacaatttgcaggctcaggcctcgatgatctgtctggtgtttctatgagtagggtgttctcacagttggtgaagtctgagggtagatagatggttctggatatcctatcttataaattctgtgtgacagtactcttctgttataatttttgttgtttttcttctgatcactagctctccgccacgacttggaagattagaaacttcatatcatagatttgtaaagaaagatttgagttaatgaaacatatatgtttgcttaattggtaatcagagcatctacttgttaaaactctggcttctcgagttcgaattgaactatcttgaaaaaccagtgtaagttatgcaaccacccaggtgtaccttatcagctggagaaatacctgaatcagcaagtgtggcaaagttctctgattaaactgccatatagagttgggttagatgttttggttttatatctcttatacttatttgtgaccagagagggtattgtaggagtgggttttagccttttaggcaactggcgggcatggagtttctctgaaataatacggcacatgtatttgcatttgttactgtgcatttggtgttaatacgagttgcatggtttgttatattctcggtcatttatttcctccactctatttctgatgtacttgctgttaatacaagctacatggtttatcatatattcagtcatttatttcctcacttgaaaaa

SEQ ID NO: 34741 - DNA, 699 bp, Glycine max
  Clone ID: PAT_MRT3847_131373C.1
ccacgcgtccgcccacgcgtccgctcagattatatatatactccacatctgaagccacaccatcaaactcaacactgaccaaaatggcctcaccccaaacccctctatcccttctcacaattgcactcctttccctaatccctctcttcatcttcttcttcttcaaccgctccaaaggcaaacaacccaaagaaccaccaaccattcccggcgcatggcccatcctcggccacctccccctcctagcccgctccccaaccacccaccacctcctcggcgccatcgccgacgaccacggccccctcttcaccatcaagctaggcacagtaaaagccctagtcgtcagcaactgggaaaccgctaaagaatgcttcaccacaaacgatgtcgccgtttcttatcgcccctatgtggtcgccaccgaacatatgacctacaacgtcgccatgctagggttcgcgccatacggccccttctggcgtgacatgcgcaagaacatcgcctctgccttcctctccgaccaccgcatcgacacgctctcccacgttcgtgtctcggaggtgaggacctcgctgaaggagctttacagcaagtggacacgtggcacagacggcggcaagagtgattttttggcggtggagatgaaggagtggttgaaggaattgtcgtttaatgtggtgcttaggatggttgccggga

SEQ ID NO: 34742 - DNA, 466 bp, Glycine max
  Clone ID: PAT_MRT3847_131374C.1
ggaatgaaccaaggaaactagagaatatttatagcatcacacatggacggtatcattgataaacaactgaagggaaaagcaatctatatataagtcctatttgaatcaattttccaataaatgcttataaaaaaataaaatgtattaagttttttcaaaaatcaaaattaatttatatataagtcaattaacttatatataaattaattttaattagcgagaaaaacataattcattttactcttattgttctgtgcaagtgcatattgaaaagtttattctgttcacttattggatgaagggatgaaaaattcaagaccctttgctatcccataatcatcgagctgataaaacagaaatggaggcagtagcattagatgaaccaccagcagacatgccttcccgattcatcatattcgtttcaacaaacacaggcatagttggtcgcaggtgctccactaagctc

SEQ ID NO: 34743 - DNA, 772 bp, Glycine max
  Clone ID: PAT_MRT3847_131375C.1
catcgctagagagagaaaccaagaaagagaaacacagagaaatcgctttcgctactaaatcctccctcagacagtcccgatggacggtgcgggcgcgtgtgtggtggccgcgtctgccaacacctaattcaacagaataatgcgccgctttcgcccgatcgcaccgaaaccgccgccgcgaagttccgccgcccccagagccaccggcctcggcgacggcagccagagtagccacgtgtcagttctagggaagagaccgaagaggaagtacgttaggattcggaggaacggtggatacgtgcgaaagaataacggaaacagtaaccgaaaaagtaattgtaactgtaacgatgagtcttccgacgtggcggttgtgacgttgcagttgatgccggagaaggacgcgccggaaggagacgtcactctcgcgggagattcgtggcgtaagaacgttgatcttgacctaactgtggagaagattcagatcgttgagaatccgagtgttccgccgccacgcttggtggtggaggaaggcgagggtgccaagggttcagatcttgttccggcggcgaaggcggcggagtcgtgggtgacggtggagagcgtgacaggcacgtgcatgggggagggagagggagggagagggttattaagttgtacggacgaggagagggtgaagagcctagaaactgacacgtgtccggggtttgtctgtgacggaagccttagggtgcggtgggtgaatgatgcgtacaagaggatggtgctggag

SEQ ID NO: 34744 - DNA, 359 bp, Glycine max
  Clone ID: PAT_MRT3847_131376C.1
ctcgagccgaatcggctcgaggccggttgttgttacttctgtggagaagaatgagaagaagatgaagaggaagtatcagaagaagagggttttggccgaggatgagcctaagcccgatccttattggctggatacgttttttgggtttgcacccgaagaggcggagagggtacccaattgggggcattgtggggtgcttagtccgcttttggccaatgtttgcttggatgagttggataggtggatggaggggaagattaacgagttttatgttccttccaagagtgatgttatatggaatagtcccgacgaggatcaagggaacacgtcgtgggcggagttcgtgcccaagagtgggc

SEQ ID NO: 34745 - DNA, 409 bp, Glycine max
  Clone ID: PAT_MRT3847_131377C.1
aattgaatatgaaataacagaattgaaaaatgacaaagacgtgctaaaagtgttagtacaatccaaccattggaaacgatactgcacactaaaagttttgttggctatttttaacaaaccagcaatcaaaataaaagaagacctggatcctgcacaacatatgtcagatcattattagttttgtcatatttgcgttttaattgtattttttaatatgtttcattattctcaattatcatctcagttactacattttgaaattttttggcttttggattaagacaaatgtttcaattatttcttcactgtattttttaatttgttttaatactattagctaatttttttaatttaacgacattaaaaaacattcacaacacataaatttaacttccaaattacattcaac

SEQ ID NO: 34746 - DNA, 389 bp, Glycine max
  Clone ID: PAT_MRT3847_131378C.1
tcgatttgacgagattgaggtgacaaattgcaaggcgtgtaaccaacatagcgaggcttatggttaccacactgacatggaccaggccagattaacctacgaacaggatatgaggagggacatgccatggaagacctacatggacaacaagctgatgtgatgtaccaaacattagttcttaaggcactgctatcaccgggcatagagtcacatatcacaggtgctcgatgatgatggtccctcttatgtgcgtacgtttggaccaacattgcgtgacattgaaaaggcacgactccagggagtatgtctgaggcactgatagatgaaacgcttgatgcataccgcaagagagcaagactgtttgatgacagcccccttgtttgtgaaaa

SEQ ID NO: 34747 - DNA, 394 bp, Glycine max
  Clone ID: PAT_MRT3847_131379C.1
cagagaaaggattcactaattaactgtgctttgaccaggtatgtctctcaaagggtgagaggctgattgatagaggactgcctttgccattttggtcgaacatgcaatgcaagacttaaagataaccaatgctcgacgagaaagtgaaaacccaatcaaagtaataaatatttataaagctaatggaaaaagtgcttagaaacagatttaaaagaaatggttattctttaaaaactcgccgagctgctcaaggaacgccttttatggtcgcccatataagaaaaggctgtcttgattacaatcttcataagacaaaaaccgcaactggtgcttaagtttttgatactgaaactaaggagctatacacaaatcgtcaaagagaggctattttgac

SEQ ID NO: 34748 - DNA, 589 bp, Glycine max
  Clone ID: PAT_MRT3847_13137C.1
gccttctcgggactagagaattctttcgttatatgaggctacagagtatcaactgaaccttgtatattaagactgaactgttgccaaagatcatgctaggaattgctgggtgcttctatacaaaggacaattgaaggtctcttagatggaaaaaggagcaagggctaacctgtctggctccgagcatatgtcatacattgaggattagtattggtttcatatccgaatacatgtaacgtttagacatgtagccttgtccttgagaactgcaaactgtccaaggtggcctgaggaagatgatgaggtgaatgccctatttgaatctgactgggagatccaagcagtggaagtctgaaaactagaaactgaattacattgcccgctccattgtgatgggactgctcagagaacattcaaagtgaatttgggcttgttgacatccttgagggttcagcgtgaaacctttggacgcaggttagcaccaaatattcaagcgggcgaagggtccggaccagtgttttctatactaaggaaagcaggtgcctgttaacatataggcaccaaccaaaattcgatgaaggactatgta

SEQ ID NO: 34749 - DNA, 367 bp, Glycine max
  Clone ID: PAT_MRT3847_131380C.1
ggccccggcccggatttcccgtttcgtcccacgcgcccgccctcccttccgacggctgcgagaagaccacagaggggggctcttcaattgcaaggagcattagcccatcctctgtgcgcaactccctacctatcctttcaaggatcgaagactccccatgttaccccttctccccctccatcgatagtgctacatcctcctgacgttgcttcgattgcgtatactatcgcttcatccattataaattttcaccccagaagactcagctcctattaatgcaagaacgaccctaacagatgattctataaccaggcatgagggctagttagagtttttgccatgaagatcaccagaccccattacaaca

SEQ ID NO: 34750 - DNA, 854 bp, Glycine max
  unsure (1)..(854): unsure at all n locations
  Clone ID: PAT_MRT3847_131381C.1
gctcggcaaggctgcctcctctctctgccacctggttcttcgcgccctttctgttgcctcggggaatccgcttttcgatgcttgaagcattctataacaatgatgttaacggagtgtacactagagattttccaaatcagcctccgattgtgtttgactataccgacccaaacataacgagcactacagaattagccttcaaaatcgcacccaaatcaacgaaagtgaagacgttgaagttcaattcaactgttcagattgtacttcaaaacacggccattgtctctgcagagaaccaccccattcacattcacggcttcaatttccatgttttggctcaagggttcgggaattacaacgccactagagacgagcccaagttcaatcttgtcaaccctcagatacgtaacacaatttctgtccccgtcggaggatggtccgttgttagattccaagcaaataatccaggtgtttggcttgtgcattgccatttggaaactcatttgccgtgggggctagccatggctttcgaggttgagaatgggcccactccttctttatcagtgcctccgcctccagctgatcttcctaggtgctaagcgcacgccatgcgttcatgactaaaaacatttatagattggttaatgtttatacacatacatactttcataatgtggatttctaatatcatttgtttgattgagaaaaataaggtgtaataaaggaggaaagtttggctattctttcaaccatgtgacttgatggccaattgtactctatcaaataacatatgttaatctgtcattaattatatttttttattttctcgtaaannnnnnnnnnnnnnnnnnnnn

SEQ ID NO: 34751 - DNA, 608 bp, Glycine max
  Clone ID: PAT_MRT3847_131382C.1
acacttttctttagtccacaaatttggaggaaccaaggttgagattattgagccacaaagattgaagttctcaacatagaaatacaagtaatcgctaattaatttgagttttacagagaaggatcttcaggttcaactcctagttgagtgaagtaaggacttcgaagggcttcttgaagcttctcatcaatatcatcattccacgaatcacgatatgtctccaagttgataaataagttcactacagctgatacacacagatctttcctccattcttgtaactttgggagtcctacattttctgcgtatttatcacaataatcaaagccttcaatttcatgggtataatgtttaggaatgccagcttcttcttttgaatgataaaactccttgatcgatttcatcatttcctcatatgatggcaaagcctttttcccagaaagcagttgagctacccattttccttgcgactcaaagaaagggagccccaggattcttctggggatgcctacaagagaaagagaaggagcaagtgctggggggaaaacgtgtgttcatacaaaggacccactctgttatcatccacaacaaccattccttttggtgtc

SEQ ID NO: 34752 - DNA, 252 bp, Glycine max
  Clone ID: PAT_MRT3847_131383C.1
gaaaaagatttttttcctaaaagagaaaaagaatggaaaaaacaaaccgggcttgttttggtaagaaaaaaaacactgtaatgtttggctgaaaatccaattttaaaatttgattctgtttgagaatgaaaatgaaaataaagcagcccccagggcttgcttgcttggcaataggcaattggctttttaaaggatccctcattcttggagggaaaaggccttggcggaggagggagttcccggacccttggg

SEQ ID NO: 34753 - DNA, 226 bp, Glycine max
  Clone ID: PAT_MRT3847_131384C.1
atttcactggttattaatatagtgaatattgattccgagactctaattatatacacggtgaatgatgcgagggcactctacgcgtggccaaaagacggcaccattaatgcagcaaccattgtcatatagagttgaaaatgcgatcagggtgcactatgaatgaacacggaaccgtctcacgggaaggactaatggcgaaactgcacagacagatgctgtggcaaaa

SEQ ID NO: 34754 - DNA, 186 bp, Glycine max
  Clone ID: PAT_MRT3847_131385C.1
tacttttctctttttttatttttattctttttgtggttttttgtttttattttaatcttttcggttttggttctttggaaacttttctgtgtcaatatttattaatgggtgttgattgaggcgcctcaaatgggagtggttcataaactacttggcttggtgcaaataggttgtggggagggaacc

SEQ ID NO: 34755 - DNA, 545 bp, Glycine max
  Clone ID: PAT_MRT3847_131386C.1
atgcattacttgcaaatttcatcaaaatttcaaccagtacaaaaaatgagagttcaattaacacccgcattctcggatacaaaaggatgggaacgaagttagcaaccctccaaagtaacattcacagaatcagactcagtgatgcatattctaatttaggagctctactctgcaaggcttgacttgacatgggccagtgcatgtttcagtccttgaatttgaagcagttacacaacctggcccagaatccacgagatgctactggtgcttgttgctcaagtggatcaacaaagtttgctacttcacctaattcctcaaatgaatccaccaggttttgaagccttgctacaaattcaataagaagcgacgtaaatgttgtgagagatagcgaactagcactttcgtaagtttttgattcttgaccctctttggctacgggatttgatttgttgtaaatatgagcaggccaagatatctgtttcctaaacatgttttgagaggcatcggttgcagtctcagcagggctatcacctaggcttacattt

SEQ ID NO: 34756 - DNA, 1121 bp, Glycine max
  Clone ID: PAT_MRT3847_131387C.1
gcgaggagagaaaccccagtaaattttttttttgtttctgagcctcccctcccctctctctaagatccccaaattgcttgtgaatgctagaaaccctagacagatttgaggctcccctcacctctctctccgaaatccccaaattgcctgtgaatgctagaaaccctaggcacgttcgatttgatgctctcccatttgcaatcaagggcgagcgcattcggttcttgcacgcaaggctggtactaccgctgcatcggcctcgatccctgaattcatcattctttctcgcaccatctttttctattccgattcgatttgttgttgttgttgttgttgttgtgtttttgtttccttccttgacgaatcatcacgatgttgatgagcaagcagaagaagagccagatccagaacgcgaagaggttgttgataagcatcaatgtgctggggagcgcggggcccattagatttgtggtaaacgaggaggagcttgtggcggcggtgatagacaccgtcctcaagtcctacgcccgtgaggggaggcttcccgtcctgggaaacaacaccaccggtttcgcgctttactgcccccatcttggatccgatgctctaagtccttgggatagaattggatcgcatggggtacgaaatttcatgctgtgcaagaagccagagggtgtggcggatgtagatggagatgcaagtgggatttcgcgcagcagcagggggattgggagctggaaggcttggttcaacaaatccctcaacctcaagatttctacccactgattcgattaatcgaataaaaaaactcttggggaattgaacatgatgccttttgtggtgaatgaatgccactattatcagtaatatgtatttctttgcttgtttctcttctcgctagcccgagaaccctctttaggaatttgttcaactttgagttttaggttttgatttttatggaataataaaattctagttttgattcctcatttccttccttgccttctctattcaattaaacttgaagagaagagaatatacttgcaatattagctcacattcaaattgtatttgtaatcaacaaaagtgtcagcgagaaactttgcttatattttatctta

SEQ ID NO: 34757 - DNA, 275 bp, Glycine max
  Clone ID: PAT_MRT3847_131388C.1
ggaagtcggctcgagcaagtaactctcgaactccattgttggagtctggtttgcaagatgacacaagggtaattgtggagtagtctggaaggatgtcttacgttgctcagaaccgtaatcagccccaagaggaagattggttagagggaaattgttgccgttgatattagatctcgctctatattggagaaagtgtcgtgcttgcagaagcacgatgtgttagtggaaaaagcttcaagtatgaggtaattggtgctgggtcacatgcggcagga

SEQ ID NO: 34758 - DNA, 371 bp, Glycine max
  Clone ID: PAT_MRT3847_131389C.1
gtgatcgatcgctagatgaaaccgagaagctactgggctgcggtacacacactcttgtctgcgaaatcggccccaaacagagggaatcctgggtgaacaggcggagggaggaagaacggaaccgccagttgggagcctaaacccaccgaatactgtgcagggaaagagagatagaaaatggggaaggcgactgaggctgacagaggaagtaaggaatatgactactcagggaggacgcaccgggagacctatttagcgccaagagcgtcactacactacgcatggggacattcgggatcctgacctggatgtaacatgtaacgacgctcagcatgatgaggactatgatcgtgataaggaagcaagagcat

SEQ ID NO: 34759 - DNA, 490 bp, Glycine max
  Clone ID: PAT_MRT3847_13138C.1
acagaaaaaagaatatatactactgcatctcatccgctttaattacaatattcccggcccaaaaatatcaaaacaaacaaaggcaaggaaaaccatcagaagaaactaatgaagcaagggatatataatctgctaaaataaaacgaactacagaagaagaagaaggaaactataatgaatggaataattaataataaatatcgtttaatttttaattacggtcgaaaaatcaaaagggacgcaaattccgaccaaggccattgacattagcaaaaagtccaaccaattctggcctgtaaggtaagaaggacttgctcttgcactgttccatatgttccgatccgttctgaggcttcgccgccactttgatcttcggaatctgaaacaccacttctttgagtactctctgttgttgtcgttgttgactattattattattatcctttccgtcactgggactcctcaaaagcaaatttcgaacacgaagctt

SEQ ID NO: 34760 - DNA, 285 bp, Glycine max
  Clone ID: PAT_MRT3847_131390C.1
gggggaaaagggttttcccgggggggcccccccccaaaaggggcccggtttaaaggcaaagaccttgcccccctaattggggggtcccccaaaatttacccctcagggggggtttccctagcccatgtccctaaaggggtttttccaacaactttttttttggaccctttttccccagcgggggccctttacccaaagcgttaggcccaaactgaatcctggggccaggggggggaaacccgggcccatttcaaccgggttttttaagggaattggcccccccct

SEQ ID NO: 34761 - DNA, 828 bp, Glycine max
  unsure (1)..(828): unsure at all n locations
  Clone ID: PAT_MRT3847_131391C.1
gcaaagttccgggtcacaatcactattccaggacagctccttaggaagggaggacttcaatgttttcgacacagaatcagctgttcaaggactatcaggaatttctgactctggctgtgctctctctcttctgtcatctcaatcccagaactcttcgggccaaacatcagggattcccattgctcacccgatggttattccaagcagccacagccattacaacatgagtcgggtttctgaaaagatgataggaataagttcacaggcttcaagtggagtgtcagataggtttccacctgaattcaatcctgtagatggaagtcatcttagtcccatattgatatcagataataatgaaatcatcaattttgaaatggcaaatgggatcttccaagggtcggatttcgtgaacgtgaaagatcgcctttcctgtgaagacagcctcaccattgacttgcttcaactatcgtcgcaacttcagcgtgtcgagaatcagaggctgtccttgcaggtgaaacaagaaaatgattcttcctgctctctgcggattacttgagatgctttcaagtttaaagaggaaccacttgtgcttgtgtgcaacatgttgtgacagactccaatgccactcatccaattccttaacaatgtagggcacaatgaggagaagcttaagatggtcattggtatcagctgctaactagtttacatggttctctcgggctaatttcgttttaagaagctgaacaatgattcggacaaaatagtccctcagtcttaaatggtatccatctggatatatantaaataataaaccaaagcctggagatg

SEQ ID NO: 34762 - DNA, 629 bp, Glycine max
  Clone ID: PAT_MRT3847_131392C.1
cggaattccgggtcgaccccgcgtccgcttgttgtctatgttgatgacatcgtcattactaatgatgactttgtagtatccgccgactcaaatcccatctgcacaaccaatttcagacaaaaaacttggggccgctcaaatatttcttaggcattgaggttgctcaatcctcttttggcattgttatttccctgtgaaagtatgctttggatatacttacggagactggcatgcttgattgttgccctagtgatgtgatccttattaggagcggatcgtttggtacaggtcacagaatcggatgtcgccacttccagagatggaagataagtcaggggtagacaccacaaaggttcaaccttgataagttcggaattggtttgataaggaacccagggagaagctctcacgaatatacaaggtattttctgaaaaatgccagaaagtccccttccttcaaaatgagttgaatacatatagtgtgccattgaattggtaaattaattgaaattggggcgggtgaaaagatgggattgaggcaccaggttgctatgattgcaattgcggatggaaaatggggggtgtgggccttggaattagatggggccttgagggggggggattgtggg

SEQ ID NO: 34763 - DNA, 256 bp, Glycine max
  Clone ID: PAT_MRT3847_131393C.1
gtaactttttgcattgtaaacccatgagttgcaaacaaagtgaatggttccatgatttggaatgtcttcaagagtgacaaaagggatcgcattttctttgctaataagacatatcttccaaatgaaactccaactccactagtgaagtacagaaaagaagaattggaaaatctaagaggagatggaaaaggagagcgcaaggaatatgataggatctatgattatgatgtctataatgatttgggtaacccagaca

SEQ ID NO: 34764 - DNA, 529 bp, Glycine max
  Clone ID: PAT_MRT3847_131394C.1
cgcgtgcgacgatcacgtacagagggttgatctagaatgatgagcggggccctatgcgcttggcacaagtggtatccgatgctatctatagagacatgcattcgctttagtaagaccttgtgcatgtctacgacctaacaactgtgattatgttgcttcaaacataggtgctaaaggtgggatctaagactgacgattgacagataggaattgggagccatgcagtacatgagatttggtgccatagagggagggcgcggtccatggtgtaattccgtgggctgctgagtggaatagggaaaaccaacatggtttctatacaactgggcggagacgctaccccaagattttaatgatcaggctgtcgccttagagagacatatctgttgacgctgcaaatgcaacgtatgaacctgttcttactcgatgacgtgtgctgtcatgtgatcaataactattgcgacttatgctgatggagtcttgacagagagggacatctgccttatcgctagaatggcagggcgagctc

SEQ ID NO: 34765 - DNA, 335 bp, Glycine max
  Clone ID: PAT_MRT3847_131395C.1
cccccggaaaaagatacttgcaaaaaggggttaccgggataaaaaacgttattggttttggtcttatgggccccgtaaacacatataggcatatagctcccatttgcagagggggttacctatatataaaatggggttaattggcacttttttcaaacctgattgaaatttgggggcaaaggattgcttggttttttttgggcctattatttgaggggagggggtggggcatttttttccaaaaaagggggctttttctttttcccaatggggagggggccctttttttaaataggaaaataaggggttttttccggggggtcaaaacttttttt

SEQ ID NO: 34766 - DNA, 349 bp, Glycine max
  Clone ID: PAT_MRT3847_131396C.1
atttttgggttttttttttttagaggccaaatgtatcccaatccccgaattaaataacgttgtgaaactcctagtgctacataataccaaaaacagctattacatcattgtaaagtgagagacatgagtgcgtatgtattgggttacgtttgctcctcagctctcagcattaaaaaaattaaaagagaccaaagaagacggtgaagcctaacacgatgagccacacaatgtgcaccagaagcaatgcctgaccagaaagagtgacggagccgtcattccccactttacagaaccccaattttgtaatttgtgcgccggcgttcgcggcttctctgattccgcaccagta

SEQ ID NO: 34767 - DNA, 257 bp, Glycine max
  Clone ID: PAT_MRT3847_131397C.1
caccacaggggcaaccgcgaacacaaaaccaaagccagagggaaggcgcaaaaagcgccgacgaaacagcaccaaaacgaccgcccgggacaggaccaggaccgggggaaacctaaacccggaaaccaaccacccaaacgggggggaccaacagaaccctaagccgacgagaaaacaagcaggcccccgacgcgacacacaatggataaagcgcatggtaagcaatcgccaccggcagggaggccgaaagaacctct

SEQ ID NO: 34768 - DNA, 775 bp, Glycine max
  unsure (1)..(775): unsure at all n locations
  Clone ID: PAT_MRT3847_131398C.1
aagtctcaccttgaatagagacaacataggagtgcacgtcaatagtcttactcatagatcaagcgggtcctggttgagttcatactgccgctgttgcaaactgaagagatggaacacttgcaacaacgagaaaatcaactgacagcattgctgcatcaggtacaactcctcaacgagcactatgcagtgttgtgcagcgatatcaagcagcagtatcaaattgaaccgagcacggatgtcctcgctttgcaaaatcaactctccactctgcgcggctttttcggcgtgcttaaggccaaagagattcccgagagtcgaagcggcaatggtctgttctccattttgccgcaggagatgatccagttgattatgctgcaactcaacaacccgcgagacctattatgtgccctgggagccacgaacagccacttcaaggcgctggtgggtgaacagagcgcgatctggtccgcactgctctgcgcgcaccattcgacgcgcaacagcacgcaccacctcttgactgcgcgcaacacaccgcgctacacctacttgtggctgcactactcgcccactgcgcggccgttggagagtcaagccgcgcgccagtttggcacgttcagttggttcgaacagcaacacgccgtcgtctatcaaggagaaagaaaaaacggcaagcccgatggctgnggaaaattcacctttccgaacggcagcacgtacacgggtcagtggcgcgagggagacgcaaacgattcggtgtccgcgtgtggagtga

SEQ ID NO: 34769 - DNA, 432 bp, Glycine max
  Clone ID: PAT_MRT3847_131399C.1
tcgttgacgcgtgggcaaattctggactaaacacgagaaaaatcttgctctgccagcggaggcaaagatggaagtgattccatatagaggcatttcggttgctgccctattgtggtgggctcctgaatttgaaatacaagtgacccctgaaagcctcaagggttcacatcctgctgatgagaagaagtgttctactcaattggggaccaaattggaatagttgtgcctacatgtccacagggagtaggtgatcttaaacttcttactgacgggaagctgtatgcagtaccgcatattcctgtatctaatattagtgcagggtgaaatcatgtttttcagatacccttaatggcgcacgaggaaatttgcagttgatctcgcgccttacaatattgaatcatggaaattggctgcagcaaaagcatatgaatt

SEQ ID NO: 34770 - DNA, 391 bp, Glycine max
  unsure (1)..(391): unsure at all n locations
  Clone ID: PAT_MRT3847_13139C.1
aaatctgcactcactncnanaancaanctacntgctacncngctnccnnacntctccnnatactncctnacacnnnacancntncncntnnaannttnaccccnnngtcnatcnctncnncntancnctannaanataccnacnactganncngnntnngngnnnnnananctcancacnccnatancnnacgccnacanntnncnctgnngnnnngcanctnanncaaccngancnacttaancncattnacaccngacaccnaatnactnagnnctnntgngcactnaacntnnagcatcgacnctcaccnncnnnctccatcntgcgaccnanncnnnccnanggtcgnnacgnctnnngccnacaacgcnnntgcacgtncaacacn

SEQ ID NO: 34771 - DNA, 254 bp, Glycine max
  Clone ID: PAT_MRT3847_1313C.1
tgcaagttgccttacagcgggtttacatcacatgagttggctgtcttattaaaaaagaaatttgtaaatttgacaagtttaaattttgactactgtcaatatttaacacacataccagatgtattttgtctcccacatttggaaaatttgtcatttcaatggtgtcaaaatttatctgcaattcactattcagttgggttcttggaaaaacttaaaatcttagacggagaaggttgctccagacttaagagttt

SEQ ID NO: 34772 - DNA, 322 bp, Glycine max
  Clone ID: PAT_MRT3847_131400C.1
gggaaaaaaaaaaagcggccccacaaatggaaaacaaacaggggaaccattaaggggacaaaagggtccaacacaaaccaaactaattttaaagggggattacggccccattaaaaataaaattttttttaaaaaggtgggggaaaatccaaaagggaacattacacaaaaataggccccgggtaaaaacccccctcgggggcccaacaccaagggcagaggggacccctttggggtgctggagggggggggggcccttccccccagaaggggtgggccagcaaaaaaaaccccctgggggggccggggggattccttgttg

SEQ ID NO: 34773 - DNA, 728 bp, Glycine max
  Clone ID: PAT_MRT3847_131401C.1
gtccttggtcatatgtagcaggaaatgggtatggaagtcattcatttgatggagttgcatatgttccaactagtgccccctatttcaatgggaatggggtcacaggataccattctggacatggatatgagtacgttccaaacgtttcatttcagtggggctctgctggagttgtcaaccaaaatggatcagctaccttacctgctgattctgttcatcaggccaatggaaatgtgaagaggggaagaccaaaagtcaagtcaggagctgataagagacatcacatggtagagactatggtcaatacaaattcagacgtaccattctcctgtagtgaaccacaggaagataaactaagtagacctgacaagaaacagaaagttgttgtgggagccagtttcagaaatggctatgatgaaaagggttcaaaacgtgcttcagagtcgatagtggctaacggaaatgatagcatgggacatggccaaaagccttcctgcacagtcgaagttcaaaccaaacagtgttccatggcaccggcctttgacgcaagaaaattgttgattgagaaagccaggaaagaaatcaggaagaaactggaggagatgaggttgtcgtctgaagcagcagcaacagcagctgcagctctgaatgagaaagaaaaatcacaagctgaagttggtcaagtaaaaagagagacatgtagaaaagcagctccgattgtttctggt

SEQ ID NO: 34774 - DNA, 569 bp, Glycine max
  Clone ID: PAT_MRT3847_131402C.1
ggtcccggtggtttttttttttttttttttttttttttttttttttttttttttttttttttttttttttttttttttttttaaaaagggggggggccacaacaaacaaaaaagggggaaaaaaaaaaacccccaaaaaaaaccccccggaaaagggggggggaaaaacaccccctcctgaaacaaaaaagggggaagggccaaaaaaaaaattagccaaaacaaaggctcaaaggggaaaaaccccctttttgttttaaaaagggcgggcaacacccccccaaaaggaagggccgggccccccaggactaaaagcaggaccagcctctgtttttaaaggacgggaaaccccgggggcaaaacccgggggaaaaaaaaccccccccctttggggggggcaaggacccggggacccccacaggggaacaagggctaacagggggaaggggcccccccaaaaacaaaagaaagcctgggggctttgtcaaaaaaaacctggaggccaaaaaaaccagggtttcccaacaaccaacacaagaaaagggggggggtataaaaaaacccggcca

SEQ ID NO: 34775 - DNA, 338 bp, Glycine max
  Clone ID: PAT_MRT3847_131403C.1
cgggaaagaaatggaaaaacttcaagaagttgtgacaaaacaaaactggggaactcactctgagggcatgtcatcaaccactcctatctatggcttggcacaatgcttccaagacctttccagcattgattgccttcagtgctttgcatccagccgcaccaagctccctcgctgcctcccttcggtttcggctcgaatttaccttgatggctgcttccttcgctatgacaactacagtttctacactgaggacactgaccctttgagggacacagtgaactgcacctcacagtatggtgctgtggttggtatgtgtgagaagttggtgtttgctgaga

SEQ ID NO: 34776 - DNA, 339 bp, Glycine max
  Clone ID: PAT_MRT3847_131404C.1
accacacgtacgtaaaagagtattggattttatttgcatatatatatatattggtgcacggacattagatgtatatatatatatgcataaataatcataaaagacatgtaagttttgagcttgacgcgttacatatataactatgtctttaattattgctaatgttcatacatcgtatgatattattgacaaagagatgggtggattgaatgatatcatccaaaacatgggtgatgcgatatcatatatatgaaccattgaccccagttgggcatacgttgctgatgattatgaaaagatgcatatccttaaggacttgttagctaaccaaaaacatgc

SEQ ID NO: 34777 - DNA, 363 bp, Glycine max
  Clone ID: PAT_MRT3847_131405C.1
gagttttttttttattttcttgtttatcttgtgtggattctgagtactttcttgggttttgtcctgacacaagtaacctaaccaaagcaacgctcacatctttaagaattaagtatttctttatctcgcctccctagtcctgtttagagttatatgtactttgtcctcctttttctgtctgtaagtgcatgaactaaaattgcgatatctcatttttcttgatgacacatgctacagaaattggttctactcctgtaattttgtagcttgccatgtagcaatttcatatttttgtttttatggggggcttcctatagaaaatttccttgtgatttcatgcctcatgctttgttgatcatggaa

SEQ ID NO: 34778 - DNA, 590 bp, Glycine max
  Clone ID: PAT_MRT3847_131406C.1
gcccccttccttagcctcggatttcggttcgggaaaggagggagcaaaaattgggaagtagcatcatggggtcagaaagagagtgtcaacttcctctacctgttgttgatttctgtgatgaaaacctcaaacctggtactgacacatgggtttccgcttgtgatgttgtgaggggtgcattagaggatcatggtggatttctagcactctacaacaaggttgatccactgctctatgactctgtcttctctgcaatggaacaactctttgatcttccattagaaaccaaaatgcaacacaccactgataaacctatctatagctatgcagggcaacgccctgatattcctttgtatgaatccatggccatcgccaatccgttgaatgataaagattgtcacgagtacacaaatattatgtggccacaagggaatgaccaattcagtgaaagtgtgaattcctatgcaaagaaagtggtggaactggattatcttgttaagagaatggtgtttgagagctatgaattggacaataagaaatttgagtctttgcttgaatcaaccgattatattcttagatgctacaaatac

SEQ ID NO: 34779 - DNA, 365 bp, Glycine max
  Clone ID: PAT_MRT3847_131407C.1
tttttgaggaacaacgagtgcacgagacttgtttccagatactctttacacgcgacaggttccatagctcgtgactgcctacccactccaccttgggcaacaccctgtacggcttcctatccagcgaaataatgcattgcctggactcgatcatcccaatggccctccaatttttagttcctcgttttggagtctgattatccgatgaaatcctctacgggccaactccactgggatccccctgtttacatgctgcaaacccagatccatggtcaaaatgcacactgcggcgtcctggatcatatcgatctgcaccaccccgtggatgcccagattccctattgtgtgttctgcaggagtcaaat

SEQ ID NO: 34780 - DNA, 525 bp, Glycine max
  Clone ID: PAT_MRT3847_131408C.1
atcagaatgaggataacatgagttcataaggtgagcttcaggatcagaatgatgataatctgagctcagggagcgaacttcaggatcagggtgaggataatgtcaactcgggtgatgagcttcaggatcaggtgaaggatggaggtctgagtgatcagtctgatttgaaagatgatgatgattctatttctaggtcccccgagaaccagtcccagcacaattctgatgttagtggtgataatgagttcaaccaaatgagtgtggattcagaaaagaatattcttttatcaaaatcaacaaataatacttcgtcgggtagtggtgatcatgaattcaaccaaatgagtgtggattcagaaaagaatcttttatcaaaatcaaataatacttcatcgaataaagatgagtattcagtgcatatgaacactcaggatgtttctattgatgaaggagcacctttcacttccagtggtgatgtctggcaaggagttgaaatgccacattcatactatgattctgctgtga

SEQ ID NO: 34781 - DNA, 1055 bp, Glycine max
  unsure (1)..(1055): unsure at all n locations
  Clone ID: PAT_MRT3847_131409C.1
tttcaaacattaagcatggtgtaatgttctcatcatctggagattcttacattatcactggctcaattttcacaattttcttactgggcattcgtgcatgcagtttcctttcaaacagttatatcttggaggaagggaaagtagcaaattttcttttgagcacatctggaattgtgacattacgccaatcagttatccaggggaagcttttaaaagaaagcattgggttccttattttgagcactttgtgccgatttgcaattgaagttgggctgtccaagcaggctgccacatctgctttcatgaaagactatacctcatggatcatcaacatagcctcaggtttacctgtatgggactatgcagctgaagttataccaatggtagttctgattctgctggcagcttggctttacaaggccaccagtggcagcttgtttgattggccatggaagtatgtcatactgggcactatcttgagttatatgctaataattgtgcattggatcacagacagtgatagatttggtggcacattgatgtctcaaaacattggaagaacttatatacctagaatcatttatgctattgctttgggacagttgttattattgacatttggccaattatttaagaatagcagtttagattgcaagacaattttagttgcaaaaacaatggccatattatctgcgtggagttcaactgtcattcttctttcaggaaaacaggttcccatggttccttttgcattaatagtcggaggttatgttattatggagttgcattttattttcacacaattatctcaaaggtatacccattatgggcatcataacgagccattacgattgctttcccaatattatgtgtcacaatgcaaaggcggcccctgatggtttggggcttatttgttccaaagaaggttttccgaggtgttcaagtactgagttgctanacgagcacgtacttgatgctggtgtggccctcagatttatctattttgattcaagggcaaagatggccaagaattgtatcaggaaaacagcaagaag

SEQ ID NO: 34782 - DNA, 245 bp, Glycine max
  Clone ID: PAT_MRT3847_13140C.1
aaccccgggctcgaccatctcactagttttcggccggccgttttttttttttgtagcagcccgttcataccgacagacttgattagggggagactaagtttttacccttttttttgaacactacctatcttctaagaatattggttgtgttcaaattacatgggtttaacatttgctcctccttagaaagacacttggtttatgagggggggccacaaaaaaaaaaaaccgggggccgaattcct

SEQ ID NO: 34783 - DNA, 1075 bp, Glycine max
  Clone ID: PAT_MRT3847_131410C.1
cccacgcgtccgcccacgcgtccgaaaaaatgtcttctgccctttcgccaacacatagacaacaatatttattgtatatatatattaataatcttttggaactttatatttaatagagccgatttctcttaccaaagaaaacaaataaaacccttttcttcttcgtcctcatctctatatcagaaaaagcgtacacaccacatttcttatgctgtatgaaactgattatacaatgacagaaattgaaattcctcagttttttctttgtcctatttcacttcagatcatgaaggaccctgtgacaaccgttacggggataacatacgacagagaaagcatcgagaaatggttgctaaaagcgaaagattgcacttgtccaatcacaaagcaaccattgccacgaagcacagagttcttaaccccaaaccacacacttcggaggctaatcaagcgtggtgctctgcaaatgaagccaatggcgtagaccaaattccaaccccgaaatcccctcttagcaattccaacgctgagaagctcgtcaaggatctcgaagtttcttctcgttttcaaaaggcgttggagaaattgcacgctcttgcaatagagaacgaaaggaacagaaggtgcatggcttctgcgggtgtagcagaagctatggtgcacgtgatcacaaagagtttcaagcaaggtaacaaaacgacgccgtgcgttgaagaagctcttagaattcttcgtttgctttggagcagtgccaatatggtcgacagcaacaacaacaacaacaacaaaattaagcgcatggtgggtgagaactttgactttctcaactctttgacttgggctttgcagcttcaaaccaagaacaacgtcaaattaacaaacgaagcaatgccaatattgaaactggtaattgaagccaaagactcaacccctttagggaacttgaagcttgaattcttcaaagttgttgtgagtgtgatgaaaaatagagaactctctcagcaagctgttaaatccgcgttgcatgttcttatagaaacgtgtcctttggggagaaacagaatgaagatagttg

SEQ ID NO: 34784 - DNA, 467 bp, Glycine max
  Clone ID: PAT_MRT3847_131411C.1
gccggcaatttgccgtgctacatgtgtggagtgccgcctgcttgggggggggggggggggggggggggggggggggggggggctactacaagaggcagagaggagagagctgccctagacgaagggcaaccaagaattaggtttaagcagagtgaaaagtgacaggatacgaggagccagatccaacatatgaaaaggatctgcaattagtgggaacggagggaatggggtaatgttaaatataccgtagctattgataccggtacgcctgggtggtacttagctaggggtaatggtagttaaagagccccttacaagaggttgatagcgcctcgcagaccacggtacttaagggagtgttgtcccatggaaaacccgtaccgtaagtaatggtcgtgcagagccgctttagcgaagcgcggtaaaacagaacggattgggagtattaaaaggcaaacggcgagtac

SEQ ID NO: 34785 - DNA, 210 bp, Glycine max
  Clone ID: PAT_MRT3847_131412C.1
tcaaatctaaaacatagcaggtgttgtttctactacggttactatgccatagtgaatgatagaagatggtagtgttgcgctctcctgtgtggatgaggttatactaagctcaaccagctctttgtgggtgcagaagctatgcttgttattgcggccttattgctggtgtgaaggaataactgagaaatgaatcctcagacaattattcct

SEQ ID NO: 34786 - DNA, 478 bp, Glycine max
  Clone ID: PAT_MRT3847_131413C.1
gtcacattaaggttatgcaagcagctgctaaacttggtatttcaatcacgattagtcaagtgggcagtgatatgctgtctactggcaccccttctgctttgccaacaattaataagaatcaagagtggcaacctgcaatgtctctcaatgaagatggattacttcatcagttacattctactcttgtgcaggccatagattcttccaaatcagtctccacagcagattctctagttcctgttatgcaggattgtgtggatgctatcactgaacaccaaaggcttcaaccattggttaaaggagagtggttaaaggtttgctacctcaaagcagtgtccgtgctgattacaacgtccaaaggatctgagagcttgcagaacgaacatgcttgaagaattatgagtacctgggaagtgaacatccaaaatggatgttacatgaggatgccatgtcatatgctggagctcaatctggcaaa

SEQ ID NO: 34787 - DNA, 296 bp, Glycine max
  unsure (1)..(296): unsure at all n locations
  Clone ID: PAT_MRT3847_131414C.1
ngtgaggagtngtggattcgtcgagncgaagtntaggctgtgtgggagcacanacattcgngnctntaaaagattctngagnttcgtgaaancannaaaggctngcataagggncgaccnanttaagangnanntngaagcngttaaccaagcaagntttctttatgnntagangcngagtcattcanaacgaaattatttatatncggnatggttaacanggnatctctatnattcccatatatgagaacttggntatggggtggaggaattaatgaaacnttatatgtgatggg

SEQ ID NO: 34788 - DNA, 507 bp, Glycine max
  Clone ID: PAT_MRT3847_131415C.1
aacctttgggctgatttatgtgcttgcatggtcgtgagaggcttggaaactttgggctgagcgagccccttgactgagacaatcagaaatagcgcgacgaaaacgaaggcttccgcccctcctgccgtcataaccccggcagtacggtaacgttacgtgcatgacacgcctttctcttgaacgaatatcggtcacggcgtttgcatcttggaggcgaaacgtgtaagccggaggtccgtcgcggaagtatataatactcccggtcccgagattaccttcgaagagcgtgccgaagtaataaaggaacatacttacggtgaataacacagactagatcttaaaatagccaattaataagtccatccccacgttagagattctgaagcttactttaaggatatacccgcgcctagcacagacggtattgcatctctcaacaccttacatcataaaaaatacggacacggggcggagaaacccaatctgattccgcacgacgaacgggcc

SEQ ID NO: 34789 - DNA, 145 bp, Glycine max
  Clone ID: PAT_MRT3847_131416C.1
gtctggctgcgggggaaactgtgggtggggaagcacctgcaaatgcgggaacgggtggggaggctgcaagatggacacagactggaactacacagaataaaccaacaccgagacctagggcatgagaatgacacctgttaaagca

SEQ ID NO: 34790 - DNA, 417 bp, Glycine max
  Clone ID: PAT_MRT3847_131417C.1
cccacgcgtccgcccacgcgtccgtacggctgcgagaagacgacagaaggggaacgtcgaatggggtatgagagtggattggttggttggttgattaatgattatagtgttatatataccgtcccttgttttctgagtttccgtgcagcaaaaaaaagtgtgaagtgcagagggatcattgacctgctgcgacgaacacgacgtcgtttttgtttccctctgtgagtgatgggattcttcaaaagggtagctggatttcttgggtttggaaaccacaaacacgattccaaggatgagaccgacgacggtcaacctcgagtgagagaaaccgtcgtcgatcgcccccacctcgctcccgttctcactccctctactttcggcgacggcggaattcatggtctggattggtatgtaaat

SEQ ID NO: 34791 - DNA, 455 bp, Glycine max
  Clone ID: PAT_MRT3847_131418C.1
aatacccgtcccgaccgcactcgtccgcccacgcgttcgcacataattatcattattttacttgaacaaagttttagtgtatggtttggtccttatagaaacagaacatatcctgttctttctttctctgtttgcatttttgttcacttctttctttctttctttctttcttattatctagttaatcatgacaacatttatggacatgtacaacactactagtagcatcatgacaccggatttcttataccattgtattgatcaacatctgattaaatcacttgatccttttatgaaaagtgattcatctatcactacttcctcatcaataacatcatacccttcattctcttctttctcttcttcttccaactttttcttaacaacatttatcacctaattttgctcctcattctaccaccaaaatggttcaacttcatctcattctattttct

SEQ ID NO: 34792 - DNA, 461 bp, Glycine max
  Clone ID: PAT_MRT3847_131419C.1
acgagaaatgattttattctcttttctattccatttctctttcaatgagagccacacttgtttcagacgtacaaggaacaatgggatgaaaaacaaaacaagacaaaattatatttctctttgttatgtttttatgggatcaccaatgtgctaattcacatgccattgtttctctttatgctacttctgagcttttcaagctatattattttttttggtgttgcattttagaaattgtcttctcctattactaaacacttgattgcaggttatttgtactctatcagtgcttcaaccgtcagccctcggtgggaaaaagtaccctttctctcactctctcatgtctgcatgtgttaatgtttattagttgaaatgattatataagaacctgtagaagcagcataaaaacagttaggaaatgaacttcaaaatatgtagcacttcaaaatgtcccgaaatga

SEQ ID NO: 34793 - DNA, 284 bp, Glycine max
  unsure (1)..(284): unsure at all n locations
  Clone ID: PAT_MRT3847_13141C.1
aggggaaggactctctatggtttcagaggctgacggtttcacctatatatttcgctttcgttagtccaaataataaggagtttgtattttgtagtgagggtagatgtactacnattatcatctgctctgtacatgctcaaagatcatactgcaacnncttttttaattctactagtaattgcatcctaattgttttgaattgaagtaaatttacttttataaggtagcttacctggtggtggctttggaagaagctttccccgtggttgattttgaaggggctt

SEQ ID NO: 34794 - DNA, 213 bp, Glycine max
  Clone ID: PAT_MRT3847_131420C.1
ggtttgaccttttctttttttttttttgtattattttttattattttttttttttttttttttttttttttagaattttgaggggggggtagggttgaatattgggagccaaggaacgagtcagcgagagcattaaaaatagagaaagtgggactagagagagcagaattataaaagtcggcgacactgagaaaccatagacgtatactaaaa

SEQ ID NO: 34795 - DNA, 122 bp, Glycine max
  Clone ID: PAT_MRT3847_131421C.1
caataatggaagtgatgcatgaccctctcgttgattatgctctgcctatttaaaaatctccacacctctattaacattcggattgatgtgtgaagtgtgagctattttatgataaagacaag

SEQ ID NO: 34796 - DNA, 192 bp, Glycine max
  Clone ID: PAT_MRT3847_131422C.1
ttgtgagggctgctgcgcctgctgctgccgccgcgccggaattgccgggacccaccccgcctccgtctcttggagagtaggattgagatgtttacaggaggcaatatcttacagcgtgtgcaagtcacgtgcgggctcgagcatctctgcaggctgatgcgtgtccatagcatgtatgctgcggtgcatgag

SEQ ID NO: 34797 - DNA, 416 bp, Glycine max
  Clone ID: PAT_MRT3847_131423C.1
gctactaggtctcgggcgccctcctttttttttttttatttttttggcgacaaaagcacagaatttaaccaaggggcggggacaagatcaattaagaacttatcctgaatgctgctttaatttcaaaataaaaaaaatgttttctcaggagtaagaaatgcaacaatttttgaattgcattactgatgagcctcattcaataatgctataaccgatacttcgtatataacactattcataaattattggtcaccaatatcatcaatggctacttttcaaatgcaacaagttcctcacctacctcatgaatcaggatcaccatgggacagttcttagcgagcacgcccactgacagcaacgtgtgaccccatgcaagttatagtcattcccaaaagatattgtatgcaccccaattg

SEQ ID NO: 34798 - DNA, 248 bp, Glycine max
  Clone ID: PAT_MRT3847_131424C.1
gctactggccccttggaatgaacgccgacagttactttttctatgtacggtgtataacctggggaaacaggtctacttatttaataagagttttagtgtgaaatttcaatcaaacattgttagtagtgctagcatggaagcaaacaagattgatgcttattttaattgacttaacagtggagacacggattggatacctactgacctgcacgaaagtttgaggaacaactgaatgatgtattgccctt

SEQ ID NO: 34799 - DNA, 428 bp, Glycine max
  Clone ID: PAT_MRT3847_131425C.1
tttatttcttttattatttttattctttttattttttttttttttttttttttttttttttttttttttttttttttttaaacccaacaagaaaacatacacggggcgaaaggaaagcccaaaaaacccaaaaaaaaaacccccccaacagggcaaaaattattcttttatccaaaaaacccgaaaacccaaagcaaaaaacaggattctgcaaatggcccaaaaagccgaaaaaaaaggacaaaacccccaaaaccacatggccaacccccgggaacccaatttgccacccctgggggacaaaccaggagatcttgatctaaacccagggggggaacccaaggacccccactggccaaaaacagccccaaacatgaacaaaaacccccttttcaaaaaaggaaaacccacccccccggggacccggg

SEQ ID NO: 34800 - DNA, 288 bp, Glycine max
  Clone ID: PAT_MRT3847_131426C.1
cttctcactccttttttattaatcaccatcaccacctctgcgacgcgatttaaaataattttgatccttcacatccacttaggaacaattctttaaccaaatccattctatgttctgcccaatttttttctaccatcacttcatatattctacatttaattactctccaaactcacatctataacattatctcttttacttatactacatccaatcttcattcttacacatttacccactctcatttcttatgttcctatatccttttaccatttacaattttcatac

SEQ ID NO: 34801 - DNA, 1923 bp, Glycine max
  Clone ID: PAT_MRT3847_131427C.1
cgagtttttttttttagttcctgatttatggtgtcattttttgacccgtgttatactctgcggatgccatgtttgttgatgcatctgtttgtccatgtcttttgggttgtcatgatctgcagtcttacttgacagtgtgttattggatttttcaaaaatcggaatgtctccttaatttgaaattataactgcttttaatgcagttctgatctgacgattgaaaacaccgaagcctgaattttataattaaattcatttattccgaattctcttggtaaatgctgttgaggttcgcgatggttttagagatggaattgtagattatgatagttgaatatttggttgttttagttgcttttttgttggtcggtgttgtttatatgaaatttcttcgatttgttttcattctacgatggtgtatttccccccatgcagtatcatggaattgttggatcgttttttcaggcatggctaacaaatgaccgttttaatcgtcagagaggtcttttcgcttatgatcccgtagcataatctctattaatgatttgaagaataattttcgagaagtttgaagtagcgtatgaatcatgtataagcatgttctgactaccttttttttgaagtgtagttgtcaaaatggttttaaatgtttatgtgcaatttctatagctttatttgttattagagtaaattctcctttttttcttctgtatattgtttaatatataatttagcgccaataaagtaaattgttacatatataatttagtacctgttaaattgtacaataaataacatttttttagaaatgttatattatattattcctctaagattttgaaaaatggtttaaattaaaataaaatggaggctatgtgaaaaaaaataagcagtaatttttttctttaaatctctttaccacgcgtccggtttcaaataatatttggaaagttcgtgaagaagtgtttctcatacctcttttcacttctatcatgtctctttcttctttcatgatttctcctgtctctcctttccctcctttctattataactcttttatcctctaacttcgggccaaactcatccgtaatttttttgtaaagaaatgcattaagtttgtagtaatagggggcggggtgtactccttccacttatttgaatgagttgattgtaaattcattttttctagaaaatccaactttgtataaaatccattttattacaccttttgttatagataaaggaaaacactcgagaaaaatgaagagtttgggagatgaagaatctaattgggctatgacattgctatatagagtcttaatctttatgcgaatttcgtttgcctctatttctgtttttaattcccataaacacgatgagacctagttttggccggtaggtaagagatgctcatattcaattatccatagcaatgataacattatcgtatctgcagcagtgtttattaaagacaacaatccactctttctatgaccaatagtatgtggcatatctgcccttgtttcaggccgcagttaatcattatgcacatgaagagaaatgatctacctagcttgattgaatttccatatcatacacaattcgtatagtagtctatagctctatgaaagttttagtactaaaaaaattatttatttactatctccatttctttttaattgtcatttaaagcttttttttacaacaattaataaataaaataaaatatattgattctcatagttataaaattttttattttacctttttctatttatactcgacaataaatatatatcaattgtttttttaccttcacaatagatttgtaaattaattaaaaattaaataaaaagatctattattttgtactttgataacggcgtacaagtaagaataataatttcaaaaaaatggtcactg

SEQ ID NO: 34802 - DNA, 320 bp, Glycine max
  Clone ID: PAT_MRT3847_131428C.1
acgctgatcttctcatacttcataatggtcaaattgtgtatctgaatttatctatcagtgtccgtcttagattatacgagcttgcaaaaataatcatagatccacaatcttgatgcataactaacaactctatattcttcttctcaattgtcattattactatatttcattctccatataatttaagaacgactaacttttcaactcaaatccatgtttcactcctcaaacacaaaattgatttactaaacactcgcctaacacctgcatttcataaacaaacattatactaagacaacataaataaaattgttgaattt

SEQ ID NO: 34803 - DNA, 1368 bp, Glycine max
  Clone ID: PAT_MRT3847_131429C.1
cacgaggccgccgcatccccggcggccgcttccagctcctctgcaacgccagtggagctgtcctcatagaagccacatgttcaagtcaattcagtttcaaatattttcgcgatttcgctcccgtccacgctgtccccaaaatcaactacgatgatgtccccattgaggatgtccccttgctggtggcgcaggtcacgaggttccccaacggcttcatcacgctcggtctctccctctgtcgcgctctcctcgatggaaattcggctagcagcttcgttaactcgtgggccaagcttgctaaaggagagaacttagattccagcttgattcctttgcttgatcgaaccaagttagattcatttaaactcaataaaccaccacgttttgaacaccctgagtgtttgccaccaccccttttgacacaacagcatacccagatggaaggacaacttggttcgaccatattggaactcacagagggtcaagttgagaaactgaagaagatagctagtgacttctgaagtgggtatggtattaataacggtcatggttccgtacgaccttatactagttgtgaggttataactggtcacttgtggaggtgtgtttgcaacgtgcgttacgcgggtggtgatttgggtcaaccaacgaggttgaccactttggttaactgtagaaaccgtttaaggccttctctccccacggcttattttgggaatgcaacgtttcccacggtgacaccaacttgttcctttgatgagatcatgcacaagcctctgagctatgctgtggggaaagtgagggaagcgattgggaagatgagtgatgagtatgtgaggtctgcgcttgattacatagcaagtgtggaggacttcgatttgttcagggacacgttttatggttctggtgatgggaaagggaagtttaagggagatcctaatttgtatatggttggttggacgaattttaagtattttgagacggattttgggtgggggaaaccggtttctttgattcccgggaacattaattctaatggcaaggcttttcttttgggagaatgcaagtggtgatggcttcattgtacctgtttgtttgctggaatcgcatgtagatgctctgaggaagttgttttatgaggatatggaggatgctagttccaaattgtgattgatgatgaatcttgcatccatatgaggcttcaatgtgattctgggattttgtgtgactaggatttcagattatcatggacatgaagctaagatgtatgactggtctctcagttttatccttttgatttttctctgttgtttataattgatttgcaattagcaagttcttgatcaaaaccgtgataaattagcagta

SEQ ID NO: 34804 - DNA, 2089 bp, Glycine max
  Clone ID: PAT_MRT3847_13142C.1
ggctcgagaggataatgaaatttatacagattatttatcattagggtagctccgctgaatttagttggtaaacgtgtaaattatttgttttgccgtacaaatggcacactcttacacaaaatataaatgaatatgccagagtgaggttaccttttaactatcttcgatcgagacagtccaacgttaaaaaagctacataacctaccccatcttttaaaaattacataaatgtttattttctgtttttattattttttattttcagaaaacaaattttatttttaaaattttaagatttaaaaaatatgtattgaaaacaaaaaaaaatcttaaaatactactgcatttttacttattcaaacaattcaatccaaacaccaccttattttgtcattggtggaagacagtggtcagacacactttgataagctaaatcaataataacgatatcaacatcaaatcaaacatttacataacattatattaccataaaaaatgaaatcgagccgctcgagccggaaatttaatctgttctggatcttgccatggctctttccatttttcaatttcttctgttctcaatcagcctctgcttcctcgcttcttcttttcaagatcttcttcttctctccgttaatgcgcaatcacacaatctcactcaaccttcagttacgccaatcaactacgatctctaccattccagtgacaatttgatggaggagatcagggccttggtccatcgtcacccggataaactcactacggagacaattaaagctggaaataaaggctatggtgcggaggttacagtggttacttattgcaaggaaaagaaaggcaatgatgagaggtcgaagcttagaattcttcttatgattccttgtcttccagagttttgggcagcatggaagagagctgattaccacagaacttgctttaaggattttgtctatcttaagtgaagaaaaaattctacccatcatggatcaagcttccttaaacagtgcacttgacaagcttgtaatttatgtagttccatttgaaaacttgaatgttgccaaagtttttgaggtttaacactttagtaatatgtcaaatggtagaggagttgatctcaaccgaaattggagtgtagattttggaaaaaaggagaaggattatgatccatatgaggagaatcctggaattgctccattcagtgagcctgaaagtcaaattatgcggaaacttgccatatcttttgaaccacatctatgggtcaatgtgcattctggaatggaggctctttttatgccttacgatcataaaaattcaacaccagatggattgcctatgcaacggatgagatcattgcttgaagaagtaaaccaacttcattgccaagagcgctgcatgattgggtctggaggcggttctgtaggatattttgcacacgggacagcaactgatttcatgtatgacattgtgggggtacccatggctttcacctttgagatatatggagatggaacagcctcatcaagagattgcttcaaaatgttcaatcccatcgaccttgccacctacaatagagttctcagtgactggtcggcaacattctttacaattttcaaattggtgccgcagaagcttggtgattcaaaagcgtctattttgaagctagataagttagtatcgatagatgagtatctagatgggtatttgatggaaagaagaaatagatatggaaagaagatggaggtgcttgagcttggaatgcaagaaataagaacatattttaggctctttttattatcttcagtgttattactgttcatgttctgttctagaatttcaaaaagtaagtgtagaccaattgtttcagctatacccctctaaaattatgtcgtaggttaaactgtatatccaattttgagggaaaaaattgtaagttaaattgctgtctgtattactaagtaacgcgagcctttttttctgaggccatacaatctaattctttaaaagtgcccaattcaaggactgggggctgtgttgtaaacgaatgtataaaggtgtttgttatactgaacgtcaatccttctctcaaaaa

SEQ ID NO: 34805 - DNA, 173 bp, Glycine max
  Clone ID: PAT_MRT3847_131430C.1
ctcacgactccgtgtttatcaatcatacatcactattgtttcatcacaggctaaaacgatggagaccctggacgtttatgaagggcactgcgactaccagatcggctacaaaatctggtaagtcaagtgcgtccagcacggtatagatcacaactgggtagtccagaaaatac

SEQ ID NO: 34806 - DNA, 187 bp, Glycine max
  Clone ID: PAT_MRT3847_131431C.1
cgttgattcaattcaattgtggtcctgccggtgccttatctgactcgacgatgtcatcaacgtgtgcaggcgaatccaggaggtacatcactataccaagaggacgtcataatttgactacgcaaaacaagcctgagatttacgaagccattgcgctatgttatactgattgctcatagtctattga

SEQ ID NO: 34807 - DNA, 248 bp, Glycine max
  Clone ID: PAT_MRT3847_131432C.1
ggagagtgagtatggctggcaaaggccagggtcctgctatcggaaacgatttgggaacgacgtactcttgcgttggggtgtggcaacacgatcgtgttgaaatcatcggcatcgatcaggtgaacaaaactacgctattctacgagggtaatagggacacagaactgctggtcatggatgacggcaacataccactttatttgaagccaaccaacaccgggtctgatgcttagcctacgattggaaga

SEQ ID NO: 34808 - DNA, 1877 bp, Glycine max
  Clone ID: PAT_MRT3847_131433C.1
acttctcccgaaggttcttatcagtttaattggatcttaacaaagccatttcatattcatttgactatctcagttatcatttttggtagttaagttagagttcctttatgcgtatgttcgttatgtgttcccaaaagcctgtgagcttggctcttatttatatttgctcttcaagttataagttttctttgggattctaacatcgtacggctcgagaggctcgattggaaatgagaaaatagacggaagtgagagaggaggcactgagcatccaacaatggccttgttctctgctaccgcaaccgttcttcctcggaacctcgcattcgcttcctccaccaaactctccctctctcactctcacactcttctaccgcgcttcctttctttcccaactcccaagtcatcaaaccctcgcaaccgcgtcgcagtctctctccaaaccccacgcgctcaatccgccgcgtccgcttctccctccgcctccttccacggcctctgctacgtcgtcggcgacaatatcgacaccgaccagatcattcccgccgagtacctcaccctcgtcccttccaagcccgacgagtacgagaagctcggctcctacgccctcatcggcctccccgccacctacgccacgcgtttcatcgaacccggcgagatcaaaaccaagtacgccatcgtcatcggcggtgccaacttcggttgcggctcctcccgcgagcacgcccccgtcgcgctgggcgcctccggcgccgccgcagtggtcgcggagtcgtacgctaggatcttctttcggaactccgtggccaccggcgaggtgtatccgctagagtcggagggacgcctctgcgaggagtgcaccaccggcgatgtggtgacgattgagctcggagagagccgcttgatcaatcacaccaccggaaaggagtatcgcttgaaaccgatcggcgacgcgggtccagtgatcgaggccggtggcatctttgcctatgccaggaaaaccggcatgattccctctcgttgagatgttggcatggaagtatatacttggggaagctggaacgtttcgtggaactgtgttactttctcaattcagattttatctcgtaatatgcaattttaacatttgataggcaattccacagatagactactgcattgcctttcttaggtgaaagttatttggttgaaaattattacagtaatttagctttagacttgcttatttgtatttaggaaaaatgatattttccttgatatcagagtttggatgaatgtagcatcagcaggatatttagtaaattctggtttgtaatcttttgcattgcaaaggctgatttgagagacttgtttttaaataatataaaataaaacgggcggattagatccttcttatgtgtgataccgcgtacttgccgcgagactagttctctctctctccctcgtgccgagactagttctctctctctctgtttccccaatttaatttttctccaaggctataattttatgtcagagtcccccttgtgtagggtaattttttaaataagaattggatgaccatgaccttaaaattccttaagcataggttaaaaaagggtccgtgtgaaatttttaaagtgcaagtgttggaactcaaaaataaaaaaaagggggctccgtgagtccaaagttgttccccttttgggtttggttaggcatctggacccccgcatttggctcccgtgagccccggccctgtgccatccagattagtttcatggaaacttgttaggatccccttccaagttatgggccttgatttgagtctccccttggaagtatgggtttttaatttttatgaggtttataaaccaggttttgtgcgttttttgcct

SEQ ID NO: 34809 - DNA, 478 bp, Glycine max
  Clone ID: PAT_MRT3847_131434C.1
agtggtatggtcaggataaacgatcgactgtttttaccgccgggggggatgcgtacattattactacttattaatggcccttagatggactacactgctaagtacaagagccgacttacttaaccaacagaatgatttagtgtgggacaccaccggacagtttctacgggcttgggaaccccatgatgcagccggacataaactgcatgtggtgggctctacgcacgtactacaatcacgctatcccacaggattcaaactggcgctgcttgattgcttgaacagacaagcctgactatgtaggggaccgcatcatctgaatcaactccttgtatgtgctggcagaagctcgccccgaatctggagctaaccgtcgcgtgcacattaaattttatctcgcccaaggcgatgcactactttacgagctcgtgacgaataccagatgctccatggaggaccaaccttgctgcttcctata

SEQ ID NO: 34810 - DNA, 1320 bp, Glycine max
  Clone ID: PAT_MRT3847_131435C.1
tttttgtggttaagatttcatgtagtttgctttttattcatgctatagtcgaagacctgagagactcagactaagagttgcagaggcaagaaagaaatttgattacaatggcggggagttcttcatcagctgctgtgtctcttcttcctgtaattaggcatgatgtgttcctcaacttcagaggggaagacacccgtgacaacttcattagtcacatttatgctgaactacagaggaataagattgaaacatatatagattacagactagccagaggcgaagagatttcacctgcactccacaaagcaatagaagaatctatgatttatgttgtcgttttctcccagaactatgcatcttccacatggtgtttggatgaactcacaaagatactcaattgcaagaagagatatggaagggttgtgatcccagttttctataaggtggatccatcaattgttaggcatcagagagagacatatgcagaagaattcgttaagtataaacatcgatttgcagacaacatcgacaaagtgcatgcatggaaggctgctctaactgaagcagctgagatcgcgggctgggattcacaaaaaaccaggtctttaataattacatgctcttttgagatgttttagacttcttttaatttacttagatgctaaaattgtattaatcaagtaattctcttgtgtatttacaaattcaagaccaatattatgtaggactccaatatctgtctctatccaatatatgatattttcttttttacctagaagtgtttaaggagaagtttattaaaacaggttctgatactttattttgttttattatgagccagtccagaagccacacttgttgcagaaattgtgaaagatattttgacaaaattgaatagttcttccagttgtgatcatcaagaatttgttggaattgaaacccatattacacaaatcaagctcttgatgaagcttgagacactggatattcggatcataggaatttggggcttggggggaattggaaagactacgattgcagggcaaatatatcaccaattggcgtcacagttctgttccagcagtcttgttttaaatgttccggaagaaatagaaagacatggaatacaacgtacaagaagcaactatgagaaagagcttgtagagggaggcataagtatttcaagtgaaagactcaaacggacaaaggttctcctctttcttgatgatgttaatgattcaggtcaactaagagatttaattggagggcgtggtcgttttggccaggggagtcgaattattttgaccagcagagacatgc

SEQ ID NO: 34811 - DNA, 506 bp, Glycine max
  unsure (1)..(506): unsure at all n locations
  Clone ID: PAT_MRT3847_131436C.1
taatgatttttactatccatttaatgttattttaatattattgtttcctttctaactttattgccttttatgatttgatcatccatttacatgtatgttataaggttttaatcattgaaaaatatttttaccctaagaacttgaatgagcttttaagtaatccatgtctaaggatagaatgatgttatttagccttatttatatatctttgttcttaaagtaaattatttggtatagctcttaagggattaagagtgaaattagatgatttcacatgagaaatcatggttaaaatagtttagttgatgaaggtaatagttggaataactttaaatgatgaaaaatatttaacattgcatcaagagtaattttgaaaggttaagcacccacgacatgtatgaaaatctacaccaaacataaatttccacttccaagtattttttttcttatctcttgcatcttgctatgttcttttatcctttattacggntgaagttttatatttc

SEQ ID NO: 34812 - DNA, 277 bp, Glycine max
  Clone ID: PAT_MRT3847_131437C.1
tttcgacttttcacactaaactaatacacacaccctgtgtgtttattaacctcatcaacactcaaaacttggcatatattaatggcaacatcgcgagatccctatcgagatttctaaagaatgttcgttccatcacaacaaccaatgcctttaacgccgaccaacccttcatatctacgtccatagattcaccgtcgctcttttagaggttgccttctccctactgccgcgtacgttattccggcatctgcggctgggacggcagtgctcaacctgg

SEQ ID NO: 34813 - DNA, 294 bp, Glycine max
  unsure (1)..(294): unsure at all n locations
  Clone ID: PAT_MRT3847_131438C.1
tcctacaaaaagcatgaaagtggggcatncaaaagccattaaaatactacacaaattctattttgttgaaagggcgggggtgctccatacgttactatggctattaaaaaccaacatgaacctactcaatgtcgaacttctttattaaggacataatgaactcatcgaccttgagtaaaacaagaagagacttggcaacactgtctttttgttggcacctcttggcccaagcgacaaacttggaaactttcttttatgttgaggctgcaaaagattgtacaatgtggtggaaag

SEQ ID NO: 34814 - DNA, 256 bp, Glycine max
  Clone ID: PAT_MRT3847_131439C.1
ctttgatatattttgaaacaaagttaagaaaaacttaattagcatatggaggacagaactatagtgaaaaatggtagtagctctagaaagggtagctttaggatggggttgggaatggatgggaaaaaagatcacactgtggttgagcttggtagcattgacacacagagacttcttctaagcaatggagagagagagaaaatattacaacctctcaccaacactctctctccaaggcaaatgaatctctctatgc

SEQ ID NO: 34815 - DNA, 1142 bp, Glycine max
  Clone ID: PAT_MRT3847_13143C.1
ctttccccttccttggcttcattttcagctttgtcattggtgagtacctacacacagacaccaagggcagacttgaagttagcatcactataagtgatgatgagagtgaaggcaatcaggatagtgtcagaatgtacatagattttgaaggtaggaaaattgaatcagatcatgtgtgtgtggtgtatgaccaaagatgttccagcttcctaagtagcaaggtcaaaaatcaaacaaggttaaaaatcaaggttacaatgggggtgccagattatgcactgccacaaggttataatagaggtgtgagattcggtgtcagtccaataagcacctcggcttatgagagtttcattcaacaaatgaaattgcgtaattcaatatctcagtttcattaaacaaatggaattgagttgtgcttcatatcgtcattcccagtaaaagtagatcatatgatatgatctcggctcgagatttagcagaagactgatctgaggcatccaaactcatactacccatcagttctcaatttcttcaaagggcatgatgcatacaagccctaacacatgaaggttgtgctgcaccatccagagccattccagaggatcaatcaggttaacagtaaatttagaatatggctttacttgctgaagagaccattggcaaattcttacaggtactagtgcagagaaggataatgggcaataatctgtagttgtagggcgagccctggtacagtagttaagttgcgccttggtgaccgattggtcatgggttcaaatctggaaacaacttctttgtatatgcaaaataaatttgcgtacaatgatccacccccatacctttgcatggcgaggaaccttttggcaccaaggtacaatagttttaacgctcagtctgcagccacaaattcaaattttttcacctaaaagtttttgaaagtatgtgtatgagaattgtgctagtctttgtatattgtcttagtagaatagatgctcatggagttcagtcccttgagttatctgttaaatgcatgttatgtaccttcctcctttatgatgggtgatgatgttatttaaaaaaataatcccaaatttgcggatgaatctgaaatcttaattttgaaatatcaagaatggagaccg

SEQ ID NO: 34816 - DNA, 1855 bp, Glycine max
  Clone ID: PAT_MRT3847_131440C.1
ggctcgaggtgcatttccctattctggacttcttatatcaagagctcttagtttctcaaacttcagtaatgcaagttactatagggagcttgagcagtctctgatggatacttttcgaaaccaaagcattccagtggattcagtttctcttagtaaccccttcaggaatactattgataattttgaattgactctggacgtcttcccttcgcaaaccgatcgcttcaacacaactggagttttaactattgcttttctgttaagcaatcaaatttacaaacccccagagttcttctccccttacttcttcaagggtgctagttatgaatactatggaggagaaccaaaaggatcaaagtcatcatcacatgtaggggttatagttggtgcagtagttgctgttgtggtctttgttgtactggcattctttgcagggaggtatgcccttcgccagaaaacaagagcaagaagatcttcagagttgaacccttttgcaaattgggaacagaatacgaatagtggcactgctcctcagttgaaaggagcgcgatggttttcttttgatgacctaaggaaatacagcaccaacttctcagaaaccaatactattggatctggaggctatggaaaggtttatcaaggaactcttccctctggggagttggtcgccatcaaacgggctgcaaaagagtctatgcagggtgcggttgagtttaaatgagaattcgaacttctatcaagggtccatcataagaatctcgttggtcttgtgggtgttctgttttgaagtaggaacagcaagagcgccaatatggcaacgttaatatattgtaatagatggattgaggctaatggacatatcaaaagatgtagacaaggttcaggccgatctaagccccaccagggacaaagcaacatcaccacaatgtttagaaaagtttcagattttggtaatgatatgcgtgaaagaatactcaagagaaagggctacaatggcttaggttgtaaaagagatcgagagcatgattgagcttgttggattgaaccccaattctgaatcagctacaacatcagaacttatgaggaagcaggtcttggatcctgaatattacatgacccagcagttgactgaaaagagtgatgtatatagctttggagtgctaatgctggaactagcaacagcaagaaggccaatagagcaaggaaagtatattgtaagagaggtactgagggtaatggacacatcaaaagatttatacaaccttcattccattctagatcaacttcataatgaaagcaacaagaccaaaaggtttagagaagtttgtgatgttggcaatgaggtgtgtcaaagaatatgcagcagagaggcctacaatggctgaggttgtaaaagagatcgagagcataattgagctagttggattgaaccccaattctgaatcagctacaacatcagaaacttacgaggaagcaaatgcaggaaatgctcaacatccttacagggaagaagattttagctatagtggaatttttccatcaacaagggtagaaccccaataggctttggtatatttttttctttttgtaattcttttcccctcttcaaatgcaatgtctaagatctgctgtgtcaattttggattcaaatcaggcgggtgcttccaaaaaaacttgctatctttgtagaaaatggtgaaggttcaagttgaattttttaaaaattgattatttgaaggttgtacttatatctttgttcttcacatgtaaaatagtttgtgaattttgaactgctgtaatattcgaatgaatgtaagtatgatattcaactttgaattttccaaacaaaaaccac

SEQ ID NO: 34817 - DNA, 738 bp, Glycine max
  Clone ID: PAT_MRT3847_131441C.1
aattcggctcgagagaaaataaactcaaacaaggtaagctatgtagttgccctccattcttccaccacctattttgaaacattctctctctctgctccaccacattttagggagcagccgcgcttctttctgcgacccacatcgctgttttttattttttcatttttggggttgtttatttgctggttccgttttttttttttttttgtggctttacccttcaaaatcgctcctttaccaaaaatttgagcgatgaattgttgggatcaggttcctgttggcatctcagagttggctatgacaacctccgcaatgttcattgcatcaaaagccaaaagcctttgattcttagaaaagctaaaaagctggctgtttcgtggttgctgctatcaaggtttgtgctttgccccagatatctctttttttttcaccataaaaaaattgattttttctggttcgttggtcttggtcgtcgaatagtgtgaattgggtcattttctgattgctatagttttctttattccggtactattttctcaagggaacatagtcaataaaacaaatgtttggcgagagaaaattctgggtttgaataacggaaagttaatttcgtaggcatgatataatattatagagaagaaggcacgttcttttgagggtgctactatcagtttcaaatttgattaaatttcaaacctttttttgttaattagaattataaattttgaattattttga

SEQ ID NO: 34818 - DNA, 648 bp, Glycine max
  unsure (1)..(648): unsure at all n locations
  Clone ID: PAT_MRT3847_131442C.1
aaatgataagtgtatgtatgattgtcattaaatgataaaaatattatccttttagaaaagttgtgttttatgattatcaatttatcatgattccagttgaattaaagggaggggatattcgattaagaaataatgaaaatagtatcaaagatgaaggattaacagcaaagaacaagaacgcaaaaaatatcaatatcaggagaaatcaaatgcagaatagtttttgtaattgagtttcactccatgactatatattaatggattaagcccattaaattaaaacacaagatcgtgattcacaaagtgttgcaatcaatggcggatctaagacggaggtgcattttatttattttcggacaagagttagggattcaaatacataaaattagaggatgcaaaatataaattttttaaaaaaccgaatttattaaaatgaggagatgtattgtgggctatgcttcatgctatcaaattggtttcctctagaggtttcaactttcaacaagatcaatattgagagtgattttctaatcgttattaaaacaagataaatctttntaacataaatatataatgttgaaaatttatttttgtataatttttactatgttttttattcccacanaattgaaacatggcatttttttc

SEQ ID NO: 34819 - DNA, 416 bp, Glycine max
  Clone ID: PAT_MRT3847_131443C.1
gttaagtcatcaacctttcaattttcttggtaattcggctcgctactttacttgagtctaccctttcttgtctctctgtctctctctccaattcagtcttcagacgaggtagtttagtgtcataattgtggaatgtagctttactcatctttcatgtgaagacgcttcatatggttgctgcaacccattgaatagtccccaaaattcattctcttaggatacatttgctatacccaattaatgcccttcagcctacagcgtgtgtcttcaattacagcatttggatgaaaaaaagggtagagagggttggtagtagaattcaaactcacacatactttgccataaagtatctattttttctctttcttttacactcctgagttcgtagtagcaaatcaggatctgctgcttcagtg

SEQ ID NO: 34820 - DNA, 301 bp, Glycine max
  Clone ID: PAT_MRT3847_131444C.1
gggtaaggctacggtcgggtggtgatcatgaaacttcaagaatacttaagctcacagactcgttgtggacaaacatatcattgactacagttgaggacttgtcctttgctaatttaaaggatgttaaggatgtgtatcaattgaatgatggttttccactattaaaacatctgcatatccaagaaagtgatgaattgttgcacatcattaactcaacagagatgtcgactccctattctgcatttcctaatttggagactctggttcttttcaatctatctaatatgaaagaaatatgcta

SEQ ID NO: 34821 - DNA, 150 bp, Glycine max
  Clone ID: PAT_MRT3847_131445C.1
ttacacatatttctcctgggaaaacgtgttcaaaatttgttcgcgtacagtactacagaaatgacctcaaagaaattttgctctcgtttacccaggagaaaacacgggccgcctcccactatagagctcttcgacaccccgaattactaa

SEQ ID NO: 34822 - DNA, 763 bp, Glycine max
  unsure (1)..(763): unsure at all n locations
  Clone ID: PAT_MRT3847_131446C.1
aannntaaggatatcccaaagttcagctcttaacacagcaaaaacaaatattaagccgaaaatgcaaagacaacatgcccagaatcatttcgcagaatccctccaacagcggctttattcaaatgcttttcgactgaaccgtcacaattgagcttgtacacaccacaccaatcggaggaggcttccagctaatacttggagaatcatcagcagcaataggaacttgaagaaagtacagttgaaatctgtatgctcatatcgataatcaatttctttgacaacaacaagcttaacaaggcaaacatgtagcccctggtccacagaaacgaagactatctgagtaggaagtaaagcaaactttggattcgtatctgtgttggcatatttcctcaacccttatatagttttcatcatcagtcaaaccttctgtagactcttgtttcagttgccaaaattaggagatcgccattgataactgtgaatccggttattttaggatcttcctccatcaaacccatctcttttgttgctacctcgcgaattctcaaccacgtgtgcgattcataatagtaaaagccaatgttagcagcaatatggaacccaccaatccccgccaccaccacctcctcctcctcctctttttgtaagttgaagtttctctcatgtatatagggaacatattcattagctaaccacggggtttcatctcatgttaactactcttagtggaactcggttccattttttgtcaacgatgcgttcc

SEQ ID NO: 34823 - DNA, 680 bp, Glycine max
  Clone ID: PAT_MRT3847_131447C.1
attcggctcgaggcaaactgaagatttgctcgacaaactaagtgtttctttgactggtgaagaacttgatgtcattgaaaagctttattaccaagcaatgaagcttgaaatagatttcttctctgctcagccactctttcagccaactatagtacccttgactaaaggacataagcctgcggaagatcatctcatagttttttctgattttgatttaacatgcactgtagttgattcgtccgccatcttggctgaaattgctatagtgacggcaccaaaatctgatcagaatcagcctgaagatcaaattgttcggatgttatcttctgacctcaggaatacatggggttttctatctaaacagtatacggaggagtatgagcaatgtatagaaagcattatgccttccgatagattgaacaatttcgattataaagaattgtctatggctcttgagcaactttcaaaatttgagaacactgcaaataatagggttatcgagtcaggggtactcaagggtataagtctagaagatataaagcgtgctggagagcgtctgatactacaagatggtgccctaacttctttcagagcattgttaagaatgaaaatttgaatgccaacgtgcatgttctttcatactgctggtgtggtgacccctgaggccatgtctcttcggg

SEQ ID NO: 34824 - DNA, 176 bp, Glycine max
  unsure (1)..(176): unsure at all n locations
  Clone ID: PAT_MRT3847_131448C.1
ggggttgttttgtcgcttnggaaaagagggattgattcttttcactataacccgttaacaggatatagcaacaactaattaactagctagctttttttcttatgggaattaaacaacccttgtgtggatatgtctcgttaacccatggaacccgccaagggacaagaggggtggtt

SEQ ID NO: 34825 - DNA, 335 bp, Glycine max
  Clone ID: PAT_MRT3847_131449C.1
ttttattgagatctcattcgtgacactggatggactgccaccccaatgcaggatgttcaggttacaattgaacggcttattacctctcaggaatgagcacccaggacctattgtgctctaaaaccacaaaaaccttctgtgataaataggtggacggggaaacagactatcccccagggcacttaccgaagtgtaaaaagaatgcctatatctatagggggaggagcaggtgcaaagaatgctattctcatgaatatgccaaatgctgcccttccaaagcggagatatattgcaggagaactccacttcgaagaagctaagaagactcctcccta

SEQ ID NO: 34826 - DNA, 271 bp, Glycine max
  Clone ID: PAT_MRT3847_13144C.1
tttttttttttttttttttttttttttttttttttttttttttttttattgaggggagggttgtgacaaattttttttttaaaaacaaccggttttacaaggttaatgatggaaaattttggatcaaaacaaacattgagccaaaaactgggaggaaacaaaaaaatgcgcttaatttccaaagagcgacccacgtcaaatgttccctataaataaaaacgcaaactcgccggggaccctttcttttttattttccctagccggaccacat

SEQ ID NO: 34827 - DNA, 418 bp, Glycine max
  Clone ID: PAT_MRT3847_131450C.1
aaaaaaagcgttaaaatcgtctattcgctcatacttcgagaagaatagagaaaatataataaaaaaaaaaaaaaaaaaaaaaaaaaaaaaaaaaaaaaaaaaaaaaaaaaaaaaaaaaaaaaaaaaaaaaaaaaaaaaaaaaaaaaaaaaaaaaaaaaaaaaaaaaaaaaaaaaaaaaaaaaaaaagggggggggggccaattagggggctggtaaaccgggaaataaattggggacgggaacctgggggggaaaaagttttccttaagggaggcggaataaaagttgggcaaaacaagggaaaaaggtgttcccgggggaaaagtgtattcggtaaaaatcaaaaaaaaattagagccggaaagaaaaaagtaaaagggtgggggggctaatgaggggggaaacttaaatttatggg

SEQ ID NO: 34828 - DNA, 389 bp, Glycine max
  Clone ID: PAT_MRT3847_131451C.1
ggtctctgttgcgagattatgctgggaaacagcaacatgagggtatgttactgaacctcattcaccataacaagccaccaccatctgtcatgggagaggagctgaatggtatactttctgaaaagagttggttagagtccagattaaaagtattggttgaggcttgtgagggaaattcctctattttgccagtagtagataagttaaaggctgttgtaaaaaacagttcatagtgagaatggagtctgctggtttttttatcaagattctgggaaccaagtcctaaggcatgcaatgtacataatgaaaggatacaggtattttagttaggttattataaaatatactctttcatcacatttttactccattttctttctatttcgtct

SEQ ID NO: 34829 - DNA, 302 bp, Glycine max
  Clone ID: PAT_MRT3847_131452C.1
cggaaacacattcattactccatctccctcctaacaaacaaacataataacttctcccattcatttattctaatattctaatccttgcctcttcatttcacaattgacatatttgttttattcatttattatttacttcactctttttttcttttttacttctaatccggacacaaacataaccgtttttatctcacgccacgcccccgttccagtagtgatcgccacaccgtgcttagcatgacgcttcccctgatcggcgccacctccatccacctccgccgacaccgccacgtcgcagg

SEQ ID NO: 34830 - DNA, 301 bp, Glycine max
  Clone ID: PAT_MRT3847_131453C.1
aaaaaccaaatggactttaattttctttttttttggaaaataaaatcctcaagttgtggtttctgcaagttgtatactttaccaaaacatgttctttactccatttcccttttttgggggcggttttaattgaaactgctttccacaaacaaaaagacaggggttgtttttttattttttacattcaaaccccttatttaaaattttgttttactggtgtttttacccaaaaaatgccttgccctttttaattcctcattgtaaacatttggtgatttttttgcattcccggttttttttt

SEQ ID NO: 34831 - DNA, 334 bp, Glycine max
  Clone ID: PAT_MRT3847_131454C.1
gattgatagggcgtaatatgaaagatctgacccagtgacaggcttgacataattgtatctatggaagaaggctagccgagctgtgaagactgttatatatctcatacaacaggacgagcacatcattgcgataggggagccatcacctattgactagatgatctaatgagattaccagaaatattgtccatatcctacagacaaaatggagcaattctttcacataaaagcagatgcaccaatgaggtcagggtaaagttgggatggtacacctatactgagaaagttacaaaggacatacgctacgtcaaaaagtagagctttcttgagtcga

SEQ ID NO: 34832 - DNA, 291 bp, Glycine max
  Clone ID: PAT_MRT3847_131455C.1
gcgggcttacgcacgcttggcattcctctcaagggacttgaaacatacgaagcataccccttttctgtcttttacggtgaccgcaaatcgcactcggcaaaagtggcactgactgtgatcgactctgtgactcacacatcgagcgccaccgaccgatccgaccatgtctgtcgcctcttacaccatcttcaagtgagaccctgctgttggtggtcaggagtcctcttctacacgatgaggaatagctcgagcgtcatcagcctctcacagttcgaacatgctatatacgcc

SEQ ID NO: 34833 - DNA, 1530 bp, Glycine max
  unsure (1)..(1530): unsure at all n locations
  Clone ID: PAT_MRT3847_131456C.1
attctcaaactaaacagcttttaaatttgaaaagaatagtgcacattggaggggaaagaacatcaagagaatgatatctcacttaattaagcatcaagatcattgtgtcctacaatataatataataattttttttttgatcggccaatataatataataataataattggaaaaatgaaaaagggtaaaaagaaccatgcaactaaaaaaagagctttcgcggggatggtctagattcaaccttgtttgaggacttgaggggaggagggactaccttgctttcttggccctcagccaccttgtcaagcagctttgcagcccttggatctgttagcaacttcttctgaaaagactgtgagaagccagttgcaatgatagtcacgtgaatctccccagtgtagcgatcatcaacgacagccccaaatataatattagcagaaggatcagccaaactagtcacaacctgagaaaccctgttcacttcctgcagggttatgtcctttcctccagtaatattatacactaccccagtagctgactgaatagaggatccaattaaaggagccaaagtagcctgttcggctgcttcttctgctcggtttttaccggaggaaacacctactccaagcattgcagtcccagagtctttcatcacagcttttacatctgcaaaatccacattgacaagtccaggtacagttataatgtctgatattccctgtactccttgccgtagaacgtcatctgcaagacggaaagcatcctgaagaggcatctgctcatcagccatgtcaagcaggcggtcatttggaatcactataagtgtatccacatttttctgcagcttttcaatggcttccagtgcctgcagtgatcttntgcgtccttcanaactgaagggataggtaacaacacctactgtcaagttaacctgcctctttagctattcgggccactactggggcagcaccagacccagttcccccacccatgccagcagttacaaacactaaatctgatccttgaagagcattggcaatagcttcttttgattcctcagcagcttgttcccccaaaagtggattcccaccagtacctaatccacgagtcagaagctctccaattttgatagggttctcagcagcagaatgcaacagtgcttgagcatcagtatttatagcataaaattctacaccgtgcaatccgcaaccgatcatgcggttaacagcattgttgccgccgccgccaacaccgacaaccttaatcttagcgctgtcgactgtcgagaaggagcagcatgtcacggacgcgaaacgacgtcgctggggttcgaaggcgcaccttctgcttctagggttcagggaaacgcagtttctttgaacgaaagaggaggaaggcagtgcgttgtagcgaattggagtggggtttgtgagtggcagcatggccattgcaacacttctaggatttagggttgatggtgaagaatttgggatttagggtttagtttttaggggaagatgaaaattgag

SEQ ID NO: 34834 - DNA, 780 bp, Glycine max
  Clone ID: PAT_MRT3847_131457C.1
tagtgacacgtatttactggacctcacaacagataatccaatatggagagaaattccaacttcatgggctcctccttctcggttgggccactcactctcagtctatgggaggacaaagattctcatgtttggtggacttgccaagagtggacacttgcggctacgatcaggtgaggcttatacaattgacttagaagatgaacaaccacaatggaggcaactagaatatagcgcattcacgggtttagccagtcaaagtgctgttgttcctcctcctaggctggatcatgttgctgtcagcatgccttgtgggaggatcattatatttggaggttccattgctggtcttcactcaccatctcagctctttctgttggacccttctgaagagaaaccatcctggaggatcctcaatgttccagggcaaccacctaaatttgcttggggtcatagcacttgtgtggttggagggactagggtgttggtgttgggtggacacactggggaggaatggatactgaatgagttgcacgagttatgcttggcaagtcgacatgactcttacctgtgaagtgcataaaaccagacaaagattttgggtgggtttcctttagaagtttggtttttgtatatgaacgaactattatatgattgttatatgacatgacgtgtgtattaccagtgtttttgaatgatatatggatgtcatctggctcctccaccgtctattacactaggaaacaaacctctgtacatcaaatagttattgccatttgtatc

SEQ ID NO: 34835 - DNA, 691 bp, Glycine max
  Clone ID: PAT_MRT3847_131459C.1
cccacgcgtccgtcttcatttttgaatcagacatggccatgccaaaagagaaagaggatgttcagaacagtgggaagaaattgaaatgtacgaggaatgaagaagaagaaaaagaacaatatgaacaagttgaagctgatgaagaagaagaagaagaagaagacagtgagcttcctctaaagctaggattgttcttctacccaacaatacccacttcctttgttgtatctgatgctcttgaacccgattttcccatcatatatgtcaacaaggtctttgaaatcgccactggatatcgtgctgacgaggccctcggtcgcaactgtcggttcttgcagtatagagatcgtcgagctcagaggcggcaccctttggtggatcctgttgttgtgtctgagattagaagatgtcttgaggaaggtgttgagttccaaggtgaacttctgaatttcagaaaggatggcactcctttggtgaacagagtgagacttacactaattcatgatgatgacgggactgtgacacacgtaataggtatccaactcttttccgaggcaaatatagatctgaaccgtgtctcatatccagtcttcaaagagacttggattcaagattttgacaagaatgggaaatatactcctaaagagggacattctttgtacaggtcagcaccaagagatgtgcagcattc

SEQ ID NO: 34836 - DNA, 397 bp, Glycine max
  Clone ID: PAT_MRT3847_13145C.1
cgacagaaggggagggatccaaaggttgtacatgtaacatgcttgatttttgacttttcgacggctctcacactataacacttcacgtggtgacacttcactcaacatccttgttagtcaaaatcctccaacggtcaaaatcctccatagatagccatttccaagacctcgaaaatcaactttgtctacttccaagatcaatgaccaatcccacaaaccaacacaagacttttcagcatgttttatcttcactcacacgctttttgagaaactttctagaatgtcactcatctcataaccactccaagtcaaacatgcttaaccgtggatttcttaagtgatgggctactgaaaagtagatttctctctttttggcgtgattcatctggatattaca

SEQ ID NO: 34837 - DNA, 429 bp, Glycine max
  Clone ID: PAT_MRT3847_131460C.1
aaaaaaaaaaaaaaaaaaaaaaaaaaatttaaattaaaaaaaaaaaaaaaaaaaaaaagggaggggatataaaaaaaaaaaaaaaaaaaaaaaaaaaaaaaaaaaaaaaaaaaaaaaaaaaaaaaaaaaaaaaatggggcgccccttttaaaggttccaagtttccttccccttccttccaacttattaattttttttttgggccccctaaattaaattcactgcccgggtttttaaaacgtcgggattggaaaaaccctgcctttcccaaacttaatccctttgaaaaaaatccccttttcgccggttggtttaatacaaaaaagccccccaccattcccctttccaaacatttgcccactcttattggcaaatgggcccccccttttaccggcctctttaagcccggggggtgtggtggttcccccc

SEQ ID NO: 34838 - DNA, 143 bp, Glycine max
  Clone ID: PAT_MRT3847_131461C.1
ggctcgcgcacgaagaggtacaagggcgaccaaaaaaggaagcaagaactgaggtccaaacgagaagcacaagcaagccgcaaaagccgacgacgagcgcagggaaaaaaaccgacaccactggccaggggggccgcaagccc

SEQ ID NO: 34839 - DNA, 296 bp, Glycine max
  unsure (1)..(296): unsure at all n locations
  Clone ID: PAT_MRT3847_131462C.1
ttgggttggaatcccggccgacccacccgtccaaaactgggccatttaaacgttttagcaagaacttttttcttaaaaaaaggaaaaaaaaaaaaaaaaaaaaaaaaaaaaaaaaaagggggggccgtttaagaacaaagttccaccccgggcttgcaagataatcttttttttagggacccaaaataatacaacgggccgcggtnaaaaacttcggcctgggaaaaccttgctttccccaactaatggccttgaaaaaaatccccctttgccagctgggttataaccaaaaaggc

SEQ ID NO: 34840 - DNA, 255 bp, Glycine max
  Clone ID: PAT_MRT3847_131463C.1
ggctcgagggcccctgtgcctattcattgtcaaagtttctattattgtagagcaccacaacccgctccggggatgctttgtagagagagatcgccttatgatatgctactggtacagatagaattacgactctggtaccaggggatgaagagctggcagaaacaaacctagaagggcgtggatggtgagcgaagaaactgatcttacgctgtgaccgagactatatgtaactgaaaacggatccacggtatcaac

SEQ ID NO: 34841 - DNA, 310 bp, Glycine max
  Clone ID: PAT_MRT3847_131464C.1
ccaggatttatacactttatagttaccctggacacttgcataaccgtttaatgatggcccacgacgttgagctcacactcataacatggtgatactcccatgatggactaccatgaccctactccgcacccggaaatcgacccaaatgaactcacacagcacctcttgtacatagccggcatctctgaggtcatagcagcactccatggatttcacaacacctggtacaccattattgactacatgagacatagtgacaatgatatctatagtgacaccgactgtgactgcagaggctttgtactcattg

SEQ ID NO: 34842 - DNA, 836 bp, Glycine max
  unsure (1)..(836): unsure at all n locations
  Clone ID: PAT_MRT3847_131465C.1
atctagaagacttgcagttgcagcagcatctgttcccagtcggtggcagaacagcaccaccctcaatggactccaattgcaaaccttcctccccacccccgacccctaaccctaaccctaaccctaaccctaaccctaaccctaaccctaattcatcaccctcggagaaacaccagagagacctactgaaccacgtcgaagcctacctcgcgaagcgcgacggcgtggacaagctcctcaagatttcgcgctacaccgcgaaactcatcctcgccacttcgctcctccaatccaacaaccctaccctctcccaccgcctaaaatccttcgaatccagcgtcggcgtgagccgaaaggccttcagactcggtaaattcgttcaagacctaaacgccctcaaaaccacccatccccattcgaacctcgatttgttcctctccgtcctcgcctacggaggcgaaggcttgtactacttcgtggagcagttcgtctggctcgcgaaatcgcggctcgtcgggcccaagcactcgcgaaagttccagaaattgagcgcgtgggcggagttcgtgggttacttctggagcgtggtactcagcctctgggagttgggtgcgatagcccaggaggaagcgtgtttgaagtcgagcgtggagatcacgcgcctgagagagggtgggtgtgttgatgaggaggcgcagntgggganggnggngggcnngnnnncggngangagggttnnnggnggnnnggannnngncgatgcnggnatgggtntagatgatgttttggatggaaatggaccgttttngaaaccggttntgatggcttccccgggg

SEQ ID NO: 34843 - DNA, 259 bp, Glycine max
  Clone ID: PAT_MRT3847_131466C.1
agaaggtgcttgacattggagggtagggaagagagtgcttggtggtggtgttttgaattgaaaaacgagaggatatcgcagatttttttcttatcgttttcttcatttgttaaaatcatcggtgaatttcgttttattttcgaaattgtttcggtttgaatgcatgcattttgatttatggatttggaatcttctggcgattcggtgaaatgctgcaagcactgtggatgcgggtctagtgattgccccatggcagctc

SEQ ID NO: 34844 - DNA, 289 bp, Glycine max
  unsure (1)..(289): unsure at all n locations
  Clone ID: PAT_MRT3847_131467C.1
tggactctttaactgtaagtcaaacaaatgatttaatagaatattgttatatctataagctctataacttgttatacaactcatgcttgatacataggttattatcatatatacctgactaatgagatgaagttgaattcattaaatcacgactaaaaattactttttttaatatatatattcaccttctatatactacatctatactcttttatgccctgntgtatactctttaacatttaataatcatctccaatcttggtttattgatctatcgaatactacgcta

SEQ ID NO: 34845 - DNA, 367 bp, Glycine max
  Clone ID: PAT_MRT3847_131468C.1
gccgccctcgccctttttttttttttttttttttgggttcccgaacaaatgcaataccacagttataaaaagaggaactgatctgcttaatcacagacagccaatttggggcccactagccatataaattggatgcattccaaccctaaaagagggttatggcattctattttgcatggacagaaagggaaaaaccttaattttatttattgcaaccaaatacttgaagaaccatgtggtacttcttctacaatatggggcatgaattgggccgttatttttggtgcccttggactggcttcacccatttataaattctcatctacggacccgagatggcgtggggcccaccttcttagagaaggtt

SEQ ID NO: 34846 - DNA, 344 bp, Glycine max
  Clone ID: PAT_MRT3847_131469C.1
ctccagcgcggtgattactgctatggggatgtggtatgtcggctgtcacctgcacttgcctgtccagacacacatcatggtggagagtgcactggtacctcaatgcacgacactgaccagagtgggattcacatcgctgtacatatccacactgatgacgctttagtgccattttctgagctctcttgggtatgaaatataactgcccttaccaatggcgatatagaaccttcttgcgctgatgggatggtgctaatggtctgactccatgccttatatgaggttggactacatcaccatgatgaatcaactgctgtacggagcgccataagtgatcctggccg

SEQ ID NO: 34847 - DNA, 248 bp, Glycine max
  unsure (1)..(248): unsure at all n locations
  Clone ID: PAT_MRT3847_13146C.1
tngctgngcacctttncacactngtggtgattncctganactggcatcgcncgccatttggcgcaaagatcncaacaacancaccattcgaaagttganactgnaanagcancaatcnnncctgcgnnggaggtttccttnttccgtcatcaattctngtgtttaaggtcttgtgantgtaagcagcatngaggatattncaatngganattagttgggagatgtcgcctggcccatntgcttggaat

SEQ ID NO: 34848 - DNA, 266 bp, Glycine max
  unsure (1)..(266): unsure at all n locations
  Clone ID: PAT_MRT3847_131470C.1
ttgaagccaactcagaatcttttggtaattttcgaggaacttggggggaatcttncanaaatttcacttgtgaagagatcagtaagcagtgtttgtgcngatgtgtcagagnaccacccaaatattaagaactggcacattgagagctatggtaantcagaagagntccatccgccgaanttcagttggcattgcagcccggtcaaaccatctcttccattaaattgccagntttggaatctttgggtattgtgggaactatgagc

SEQ ID NO: 34849 - DNA, 445 bp, Glycine max
  Clone ID: PAT_MRT3847_131471C.1
tacggctgcgagaagacgacagagggggagtgtgagagagagaaggcaagatgtccaagagaggacgcggtggttgggcggcgtacaagttccagatgtcgctgggtctgccggtggctgcgactgagaactgcgccgacaattcgggtgcgaagaacctctacatatatatcggcgacagggatcatagggccgttgaacacgtatacactcggcttgcgtacggcgacatggtgagttggacactcattagacacagggatactccgttctgatgacaaaggttatgtcagctgtcatcgttgcgcagcacaagccatggcgccgaaagggactgcgtctacatgtatttcaaagataatgctggtgttattgtcaatcccaaaggagaaatgaaagggtctgctgtcactgggcccattggaaaagagtgagctgatctgtg

SEQ ID NO: 34850 - DNA, 239 bp, Glycine max
  Clone ID: PAT_MRT3847_131472C.1
ttcttttacacccacatcgtgtggtgtcttagagggagttacttttgatgtattaaaagatctttctagtgtcttaaaattacggatgcttgttatgggttaaaaagactattttttgctttttatttgaatacccgtctcttacatgagcgacgtactgcttttttggtaaagtttgtgtttcagaaacttgtttgggtaaaccttttttgcgtaggctgttttttttctttgattgc

SEQ ID NO: 34851 - DNA, 633 bp, Glycine max
  Clone ID: PAT_MRT3847_131473C.1
ccacgcgtccggatcgtttgtatgtctgtagccactaataataagcaccataaaagttgtggtgattagtgattagtcataccttctcacctcaccacactgttctgacacagaaatttacattcaaaggaagtcaacatctgtacagaaaaagttgtacaaaggtatgcctcaaacaaactcaattacataaacttaaaagaaaatggggaaaaagttagggaacattcaagggtaaatcaaccccaccagtccaccactctctctcttcaatgcagcaaccttatttagattttggacaagcttagctaagaagtatacacccttttgaataagcattttggtatctatcttcagctaaaaatggagaatagctgcattctagcttttctcctcctcattctccactcaagtacaacaaaagctgccttcagtgttggtggtggagttggtgtaggtgttggtgttggtgtttggtgttggcaatgggaatggtggtggtgatggtggcagtggtggagtggtttgggttggtggggggataacagcccagagccacctagatcctcagtgccaaatcttgaaggagcttacacagcacttcaggcatggaaatctgcaatcactgaggac

SEQ ID NO: 34852 - DNA, 326 bp, Glycine max
  unsure (1)..(326): unsure at all n locations
  Clone ID: PAT_MRT3847_131474C.1
gaagtagacaatgactatccttccctggtagaaggantgttgtccacattacangttcaatgaaatgcttaaaacaacttgtgccttttccttcatgaacacctaaaatttcggccataaaccaaattataaatcatggctttccactatcccaattcaagtcaaatggacaagaactccctccatgatcttaatcagctaacccaccttactacactaggacataaataaccattcggggctagagctttataatgaaaaaaactgttatattttttttaaggccccctcttttttgggggtggggtaataaaaaacccttgttt

SEQ ID NO: 34853 - DNA, 535 bp, Glycine max
  Clone ID: PAT_MRT3847_131475C.1
ggctcgagacaagaagaaagaatctgaacaataatactgatacacacaacactaacactaacaagaagggaggaagaagctgaaaaccctaatctgcagagatgagatgagatgaaaatgaaaaggcgtggaatcagcgcggcaaggaacatcgtagatgcttgtcttgggagtgtgggatctcaaatggctcctccaattcgtattctccgcgttcgtcttggcgattggactgcacgcgctgctcaagaacaccgcctccaagtacttcgagattgaagccactttccacgctatgcctggccctctcaccgaccattctctctgcgccgtttgtcgcaaccccgccaacaagaaatgttcgcgatgcatatccgttcgatactgttcacaagcatgtcagcaggcgcactggaaatccgagcataagatgagatgcaaggagtttcagggcagcgccagtgtgatgaatcttgatcaaactgaagtaactaatcgtgttttcaaagcttctgctgctgtgaatacaagttca

SEQ ID NO: 34854 - DNA, 347 bp, Glycine max
  Clone ID: PAT_MRT3847_131476C.1
ccaccacacaccgtcagccaccagcaaccatgggaaacatcatctccgccatcgcgggagcgatcaactcggtcatctctgccattgcctcgttcatcatggccatcttcagcggtatcgcccgcgttctcatcgccatctggaacttcatcacgtgtggagtctgctccggcggccgtcgtgggggaagaggcacagtctagtgggtggtgggacgaccaagctctcatcaccctaaacccttcctcccggtctcgttcagttcgcatccgcttaattccaagaccttgtccacggacaccttgtagcttataatacacgacatgcaacgacgactactgccttag

SEQ ID NO: 34855 - DNA, 581 bp, Glycine max
  Clone ID: PAT_MRT3847_131477C.1
ggggcctaaaaaacggggatttccaacatttttttaagaacacaacccaaaaacaaactggtgaaaaaagggcattaacattttagttccccaaccccaaacaaccccaatgatcaaaaataccgccctgtttgatcaaaggttttacccagacataatctggaaacattggccggatttttgtaatgaacacagccctgattgatcaaaggttttacccacataaaaaaaatccattactgggttgttgaacagccaaacttttcaattaaaacaaaattgtttttccatttaaaacatggcctaatgccaggaaaaaaaaaaggtactcaagctccaccacacataatttttccaaatcctataaaaaaagattccttatactttaaaaattaccttgggggggatgtacattggttcctttggcactttgctgggccttaaattttagaccgttggatgcggggaaaaacttgcctaccagtggcaccaggaaaggaatggctctttttaacttaaatggctcgttcatgcacatttggacttgatcttggagagttatttgcattaaccttggccct

SEQ ID NO: 34856 - DNA, 373 bp, Glycine max
  Clone ID: PAT_MRT3847_131478C.1
tgttaaggtaacagcagcatgttccgctgtggggtagacataaagtaacactgcaactccattgtcggaatgtggtttgcaaaaagacagaggggtaattgtggagtattctggacggatggtctacgttgctcataacgctaattagcccgataagaaagatttgctggagggaaatttttcctgcgatattgaatctcgctctagataggaaaaaggtccctctacaaaagcaccaattacgcaagatggaaaaacgcttcaaatatggatatacattgcgtgctggattcacattctttcagaaagaatttccctgaaaagggaagatcaagaaaaacccaaaaagattgatgccagattgagacaaata

SEQ ID NO: 34857 - DNA, 360 bp, Glycine max
  Clone ID: PAT_MRT3847_131479C.1
ttttatttatatttttttttttttttttttttttttgaattttttattctggaccggaaaagtaggaaaaccaattaaaggaaatggggaacaagaaaaccttcaacattgtcgaggcaagaaaagtgcaaaaatgaaaatgttattcgatcacaagcccacacaacacacgggacggtagcataaagggtacagattggcgtgactaaagagttaactaactcacattgttcggcgctcactgactggcaagaaaaaaggaaacatggggggccaatctattaaaagggaccggaacctccccggaccgcgggggcgaccctcttgccggacccggggctgactctttgaccaacgaga

SEQ ID NO: 34858 - DNA, 703 bp, Glycine max
  Clone ID: PAT_MRT3847_13147C.1
ggctcgagctctcactcgcagaaaattgacgcaattccacaaaagcggataagctcggtgtctggtttgaaagtgaaataaaaaaaataaaaaagtctggcatgatgggcatgttcccttttgagcaaagtttgtgacttgaagagagaagaaaaaggatgagcgcagcggatgatgacgagccagaaaggagaagaagattgaaagcgtcgaatagtggtgggttgaagagctttcagcgcgatctgatcgctggggcggtgatgggtggtggggtgcacacgattgtggccccaatcgagagggcgaagctcttgttgcagacccaagagagcaatttggcgattgtggcgagtgggcgtcgcaaattcaagggtatgttggattgcatagcccgtacggtcagggaagaaggcattctctctttgtggagaggcaatggcagcagtgttattcgttactatccttctgtcgctctcaatttctctctcaaggatctatacaaaagcatgctaagaggtggaaactctagcgacaatcttttgccaggtgccactgctaattttgctgcgggggctgctgccggctgtaccacacttgtgatggtatacccccttgacatatcacacacgcgccttgtctcctacatttgaaggagagaagtgcgccaatttcgaggcatttaccattttttggctaccat

SEQ ID NO: 34859 - DNA, 251 bp, Glycine max
  Clone ID: PAT_MRT3847_131480C.1
gcagcagtgctgggatcatctcatcttttctgctgcttccatcaagagccccttcttcgccgccaagaagaggtgtgtggtgtgtgattctcttgaagagagtagtgctgaggctctcagagacacatctcatttatttttgagtgtgtctgatggagatacgcgaaatgcgcttctccctctgaggggcgcatctcagtgggatctcgtgttgtataagacacagagtgagatatagtctctggggtctc

SEQ ID NO: 34860 - DNA, 252 bp, Glycine max
  Clone ID: PAT_MRT3847_131481C.1
cccacgcgtccggaacagctagagcaccggttttaaaatctactccatagggtgactcatacagaaattaccagtatagaacttcaccaaacctatctagaactgctactactaatgacaatgcaatcagctaggctgttgtcgatatgatactgaaactacaggatctggaccatagacagttactacattactacatcgaaacagatctatacggctaaatcagacatgaacctaatctggcataggcac

SEQ ID NO: 34861 - DNA, 363 bp, Glycine max
  Clone ID: PAT_MRT3847_131482C.1
ggctcgagggagcatctgcacctatttatgttgacatactcaagctatgcctgcacatgtgacggatacgaatggaggcagatagtggggcatatcgaggagacgtaacaccacacacatataaatagagtatgatgcagcattgatatttgttttgggggactatgatgcttacttatagactaccggacggagtatggggaaacatagtaacaccgagctcatgtagtacgcccttacaggttatgatccttgtgacgactgaaatttaaagctttacaattgtatgaatgcgtgatataagaatctcccttgcgaaagaataccattggctatggaagggacttgaagaaataccattgg

SEQ ID NO: 34862 - DNA, 1549 bp, Glycine max
  Clone ID: PAT_MRT3847_131483C.1
ctgctgagaactttcttcttttgatttctatgatttgcaaattttgtatttttcagtttagagaaatgattatttgctcatactttttagttttgaaattgtgtgcaccatttttttgtgttgcaattttattgagttttagattcaatgagttaaatagtccattctctctacttcttgcctattgaataatttgttctgtgttttaaagtgcaggcacccatcattattggttaaatagatctgacaacaacgaccaactttttggagctgatggaatatttttagttctttctgcaagggtttttgactgtggcattaagcttgaaaaattgaagacaattcaaaagcttacgagtacggcaaatccacaacagggaacaacacagaagcggaaaaaagaagaaggaagaaaagttagcagtagtttggcgtggtaattggtagagcgagaaacagagaaatggacgattacacgagggaaatgatggacctgaagacactggtcactcgcactctcgagaagaaaggcgtcctcgccaggatccgtgccgaactcagggcgagtgtgttcgaagccatcgaagaggaagatcgtgtgattgagaaggaacaaggtctacctcctgcattgctaggtagttgcaacgatcgagctaagcagcttcacgcttctcctccagggagacttcttacggcaatgatatgtgaataccttgactgggcgcagctcagtcatacgctaaaagtttatcttccgggaatggaatttggagaaagatttttgggagacagagcttaaggaggttagtacccaaaatggatatgatctcaacagaaacagagatagtcctctactcttggatgtgcttgaaggattcttgaagctcgagaatttatcccaagcaagagcaagtggtaggagatttgccacctcagaaactgagcctttacccaactccgaatcacggaatccccgaaggcattcttcctcatctgttgccggtggcttacctccactaggaagggccgttccttcatctcaggcatctgatagaagaggaggatcctccatgtctgcttataggaaggatgattacaattggcgatatgacagggatgaacttcctgaggacataattcaagcttcaagtgctttggaaaatcttcaattggacagaaaagctcggaatctaacatcttcttggcgacacgctggagatggtatcaatgaggatgatggcagggatcacgtgtagggacagacatcgcatgcataattgcaatctgctcctgtattttactgtgtattcttaattttctgcctctgatgatgattgaatgagcctaatttgatgtaagatcatttaattgtgatttttttagttttttttatgagctattttctctctacagtttccctttttgggttatagttgaaaatttattgagtttcgatagttttagctcatgcttgcaaacataaaagcaccaaattaagggccatatattttttagcatctagtaaaaaatgttttgcgagtgaaaa

SEQ ID NO: 34863 - DNA, 306 bp, Glycine max
  unsure (1)..(306): unsure at all n locations
  Clone ID: PAT_MRT3847_131484C.1
atgcacgccccctgcctacccccgaatctcgcccttggggtcaaggcccaccctccgatgcatgtcccaccccatccccgatgaagtggagcccacctcaccgcatatccggctcgccattcatcagccccantctactatccatgcatctatcggccgccgtctggcctctctctcgctggatctaggagcatgactatcgcccctgcgcccccctgatctaaacnctccccccaccgatacccatctataggaatatgaatatgatactatnncaccacccagggggggcattgattggggggg

SEQ ID NO: 34864 - DNA, 218 bp, Glycine max
  Clone ID: PAT_MRT3847_131485C.1
ggttttggaaaaaacatcaaccaggcaaaagatataaatgagcaaacacctcagttcgctagccacctggttcaataaaaatcttataggatccaataataacccagcgggaaggtttgtaccattaggatacaacaatgctactttgagttctatgaggttatatccagctctaccctgaacgcatgagtgacaaaatataaaaaagaaaaagcgat

SEQ ID NO: 34865 - DNA, 251 bp, Glycine max
  unsure (1)..(251): unsure at all n locations
  Clone ID: PAT_MRT3847_131486C.1
aggggganaaganggggttatctgtgatgccgacactactgctggagaacctatttttactaacaagaggcacgctgttgtcatggttttcagtcattctgatgttgttgctgaagtgccatggtacggtattggacaagaatacaccttgttggaaaaagatattcaatggtcctttgggtggcctgatggtggattcccaggaccttagggtccatactactgtggtgttggcgctgacaaggtttttt

SEQ ID NO: 34866 - DNA, 457 bp, Glycine max
  Clone ID: PAT_MRT3847_131487C.1
tttttcaactaataacaatatatattcaaaatagtgtgttaaacaaggtgcccttagtatttctcatatcaaatttagaacgataaaaatgtgtgacacagtagaaacacacaaaaggtgtgtttccagtactaataactataaaaaccctgtcgttttgcaggcacgttctttttacttaatttcatccgcattatctgatccagtttgtagtggcgttttggaaggaatttcaaaattgtcatcttccaagttccacgcattaaaaatgctgctttttcctggaagatctccctgcattaagtctcgaaggatcaacagcattttcttgaacataagcatctttcatctcatcaccattaccagccttgaaactttctcctgaatctggtgctgactgccatactcttttacttccaacatttttagaggtttgggggtccatgcctctggatgc

SEQ ID NO: 34867 - DNA, 559 bp, Glycine max
  unsure (1)..(559): unsure at all n locations
  Clone ID: PAT_MRT3847_131488C.1
atccaagtgatgttgccgtaattatttctgggaaatgcaaagagatggaaattccacttcatgattgaaacagaactttgctatgttcaatattcatatgggtaatctggatctcctgaggaagaagatggtacttgacaccatggatctcaaagatcctcttcaattccaagagaagttccgttatcctaatgtttcgctcaccgtagttctgatggttgatggtatgttgcacagataagcacagctttagcttgtccatattctcaattccttttgctatcatgctgtgttttggattccaatactttggcttgctctcaatgtacatttgtattgattttgagtgcaaggatggtctccatagaagttgaaacatcaatggtgaaatcaattgaatcccacatctatgaactccatcaataacgcagcggtctccaatatcaaaagggtgcatgacgaagacaaagatgatggcctccaacacagtcttgcaagtaccttggaaggcaacacctatcanaacaaactgtgtaatacagaataatattatccttga

SEQ ID NO: 34868 - DNA, 305 bp, Glycine max
  Clone ID: PAT_MRT3847_131489C.1
ggcattcttaagctccttagtgctgctccttgcagctctaattctataccctcaagtggtcgcaaactatgacaatcccccagtgtacaagactgccactgagaaaccaccaggttataagcgccccacttgagaagcctcctgtctacacacctacagttgacaacctcacaatttatatgcctctcagtagagaagccaccagtgtacaagcccacagttgtgaaacccgcagtttataagctcacacttgtgaaaccacccgcgtacaagctcccagctgataaaccaccagtgtacaaccc

SEQ ID NO: 34869 - DNA, 244 bp, Glycine max
  Clone ID: PAT_MRT3847_13148C.1
cgtgcgtctgaatacaccgatcggtcaccgtttggttttcgcaacactattttttcaagtgaaaaaagaaaccggttgccctgttttcatgtgaaaacacaaacacagatgattttaatggtggatgatagtcaccgcagcgcgagactgctatgccgtccgaagcagttcaacacaaaaggatccgacccaggaatgcatttctggcttattggatccccattttttccgcctcttaccgtcg

SEQ ID NO: 34870 - DNA, 2574 bp, Glycine max
  Clone ID: PAT_MRT3847_131490C.1
gaaaaacctaaagtcgggtagaatgacagagaagcataattttcagaactaggaggcgtggagtgtaattattccaaaaccttgtttgagttactaggaagcaaaaggagcaccgcaccgcacagcggatgcagagaaaaacctaaagtggcggaagatgacggaggtggcgagatcagtggtgcacgacgttttggggcaaagcgtggtcgacgtggaccagccaatcgtctactatctggtcaacgttctcgccgaggacgactccgctaacgcccttcacgatatgatgcgctgcgatgctcgagttccagaacagaagcttcgagctcacttaggttcttttggtgtaaccggaaatcttgcactgcagccaatgtatactttgtcaggtggtcagaaaagcagggttgcctttgcaaagataactttcaagaagccacacataatattgcttgatgaaccatccaatcatctggatttggatgctgttgaggcgcttattcaaggtcttgtgctgttccaaggaggcattctcatggtgagtcacgatgagcatctcatctctggaagcgtggaggaactatgggttgtatccgacggaagagtggcaccattccatggcacattccaagattataagaagatactccaatcatcttagaaaagttacattttgtggatgtatactggaagacacctggatcacatttttctgctcttcctcctctcagctgtcatacatgggaatatacaattttgcaatttatccaaacctatgtacaagtgacaccatttcaaggcaattttatgaacacaagaggttaaattaactactccattaaatgattttgttaaattatttggtaataacgtagtaagaggtatataagtgtgtaatttagtagtttcttaatgaaaaaaataagaggcttgagcacattgatgctgattcggctgaggcacgagcagcatcaatactagcaggtttgagtttcactcctgagatgcagaagaaggcaacaaaaacattttctggaggatggcggatgcgaatagctcttgctcgtgcattgtttatagagcctgatatattgctacgtgctgagcctatgaatcctcgtgagcttcatgctcttagagaatttttaaacacggtggttactgatataattcacttacaaaaccaaaagcttacttcttgttaagggaatgattatgcttttggaaatactggatattgataagttaaagaatcatcttgatcttcatgctgtcttatggcttgaatcatacttggttaaatggccaaaaacatttatagttgtttctcatgctcgaacgtgctagatctcatatgcagaccttcattgacaagttccgttataatgcgaagagggcatcacttgttcaatctaaaatcaatgcgaagactcgagaagaacaagttaaaaaccagcaaaaagcattagaggcaaacgaacgtgctagatctcatatgcagaccttcattgacaagttccgttataatgcgaagagggcatcacttgttcaatctagaatcaaggctttggatcgaatgggccatgtggatgaaattgttaatgatcctgactacaaatttgacttccccactccagatgatagacctggtgcaccaataataagtttcagtgatgcatcatttggttatcctgggggccccattctgtttaagaatttgaactttgggattgatctcgacagtcgtattgcaatgaatggaccaaatggtatttgcaaatcaactctacttttccagaacagaagcttcgagctgcacttaggttcttttggtgtaaccggaaatcttgcgctgcagccaatgtatactttgtcaggtggtcagaaaagcagggttgcctttgcaaagataacttttaagaagccacacataatattgcttgatgagccacccaatcatcggtctctggatgctgttgagcgcttattcaaggtcttgtgctgttccaaggagtccttctcatggtgagtcacgatgagcacctcatctctggaagcgtggaggaactatgggttgtatccgaaggaagagtggcaccattccatggcacattccaagattataagaagatactccaatcatcctagaaatgtcaaattttgtggatgtatactggaaagacccttggatcacattttttttgctgttcctctcagctgtcatacaattttgcaatttatccaaacctatgtatttcaaggcaattttatgattttatgaacacgaggttaaattaactattaaataattttgtaataacttcttgattgtaagctgtatcacttttattttgctgtaccaatcaagctgacaattcaattttgcaatttatccaaacctatgtatttcaaggcaattttatgattttatgaacacgaggttaaattaactattaaataattttgtaataaccttataattataagatgtataatttatactttcactacttcaaaaaaggggagtccgccttttagcaatgtggttacccggtgaactctttcggaggc

SEQ ID NO: 34871 - DNA, 213 bp, Glycine max
  Clone ID: PAT_MRT3847_131491C.1
tctccgacgagacgagagcaggggggttgcgtcaggaatatagaaggggatctcctctgatcgcgcggtcactgagatctaagcactcacctcttccatacacgtgtgctcgctagttgaggcgccatgggcgatgacttcgggggcccaagtgcggacaacatggatatgcccaacaatgatgattcagacagtccgatccaaagggttggg

SEQ ID NO: 34872 - DNA, 548 bp, Glycine max
  Clone ID: PAT_MRT3847_131492C.1
agagaattcatgcactaactggtcttattataactacagtagaatctggagaaaggagacacattggaagagactagactaagaaaatggattagtcttagtagactttattttacattaatattggaagagaatagaccaagaaaatgagcactgaccaaactagtcacacacattcacacacaaaacaactaatacacgatcgaacagttcaaattttaaatgatagcttatagtccaagaaatccgaatcctgaacactaagccatagacttcaactgggcaaccagatcagtgatgaatttgttctgaattcctttattcaataaaaactccttccatttcatgtggttttcttttatttgcttccctggctctttatcatcctccaccatgatagtttttactgccttcagtatatcctctttcttaaagtccccatcttcactcctattcacctctatccctgcctccaaagccttggctatgagcttagcattgaaaaactggtcagccttgaaaggcaacagcaccagttcacaatcact

SEQ ID NO: 34873 - DNA, 2397 bp, Glycine max
  unsure (1)..(2397): unsure at all n locations
  Clone ID: PAT_MRT3847_131493C.1
aaactaacagagggacaagcataattttcagaactagaggcgtggagttgagtgtaattattccaaaaccttgtttcacttactagctaagaagcaaaaggagagcaccgcctcgcactgcgcatgcagagaaaaacctaaagtggcggaagatgacggaggtggcgagatcagtggtgcacgacgttttggggcaaagagtggtcgacgtggaccagccaatcgtcgattatatcgtcaacgtcctcgccgacgatgacttcgatttcggcctcgacggcgaaggcgccttcgatgccctcggcgagctcctcgtcgccgccgactgcgtcgacgatttctcccactgccgctccgtatgcagcacgctgtgcgacaagttcgggaagcacggtttggtgaaggagaagcccgctgtgcgaagccttgcggcgccgtttcgaatgaacgagggaatggacgacgtccaagctcccaagaagaagcccgagcccgtcgacggccctcttctatccgaacgcgatcgcttaaagctcgagcggcgaaaacgcaaggatgaacgccagcgagaggcacaataccaaatacacttggcggagatggaggcagcacgagcggggatgccggtggtgtgtgtgaggcatgatagcagtgggggaccaaacgtgaaggacattcatatggagaatttcaacatctctgttggtggtcgtgatctcattgtggatggttgtgtgacactttcatttggaaggcattatggtttggtaggaaggaatgggacggggaaaaccactttccttaggcacatggctatgcatgccattgatggtgttccaaggaattgccagatactgcatgtggagcaagaggtgacaggtgatgctacgactgctttgcagtgtgtcctcaattctgacattgagaggactcagcttctcgatgaagaagctcagttagttgcccaacagagggaattcgaggacaaaatcgaaaagggtgattcgaatggagtggtcggtagggatgacatttcaaaaaggcttgaggaaatatataagaggcttgaacacattgatgctgattcggccgaggcacgagcagcatcaatactagcaggtttgagtttcactcctgagatgcagaagaaggcaacaaaaacattttctggaggatggcggatgcgaatagctcttgctcgtgcattgtttatagagcctgatatattgcttcttgatgagcctacgaatcatcttgatcttcatgctgtcttatggcttgaatcgtacttggttaaatggccaaaaacatttatcgttgtttctcatgctagagaatttttaaacacggtggttactgatataattcacttacaaaaccaaaagctgactacttataaagggaattatgatgcttttgagaagactcgagaagaacaagttaaaaaccagcaaaaagcattagaggcaaacgaacgtgctagatctcatatgcagaccttcattgacaagttccgttataatgcgaagagggcatcacttgttcaatctagaatcaaggctttggatcgaatgggccatgtggatgaaattgttaatgatcctgactacaaatntgacttccccactccagatgatagacctggtgccacctatacttaagttacagtgatgcaatgctgggggatcttcagcccagttctgggactgtcttccgatctgctaaggttcgtatagcagtgttcagtcagcaccatgttgatggactcgacttatcctcaaatcctcttctgtatatgatgcgctgctatcctggagttccagaacagaagcttcgagctcacttaggttcttttggtgtaaccggaaatcttgcgctgcagccaatgtatactttgtcaggtggtcagaaaagcagggttgcctttgcaaagataacttttaagaagccacacataatattgcttgatgagccatccaatcatctggatttggatgctgttgaggcgcttattcaaggtcttgtgctgttccaaggaggcattctcatggtgagtcacgatgagcacctcatctctggaagcgtggaggaactatgggttgtatccgaaggaagagtggcaccattccatggcacattccaagattataagaagatactccaatcatcctagaaatgtcaaattttgtggatgtatactggaaagacccctggatcacattttttttgctgttcctctcagctgtcatacaattttgcaatttatccaaacctatgtatttcaaggcaattttatgattttatgaacacgaggttaaattaactattaaataattttgtaataaccttataattataagatgtataatttatactttcactacttatcaacaaaaa

SEQ ID NO: 34874 - DNA, 587 bp, Glycine max
  Clone ID: PAT_MRT3847_131494C.1
atgtaattcatagattttgagaatgtctagctgtgggtgtggaagcagctgcaactgtggcagcaactgcagttgcaacaagtactcttttgactacgttgagaagatcacaaatgagactctagttttgggtgttgggccggtgaaggcccaattcgagggtgctgaaatgggtgttgcagctgagaacggtggctgcaactgtggatcaaactgcacttgcgacccatgcagctgcaagtgagatcaacatgcataaccttcaagcagagatagctgtaatacatgtatcaataaataataagtatgtgttgtgtttgaagttttagaataaagtggtcatggcccgcctttgcaaattcaaatgttctaggatttgttacgggtgttttaagctgtggttgctttgtgtttggttggtctcttataaatatgtaatttgaatcgtcaatctctgcttataaatggaatactattggtgttatgtgaataagaagcttatgtaccaaaaaaatatgaataagaagcttgttgggttacttcaaaagggggggcccaaacccattttttttaaaaattaaaacccg

SEQ ID NO: 34875 - DNA, 273 bp, Glycine max
  Clone ID: PAT_MRT3847_131495C.1
cgaacactgattgcccttttagaaaactttttgagagggcatctcatgatccaagtgctttttttacaagatatgggcgcaaacacaatcatgatgttccaactgcaaggaataattgccattacattgcaacaccagcgtgtgcaagtcaacatacaagaaataggcccgaaaaaagagataccatcagccttaaccttgggattggattcagcccacctactaataacacaccaaacattcaatgtagaactactccttctcaacctgaat

SEQ ID NO: 34876 - DNA, 237 bp, Glycine max
  Clone ID: PAT_MRT3847_131496C.1
gaaaaaccacaaaacccaaaaaaaaaaaaaaccaccaacccatgttttccttccttaacaccatcattttaatcctggcttttccaataataatttttggttctggggcctcttcgttggccttgattaccattccaccaccattttacaagttcttaaccaaccccggcttgccaatggcctttttccccaaggccttccggaattccccgttggccaagaatgtaactttttggt

SEQ ID NO: 34877 - DNA, 127 bp, Glycine max
  unsure (1)..(127): unsure at all n locations
  Clone ID: PAT_MRT3847_131497C.1
ccaaggcgcacgttagcacaaaactatcatgggccacggcaaacancagcttgccacctcgtnctttatggggacgcnnctccnggaagntnncttcggggcngggccaatttcnngnccnnnttcg

SEQ ID NO: 34878 - DNA, 538 bp, Glycine max
  Clone ID: PAT_MRT3847_131498C.1
gatgagagcgcggatcccattactgatgctgggatttgttttactggcataagtttctgtctcattaggcattgcgtcttgggaaaagcaaagccccaatcacaactagtgcctccgaagttgcaataccgataaagacttctacaggaaccaagcttgccactctcgttgcgacctccttaatgtggaggaagaagaagaatgcgcagaatgtcaaattccgcgaccacgaccactacacccggagagggaacgtcagctacacggtgagaaggaggaagacgaaagagagcaggcacgtccattaccattcccactcccacgccaacctcatcgagaggaagagcacgagctgaaggaggaacactaatggcatcgcatggaggaaaaacacggaggatagggaagtgaagaggaacaagatgaacgtgaacacgcacgcgcacaccaacctcatcaaaatgaagatgacaagcacgaatggcgacacttgccagatgagcaccaaggaaatgaaagtgaagcagaagacgatgac

SEQ ID NO: 34879 - DNA, 326 bp, Glycine max
  Clone ID: PAT_MRT3847_131499C.1
accttgagagccaccttattgtagtcacagaactcaaggaagaaatccacaggggtgtcgctgctgctggtgaccgaggaatcactacccaccgtccagtacttgcccgtggagtctttgatgttgtaggcgccgtcattgaattccaactggaagacatcgtaactggaacggttggcatccagagtgcccgtgaccttgcggcagccaatgaacccgtgttccccccggaacacgatgatggggcggttaatcagcttcatgaggaagagttccgagtcccctgctgtctccaccggggcggccgctcgcgatctagaactagt

SEQ ID NO: 34880 - DNA, 261 bp, Glycine max
  Clone ID: PAT_MRT3847_13149C.1
actatacatgttgtagtagtgtggatgacgaagatacctcactggattagattattcagggaaaacccactcttgctcatttcccttctcttcctctaaaacaccaaacctctcttgtttactttctatcaaacacagtgcgtgcttgtttgtacgtgttcttgttctcacgttctcctaattgtttcggtgtatgagtgacttacttggtggactaacaccatcagtaccaggaagactgcagcgatttcacctccgagg

SEQ ID NO: 34881 - DNA, 694 bp, Glycine max
  unsure (1)..(694): unsure at all n locations
  Clone ID: PAT_MRT3847_1314C.1
gncgcacttggcccgtgtgtgctttttttttttttactaaaatcacctttcacataaaaaaaaaaaaatcaaatacaaatttttacaccagactcattttttattatgaaaattaattctagaaaatcaaattgatttatttgattttcttcaaaaacactcatctatacttgtagaagagtacttctccgcatccaaaatttcagctgtccttcacactctttcccttctttcccttcttctactatcgctataccaaagcaaattcgacatctcatatttcagttggttggacaaaatccagccactgagaatacgagctcgagatgctaaaccaaaaaagaaagtgtactttttaaaagcataaaacaataaacctgtaataagagtattaaatttgcacacacaacaacaaaactaatctttctactttggaataaactcaattttgatgcctcctatgatgacatctcctttcccaaccttaggcaccaaagtaaccagcacaacatcatcttcttcagcttctaaacactccagcactttcgatatccctaccttaaaactagcgttgatattatggccttgtccatggaacaaattaacaaaagttcccacaaactctgtctgatccggttcactcanattatcttcatcatcatcaatatgaacatcaaacttaacatatttatca

SEQ ID NO: 34882 - DNA, 324 bp, Glycine max
  unsure (1)..(324): unsure at all n locations
  Clone ID: PAT_MRT3847_131500C.1
ccgcagaagaggagaaagacggaccggcgaaaagggggccacnccgaacacacaggggcaacccaccaaggcaaaacaggggnnnnagcacggggggcccaagccccaaggcncggaannnaaanaangncnggggcacgcaagggaaaaaaacngcaaaggccaaanacnngagcacccaacgggggggagaggagccnancagggcgcaagcccaagggggccacgaggaaagagngacgnnccgcgaagggganccaggccacagaagagcagcaccacacgccccaacccggcggcaaagccaccaggggggggngcccc

SEQ ID NO: 34883 - DNA, 432 bp, Glycine max
  Clone ID: PAT_MRT3847_131501C.1
gttcaaaaaaaaaatattagtctttaaaaagccccctggtttttcgttagggcttcttttaaggcccttgtgttctaaaagagccccttctgaaaaggggggaattcctggttttggcctaaattccccacccccctgatttttttttttttcccatttttgggggcccaaaagggaaaggcgggggctttttaaaaaacaacgtttgtttgatagggggggcccataaataaatggggggcccataaaaggggcttgcttccaagggaagggccaacaggggtggttccaggttccaccccccttgttttatgaaggctggggttgctttttcccaaagtttttgggggggaaacccgagggcccttatttttggttcccttccccggcccctgggggaccctgaagggttttgttttcccggcttttttg

SEQ ID NO: 34884 - DNA, 327 bp, Glycine max
  unsure (1)..(327): unsure at all n locations
  Clone ID: PAT_MRT3847_131502C.1
tggcgcggnggggaagggcgnacngaanagagagaggaaacccnatcgagactcttttaacagagaaagcactcaagaagaaaaagggtctgagactgaagcacaaccctgttgtgtttgacaagaggatcatggcgaaggaaatgatattggaacgcttttttgggggggggatnaacanaccanctnnatcaaacaacgcctaatgcaaaaaaatctgtgtccaatacgaaacacaacttgcttggcaacatgatggatgtgactccctgccccaggcaattaccaggaccatgaaggaaaaaaatttttggcacaatggaccca

SEQ ID NO: 34885 - DNA, 594 bp, Glycine max
  Clone ID: PAT_MRT3847_131503C.1
ggggcggcttttttttttttttttttttttttttttggggttaagtggtaggatttaatttgagtttttgggttttactttatacagaaaaataaaaaaacagaatttttctttttttttcaaataatattaaaaatattttttttataaaagtgaagttattgagagttgtttctttgaaactcaacctctaacataaaaaactcttaaataaaaataataataaatttagtggatagaggttcttgaatttaaaaattcagttaaagaatttttattaaagatgatctgatatgctaaaatatttagatgataaaatatacttaacaaaaattaaaagtgtcaaattgagtttttcttttttttgacagctagtgtcaaattgagttagatagtattatatgtagactagtttgatgtttgcgtaatttgggtgcatgagtcaaatagacagcacaaaagattacaagagtactgtatgaaataagtaattcataaacacatgttgagaaagattaatttatatccaatgtaatttcacattttaatgaatgttttactagataattttattttaaaatctaattttagaat

SEQ ID NO: 34886 - DNA, 260 bp, Glycine max
  unsure (1)..(260): unsure at all n locations
  Clone ID: PAT_MRT3847_131504C.1
gaagctgttgctctgaaaagacaagaaganctcatccgtgaanaagaagctgcatggcaagctgnnagtgatcaaanagcaaaacgtnggggtgagagggaaaagaagtccnagaaaaaacaggccaaacaaaaacgtaacaaccagnaagnanaggataaagngngggaggngaggactgctgtttctgtaactgacaagnaccannacaatgcngttgatgagaaannttattctagcatggaggaggctcaatcttt

SEQ ID NO: 34887 - DNA, 466 bp, Glycine max
  Clone ID: PAT_MRT3847_131505C.1
ggagagagaactagtctcgagtttttttttccttctcatttttttatttattttaaaaatagttcactaaaacaatttcacattactcaactatcaatttctcatccaaaatctattaagttctgaaaattgtttccaaaacaagcgttttaaaaacaaaaaaatagaaacaactgagtgatattttctcattttcttcttctgttttcatcttattcaacctcaatttcacactctattttgtgccttgcaccaccctccaccagctgtcccagtaaccttgtttgcttgcattttgaaaactgaaaacagtctctgaaaaaaaaaaaaaaagaaatcaaacacacccttggtattctgaaaccaatttgtctttagtcatttagagtaacatctttacttcaagggcatttagaataagcagattgtattagccgggtcatttggattcgtataagttgtggtc

SEQ ID NO: 34888 - DNA, 667 bp, Glycine max
  Clone ID: PAT_MRT3847_131506C.1
gtttgcttaagaaaaggaaaataaaaatactaacaaaagagagaaaagaagatgcagtgagtcacagtcatagaatagaaacagaggcaccatttccgttttccaacaacctctaccctaacgccgttataacggttcgtgcttccgcgacgcgacgcttcaactgtgaaacggacgcgacgtagtttatataaagcgccgtccctttccgtttgtgcgttaatcaatcagcaagacgatgaccagtgccgaattattttccctcttttctctcagtttttagtttccgagaagaagtacggttacggaatcttgctggaaattgagttatcatgggatcagcttgttgtgttgctgcaaaggatcctaatcttcctaacagaactggggatgaaagtttgcatagagatgttgtgtgttcgccatcatggagctttcaatgggatagccgggggcgtgttgctgatgaaattgagaatccttcatatcacacatcccatgtggacagtagaaatgtcagcatggagttaaaaggttcgttaagttctgaaagaggtaatttatctgatggtggaagcatcctggagaattctgtaactcctatttctctgaagtcccctgttgatgaggcattggttgcaaatctgatgaccccctcttctgatct

SEQ ID NO: 34889 - DNA, 298 bp, Glycine max
  unsure (1)..(298): unsure at all n locations
  Clone ID: PAT_MRT3847_131507C.1
gccactcngtttcgctcgcatgaacgcagcaggcgggacgcaccatgcgacaatcccagcacaattcaacgaaaacaggacaccacctggatgctaaccacggcagcgaggcaagccgcccggtgaatgaacaatctacaaggggcgcttggctcaggaggaccccagccaaggcgcaactagggatacaatggctggaacatggagtgatcgaaaccgtgcccaggagcaccggcctgcagtgaccgccccaggcaaaaaaaaacagtcgagtcaattaattcccgtgctgtgaccc

SEQ ID NO: 34890 - DNA, 352 bp, Glycine max
  unsure (1)..(352): unsure at all n locations
  Clone ID: PAT_MRT3847_131508C.1
agcatcaattatcagttatcagcatggtcaaaactgtagtttggtccacttttgtgagaccgcaatataaacctgcacatttcaatcactcaccccttccatttctgaagctcagtacacccaatttgagctttcgtgggaccaacacagtacataataagcgatccaattggccaaaacctttgtcactgcgctcaaaatctgttcttgctgttgctggggctgaccctttggaaatggcagaggattggaaccgcacagcccttcttgtgatcgacatgcagaaagattttatagaagatggnggtcccatgctagtaaaaggagggaaagacattgtcccaaatgttat

SEQ ID NO: 34891 - DNA, 1372 bp, Glycine max
  unsure (1)..(1372): unsure at all n locations
  Clone ID: PAT_MRT3847_131509C.1
aagaggaagagtcaaaagagagaaacagaactttgcaggggagaaaaaaaattatatatataaaagcgagaagagaacgtgcagtgagtcacagtcatataaaaaaagcaaaggcaccatgcgcgttttccaacaaccgggaagataggcttttggtaacagtttgtgtaagttggctcgaccgcagagaagaaggtggaaagagagaaacagaagtttgcagaagaaaaggaaaataaaaatactaacaaaagagagaaaagaagatgcagtgagtcacagtcatagaatagaaacagaggcaccatttccgttttccaacaacctctaccctaacgccgttataacggttcgtgcttccgcgacgcgacgcttcaactgtgaaacggacgcgacgtagtttatataaagcgccgtccctttccgtttgtgcgttaatcaatcagcaagacgatgaccagtgccgaattattttccctcttttctctcagtttttagtttccgagaagaagtacggttacggaatcttgctggaaattgaggtggcttttgacttttctattgtgattttctgttatcatgggatcagcttgttgtgttgctgcaaaggatcctaatcttcctaacagaactggggatgaaagtttgcatagagatgttgtgtgttcgccatcatggagctttcaatgggatangccgggggcgtgttgctgatgaaattgagaatccttcatatcacacatcccatgtggacagtagaaatgtcagcatggagttaaaaggttcgttaagttctgaaagaagtaatttatctgatggtggaagcatcctggagaattctgtaactcctatttctctgaagtcccctgttgatgaggcattggttgcaaatctgatgaccccctcttctggtaaatgctaaactaaaccctgaactctgttattcttttgtcctttaccataagctagcacaatgtttgatgtttcttggttaaaacatttaggtctcttcccccccccccccccccccttctttttttgaggtattcttatttttggttacataaaataggatttcaacatctataatacaacagttgaaatgcagtctctgtttgtgcagaggtggagcaattttcccacgagaatactcctctgttacctgtagtcaaccttgatattgaagccctttgaggatgcttatccaaaaattaaaacctgcaccatttactcatactcatgggctatatcactatgataatgaatacaaataataggcctgacaatgcaacacacatataaatgaacaatataagtaaataacaagtcaataggtttctgacacacttggtgggatttttagatatctttc

SEQ ID NO: 34892 - DNA, 208 bp, Glycine max
  Clone ID: PAT_MRT3847_13150C.1
gtcagctaggtggccttcagcttgacctatatgctagagctttggtaagccgttttattgtcatgacgcagagaactgtttgagacaactttgcacgtcttactcaaatggcagcaattctaaatttagaaaagggttttgagatactagatttctgggctgagaactcttgacctatgacctggcaattaactgcacctgaagtgat

SEQ ID NO: 34893 - DNA, 206 bp, Glycine max
  unsure (1)..(206): unsure at all n locations
  Clone ID: PAT_MRT3847_131510C.1
tattaggatgccctgtgcctcaaggacantcaaccagacatattnnctagctgaattnnnacagacgtatatgatcactcgtctcataccacannggtggttttgtgatggttgagattaatcttttcaattacgggtgtccgtgccagaacgggaagcatgtccaagatctgtgcagtgggcgccacagctgaggacgcctgtgt

SEQ ID NO: 34894 - DNA, 972 bp, Glycine max
  Clone ID: PAT_MRT3847_131511C.1
ttttatacatgtatacaactccgattgaatgcagctagcagctttatctacctagctctagcaccaaagaaaaaaaaaaacagcaaactaaatttccctcaactacatacgtatgctacagttggaaaaaataaaaataacgaactatgataaaagaatttaaaaattctctttatgaaaatcaaacttggtgttggttttcctggaaaagtcaagagaaagcctcttaagttctccaaccaatgtgtgcgccccacagtagaaaacacctgaaaataattgaatgtattgaaaatgagctaagatcatatatatatatatatatgatggtataatgaatttgaaaaatgaatcaagagcaacatcagtacttaccaactcttttcccagggtgtttgagtgcagtgtgtttgaaaacactgcgccaatttggtctagcaaagtgtgtcttgacccttgtccctgaaactatatcaacgccacttttggcatggtggagcgattgaagcatagtgatcaaagcagatcgagcatctccttcttcatacacacttgtgcaatagttgtgaagttctattattccatccttgtcatactcggcaacatcatccatcacacccttgaaccattcaaaggaaccttgctcacgagtaacccagtagaaataggcgcggttggtggcaaaaggtttcctcttgttcttgactccactttctaccatcccttcttctatgtctttctgttgtttcatgttgtttagcacatctttgagaatactaatcaaaggggtggcaccaattcctagtcccacgagaaggattacttcgtagtttttgtagtcttgtgctggagctccataaggaccatcgatcacgagctttggcatccttggtatgttgttgccttgtaacatatcagctcgtagaagaccaccccttctgtcgtcttcccacgcgtccgcccacgcgtccg

SEQ ID NO: 34895 - DNA, 1027 bp, Glycine max
  Clone ID: PAT_MRT3847_131512C.1
attgttaacgacgtaatcatttcattttatatcaaaatgaatacaatttttttatacatgtatacaactccaattgaatgcagctagctgcttcatctacctagctctagcaccaaagaaaaaaaaaaacagcaaactaaatttccctcaactacatacgtatgctacagttggaaaaaataaaaataacgaactatgataaaagaatttaaaaattctctttatgaaaatcaaacttggtgttggtttttctggaaaagtcaagagaaagcctcttaagttctccaaccaatgtgtgcgccccacaatagaaaacaccaactcttttcccagggtgtttgagtgcagtatgtttgaaaacactgcgccaatttggtctagcaaaatgtgtcttgacccttgtccctgaaactatatccacaccacttttggcatggtggagcgattgaagcatagtgatcaaagcagaacgagcatctccttcctcatacacacttgtgcaatagttatgaagttcaattattccatccttgtcatactcggcaacatcatccatcacacccttgaaccattcgaaggaaccttgttcacgagtaacccagtagaaataggcacggttggtggcaaaaggtttcctcttgttgttcttaactccactttctaccatcgcttcttctatgtctttctgttgtttcatgttgtttagcacatctttgagtatactaatcaaaggggtggcaccaattcctagtcccacaagaaggattacttcgtagtttttgtagtcttgggctggagctccataaggaccatcaatcaccagctttggcatccttggtatgttgttgccttgtaacatatcagctcgtagaagaccactctggtcaccacttgctggttgacatgccttagcaaaaacagctttcagttgtgatgtccaatcacccaaagtcctaatgtgaacgcttacataatcatctcctggggctgatgtaatagagaaaggatgcctaccggacgcgtggga

SEQ ID NO: 34896 - DNA, 505 bp, Glycine max
  Clone ID: PAT_MRT3847_131513C.1
tttttgttaacaacgtaaccatttcatttatatcaaaatgaatttttttatacatgtatacaactctaattgaatgcagctagctgcttatctacctagctctagtaccaaagaaaaaaaccccaacaaactatatataactagaaactttccctcaactacatacgttacagttggaaaaaaaaaaatacgaactatgataaaagaatttaaaaattctctttatgaaaatcaaacttggtgttggttttcctggaaaagtcaagagaaagcctcttaagttctccaaccaatgtgtgcgccccacagtagaaaacaccaactcttttcccagggtgtttgagtgcagtgtgtttgaaaacactgcgccaatttggtctagcaaagtgtgtcttgacccttgtccctgaaactatatcaacgccacttttggcatggtggagcgattgaagcatagtgatcaaagcagatcgagcattttctttttcatacacacttgggcaat

SEQ ID NO: 34897 - DNA, 350 bp, Glycine max
  unsure (1)..(350): unsure at all n locations
  Clone ID: PAT_MRT3847_131514C.1
atgactcttccagacgcacttatgactgacgatatagacacacataatacggcctacgggtatactgcaatctctgtagaatctccacgtgctttgcatgaccgagggttcaacggtgtctcgcagttactagaatagaatgaccagcttcggcagatgatgaagatggtgcttgaactcctaaatgaacctcttatcgcgacattacatatgactgtcacagtgatcgactatcacaagaactttgtcctgataaggattgagattaccgaatcactatcagaatagacggacgtggtttcaccaagtgtacccatgggacgaactcctnctcagattgcacttcatga

SEQ ID NO: 34898 - DNA, 247 bp, Glycine max
  unsure (1)..(247): unsure at all n locations
  Clone ID: PAT_MRT3847_131515C.1
atcatcatccnctctncnccaanggataaagannnagaanggtcccttcattntctcacacaganaaatggcagcgtcagtttcgtgatcatggtaacccttccctnccnaatnaggagntctcccnnagatcctanttcttcatccctttgcatctccanttccgntctctcagtttctccaganacctctcacgnccttncntctcaaaaggtantccttgncgnnaagcacagtactgaggngc

SEQ ID NO: 34899 - DNA, 258 bp, Glycine max
  unsure (1)..(258): unsure at all n locations
  Clone ID: PAT_MRT3847_131516C.1
accagccatgtcgatcntttctatnccctcaccaacgtaccgatgtncaatttcaattncaattnctcggcagccattgnccatgttcttncacggctcaagtgataagaagagggaaagggaaagtggtaatgagcatngaggcaggcattngagngatgggcaccaagttggnatgatgaagtnnttcgaaaccgacggagaggttatccaggcactgcgggggttcaaagaaagcaacangtcacccagatcaaa

SEQ ID NO: 34900 - DNA, 391 bp, Glycine max
  Clone ID: PAT_MRT3847_131517C.1
ggctcactacatagaagaaaaggataactttgcactatactatggggcggtaccctgtgctgggctagcctagctcatccatccatcaacttctcataataaattaaacaggatggcctgggcatgctgagtatatatagaagctgtctcagccctgcccgaactgcgggccatgcacaacaccaggatagccgaacctatcacagctcattatggctttgcatggggcgagacaagagacctgagctgctctcattgtgtacgtgaggtataacatagcccatggcatgtgctgctggccgtgtggtatggggtatggccatcaatggatcttatctagggaacagaccagaccttcatcttagcacagttcctgtactattatgtcaga

SEQ ID NO: 34901 - DNA, 938 bp, Glycine max
  Clone ID: PAT_MRT3847_131518C.1
ggtggggttgggaagacaacgttgctcatcttccggaatcgcattggcggtaatgccaaagataggtttgcgatattccatcttgcgcgaacgctcagtcagttcataaccatcaaccacgggcatatttacaatcaagtcaatacgatgtcgaactccatcaggtctgcgcggtccagcgcttcgcgcccgttgccggcaaactcgacttcgcaacccagatgcgacagttgctctttccaaatcatgcggttaatggggtttgtcttccaaccgtcagtatgcgtagcttccataggcgcagcctgcggctccacttccgtggtttctatgacatcgtgcaggcgctggcacgcgatcgattgctttttgcgatcgcccgccaccgctgtagatatgtacccaactgcgattaattcttcggatcatcatccaacgaagatccgggcagctttggctacgatgcgtggccggctccatgcaatcccggccctgtttcctggatggacgccgaaatatccaaccaggatggctttaccgtcgtccctgatgcaccgccttgttcatatccttattgggagcgcctcccccacgctgcccaaccaaccacataatttttggcaaaaaaaattgccggaaaacccgaattgcacttataactttaacttcctcaaaaaaccggcacatcttggcgaaaactgccctctttttgaatcggtaaccaacaaggtcaaaaaaaaaaaaaaactggcccaccccgggctgaatggtcccatccttaagtgccacccaggattggggcaaagcgccagcaaatcgataagcccaggcctgtgccatttttcagcaaggcatcctgctcgacctgatagaacggttcaaatatatgcaccagtcttctgaggctatgccacgcccgttgtcttcccaaccccacc

SEQ ID NO: 34902 - DNA, 387 bp, Glycine max
  unsure (1)..(387): unsure at all n locations
  Clone ID: PAT_MRT3847_131519C.1
gtttgtcgtttgcctttgtgcaagatttcagtcttatccaaaaatttctcatgttattgcagttaaaaggatcttaagatatcttgttggaactactaatcatggtctttggtttaagaaaaggtctaagtttgatcttgtaggatattgtgatgtttattttgttggtgataaagtagaaaggaagagcactaggggtgcctattgatttcataaaaaatcgttggtatcttggatatccaagaagtaaacaacaatttccccattaacctctgaagttgagtatgtctcaacagtagattgttattctcaaatcatattgattaagcaacagatgttggttactcattggaatatacaaaaatttgcttctagtgtgacananna

SEQ ID NO: 34903 - DNA, 599 bp, Glycine max
  unsure (1)..(599): unsure at all n locations
  Clone ID: PAT_MRT3847_13151C.1
ctcctccccccctcatcatttcatcttcattcttctacactcccaaaccaaaaaacatcatccacaaaaaatgaattttttaacccaagctatgaatcccagatcaactagaacatgcaacagatctgataactccggtgaagaacgatgtcgtgaaaaaggttgcgaaggtgtttgaggatcgccgacagaagaacgacgtcgtgagtattatcaaccacggcactggatctgctgccggtggcaacgaaaccgatgcgagttgctgctattgtgcatttcgagtctcaaaatataataatttagattcacttttagatctacacgttacaacaacaaacaaagaaatctcaaagtcatgcgagggcattagatccgttaatggatggtagggagcgttatagatcctaaattgacaagaacaagtggcttttaaaagtctaggctttgtaattatgtctgtttttttgttactttgctctttccgtttgttgaattcttctgactcaaatcgatattgcagtggtttggtcgtacttgtaaatctggagaagaaaaatgaanaaganaaggggagaagagagagagagaaaggagag

SEQ ID NO: 34904 - DNA, 426 bp, Glycine max
  unsure (1)..(426): unsure at all n locations
  Clone ID: PAT_MRT3847_131520C.1
gaactttctggtttcatttctcttcatcttcctaaaagtttttgttctaaactttttctttcaagaaaagttctttgatcaaaaacttgggatattcggctttttcattcttttctccctttgtcaaaaagaattcgacaaggactaatcccctgaattctttttgtgtctctcttctcccttttccaaaagaacaaaggactaaccgcctgaattcttttgtgtctctcttctcccttttccaaaagaacgaaggactaaccgcctgaattcttttgtgtctctcttcttcctttgccaaaaagaattcgccaaggactaaccgcttgaattctttntgtgtctctcttctcccttttccaaaagaacaaaggactaaccgcctgaattctgttgtgtctcccttcttcctttttcaaagaattc

SEQ ID NO: 34905 - DNA, 345 bp, Glycine max
  unsure (1)..(345): unsure at all n locations
  Clone ID: PAT_MRT3847_131521C.1
gaactttctggtttcatttctcttcatcttcctaaaagtttttgttcaaaactttttctttcaagaaaagttctttgatcaaaaacttgtgatattcatctatttcattctttactccctttgtcaaaaagaattcgacaaggactaatgccctgaattcttttagtgtctctcttctgccttttccaaaagacataggactaaccgcctgaattcttatgtgtctctcttctctgttttccaaaagaacgatggactaaccgtctgaattcttatgtgtctctctacttcctttgctanaaagaattcgctaaggactaaccgcttgagatctttttgtgtctc

SEQ ID NO: 34906 - DNA, 818 bp, Glycine max
  unsure (1)..(818): unsure at all n locations
  Clone ID: PAT_MRT3847_131522C.1
cttttcctactcccctcccaagcaaacggtttcacacttccaaaatcgaaacctcaaaaaaaaaaaaaccgaaccaactctgttcctatttccacactctttagtcttttgattgataatgtcggcgtcgacgggaagcagcaaaatccggcgcatagttcgggtgaggcaaatgcttctccggtggcggaggaaggcagcggcggacgttccggctggacacgtggcggtgtgcgtggggcccagcaggaggaggttcatcgttcgcgccacgcatctgaaccacccgattttcaagatgcttcttgtgaaggccgaagaggaatacggtttctgcaaccacggtcctctcgctataccctgcgacgagtcactcttcgaagagcttcttcgggtcgtgtcccgacccgtacccgtacccggattctccacgctcgaggatttccagagacgctgccacatggatgtttccactggctttgacgtcgtaggagaatcgtggccgttgcttcgtgacgagccaatttgctgaaaatacattaatcgttaatcactaactacttttttttgggtttgtattttttaccctaattattgatttccggggtgttttttttttagttattagggaaatgatgaaaagaaagtgagccgggtttgattattattattattattttacttattcgctataagtcgagcgggtgaattggattagatccaatgttgtctattaaatggatatgtaatttggattttggaaaatacatgcaaattacttggatcaatttttgaccgnagctttccccncccgncaa

SEQ ID NO: 34907 - DNA, 448 bp, Glycine max
  Clone ID: PAT_MRT3847_131523C.1
aacgccttacactcctaacagccaacttcatttacaaccattgttaaggttccttcatgaagaatcttatggactgaatcgaaagtcatgggatgctggtgtgcttaggccatttgaagcagagatggaggaaggaaggtctcgtctgttacatttacttcaaaaatgcatgattagtgctagaaagatagatttacaaagcattccaccatgcatgaagaaagttgtttatctagattctaatgaggagcatgctagaagttacaatgaattggtaatcactgtacggcgtaatatattgatggctgattggaatgatccttctcatattgagagtctactgaatccaaaacagtggaaatttcgtagtgcaaccttaaaaaatgtgaggctttcatgctgtgttgctggacatattaaagttacacatgctggagaagatattcaa

SEQ ID NO: 34908 - DNA, 704 bp, Glycine max
  Clone ID: PAT_MRT3847_131524C.1
atcaaaggagagagagaacaaagaatcaaagaaaggggtggtggctgcttcgaaagcttaataatttgtttatttccagaacatcatagttttcgcagcagcaaactaacaaattactcatatcatataataagatggcccgttctctctcgcaagccaaacgtattggtgtccttgttgctcaatctatctccctaattcccgttcatcggcgaggttacgcagtggcatccgatgtatcggtaagagttggattgggtaatattgggcgaaggaatggaatcgtgggaggtgtagaagagaagcctgatacaagagatggttcaaaagcctactcaactgattgggccccagacccagtaacaggttactataggcccattaaccacacccctgaaattgacccggtggagcttcggcataggttgctccgatcacctccactagagcctagaggagttgctggacacccatgacatgcccaaattttacttaggatttggtttggtttggtttggtttggtagggtaaccttgtgttgttgttccaaaaaataaaaggttttgttaaagttaaactacttcctatgtaccctagaatctacttttaaggttatggttcttattattagtgcaataaaattggttgagatgactaaaaatcgtaattagtatatgtgagaagagcgctagtggcatatgcgg

SEQ ID NO: 34909 - DNA, 700 bp, Glycine max
  unsure (1)..(700): unsure at all n locations
  Clone ID: PAT_MRT3847_131525C.1
cgtaagnctcggnaattcgggctcgagaaaaaaaaaccgaacccactctattgagttgagtcttttgataatgtcgtcggcgtcgacgggaagcagcagcagcagcaaaatccggcgcattgtgcgcgtgcggcaaatgcttctccggtggcggaggaaggtggcggtggacgttccggcgggacacgtggcagtgtgcgtggggcccagcaggaggaggttcatcgtgcgcgcgacgcacctgaaccacccgattttcaagatgcttcttgtgaaggccgaagaggaatacggtttctgcaaccacggtcctctcgctattccctgcgacgagtctctcttcgaacaccttcttcgggtggtggcccgacccgtacccctacccggtttctcctcgctcgaggattttcagacacgctgccacgtggactttgtaggaggagaatcgtggccgttgcttcgtgacgagccaatttgctgaaaatgcaatacaataatcgttaatcactaactactttttttgggcttgtattttttaccctaattattgattttttttagttattaggggaatgatgaaaaaaaggcgaagtcgagcggggtgaattggattagatccaatgttgtctattaattgtatttgtaatttgtaaaatatgcaaattacttggctccattttagagcaaggttccccttttt

SEQ ID NO: 34910 - DNA, 1284 bp, Glycine max
  Clone ID: PAT_MRT3847_131526C.1
gtgaagccaccacttgaaggtgtcattttcataaattctcaaaattccctctgcttctttgcatattcttccttggatgagtttcttttattttacttttctctccaagtacacccagtttgtgtcgtagcggcttaaacatccacaaacacacttctagttgtttctctattacacggggttgaagccaccacttgatggtttcattttcataaattctcaaatttctctcagcagcttctttgtactcttccttggctgagcttcttttattttaattttctctctaagtacacccacccagtttgtgctatatacttgtattttctctatattattacactgatcttgaagaagcatggcagagaaaaccaagaacaaggtggaggttcaattgggttgcggtttgatgggaagaattttccatctcaaaaccaataacaggactagaaaatcctctgttcattcactacccgtgaaggtttgcaacaacactgcacagcaacagagggatcaggccaaaaacgaagccaaaccctctccaaaccatgaatcaaatgttccaagagatagctccattggaaccattcctacactgaaagtggagcagaatccagcgagaaagagtagctctagtcaccgtgcaccttcagcataccaaaacactcaaaacgggagagcctcggacgctgcaagaacctcaattcaacgaagccacgactcaaatgaagagagtaaacaacaacagaaagagcacgctgttgttaactctctggaacttgctaggataagtacaagtgctaatcatcatcatcatcaaaacaacgagacgaaatccctggcgaaagaatttgtgttaccaatcactgggaatttgcttctcaatagcagcccaagaactagtattaccaagagcaaagagttgaacaccttgtccggctcctgttcttacaacagtaataatagtactaacaaaggcatgatggggaacataatgaggaagaacagcgacgagcttgcgcaatttcggagtccgaggaacggcagagtggaccctgaggtgttgaagtccatggggaatgaagcgtacaaacaggggagatttgaagaggctttgactttgtatgaccgagccattgctgttgactcaaagaaagcaacgtatcattgcaataagagcgcggctttgataggtttgggaaggtttcttcaggcaattgttgagtgtgaggaagctatcaagttggagccttcgtatggcagagcccacacgcgtttggcaac

SEQ ID NO: 34911 - DNA, 127 bp, Glycine max
  Clone ID: PAT_MRT3847_131527C.1
tttttctgtgtatgatatgttggaagtttatagactttgttgtatggggagatgggatcacaaggtgagtggtggtggctgtaaactagctgagaccactgaatagggcttaacgtctgcgttggaa

SEQ ID NO: 34912 - DNA, 416 bp, Glycine max
  Clone ID: PAT_MRT3847_131528C.1
tccttttttttttttcgtgaaatcttattaccaatgaagccaccaggccaaaacattatcatcttcaacaattgcactgcttgcaaaaacttgtgcaaaaaatatggtgattatctcgaaaaagctggggcagccttacaaacataacatgttgaaaggggaaaacaaaggccccaggttcaacgtaattgatgatttttttcaccaactgccacagtccatgaagacctgcgttattcatcatctccatggatgtcacgtctttcgttggcggccttggcctttgggagcatcttggcgaggtcttgctccccttgggcctcccatttaagaagctggtgggcacacaccgggccctaccccattccggccacgtgctgccacagatggaacatgtttgggagtttgcggaaagc

SEQ ID NO: 34913 - DNA, 352 bp, Glycine max
  Clone ID: PAT_MRT3847_131529C.1
ttccttatccctttttattagcatattctagcattgaaaatttaatcgtttatttttttaaggataatatacaatccagcataaccaaagcagagggggtacaaaccaacgaaaccgcaggctaataacactcaaactagcaaccagatacacccactatttctttggctcataaatataaatgacaagcaggaaaaaaagagaaagacacagcccttactacttatgggcccatacaccttataagatttttaggggatgcagcagtgggagagaacataatcaccgacacttgagatggcgcatgcgcggacaggcacctacgaactaattatacaaatgtcaaaccctt

SEQ ID NO: 34914 - DNA, 393 bp, Glycine max
  Clone ID: PAT_MRT3847_13152C.1
aactcccacgcatcctacaaggcctgatcttagtttataagcataactacctcatgaagaaggagagatattttaaaagatggcgtcgaccctatcgataccgttttgtaggtcctcgctgatgacgtacataacatactcaaacatatgctcgaatcttctcacgaatttcctcaatgaaccctacaagtcctaatccctctctcgttaaaagctccattttgttctctccaaattgatcgacgcctatccttaaaaaactactattccttcaaaccccccaaaaccactatccttaattatttgtaacctttaattccttaattttttaaaaccttaactttcattgcaattttaaacttttctttatattttaattcctttttttttttc

SEQ ID NO: 34915 - DNA, 284 bp, Glycine max
  Clone ID: PAT_MRT3847_131530C.1
gggattaatggaggggtatgtatcctatcatacaaagaaagggtgttttttataatgaaatatggggggcacaatcaacatgtttgccgacccccataaaattctacgttaaatgaaccaagccagcacttggatacagggggaatattgagtgcaccatcatcagagttcggacgatttaaaagggaaacactacattcgaagcttatgggattcccctaggcatggaaagtaaaaaggcttaaaagatctctcacacggaactgataatggtcaaaaaggaa

SEQ ID NO: 34916 - DNA, 370 bp, Glycine max
  Clone ID: PAT_MRT3847_131531C.1
gtgaaactgttgatgaggatctcataaaactgcactcagtatgctttgtcaatggtatggtctgtgtgtaagctttcacctgaagagtgctcgtcgattgcggttgatgcagggcttgctgcgaaactcctactcgtgattcagagtggttgcaatcctatattgaaacagcagtctgctgagcttttgaagctgtgtagtttaaattattcagatactatctttctttccaagtgcaagcttaccagaaccatccaatgatcatggactatatcaatctggtggtgccaacaatttgtaaatttgtggggcaagagtagtaaagatcagttgcatctcaagaccaccgaactctaataaaccccaagac

SEQ ID NO: 34917 - DNA, 201 bp, Glycine max
  unsure (1)..(201): unsure at all n locations
  Clone ID: PAT_MRT3847_131532C.1
tgggttggggtttggtgcggtttgcgagggttaacgccgaacggtgggtttggagtattgaggatggggattttgatttttggggagaacatgcaagatgagtgtttgtgtttggatatgcgagatggagatgataaaagtgaggagtgtggttgggatnatcaaggataaaggatggcagagtaatggggcgttgttatg

SEQ ID NO: 34918 - DNA, 534 bp, Glycine max
  Clone ID: PAT_MRT3847_131533C.1
tggggggggggggggggggaaacgtataaactgcgtaggagtaggaaagattggaggagcggtagtatggtgcgtagaataggagtaaacgggtacaggtgttcgaaggtagagttttgagtagtgctttatattataaatggttgtgtgattagggaaaaaccagctatattgtacggagtaaccactagtatgcagcagccagtaagttaaaggagggagtaataaagcaacaggtgctaacagtaagcctatcactaacactgctactgggcggtgtctatgtgtgggcggtagtactaccagtatgcgtacttataaggtttctgttacttgccacagccctaatttaggtgtgctcggacggtggagttggcgaccacgataggcacgtagaatcactagggcgacccaaaatgagccgttgtacactaaccctgagcgttagagtcttaggcaagcagagattgctaaagtttttatgagaccctttatggtggctcatggttaatgtagtaagtaatgctagcctgg

SEQ ID NO: 34919 - DNA, 605 bp, Glycine max
  Clone ID: PAT_MRT3847_131534C.1
cccacgcgtccgacatttcccagaacccagaaccacaagaaacaaaaagggcaacactcagaaatcaaaaacaaaaaaaggggtgttgtgttgtgctattaaagttatcatgaatggctatacctgctctgggaaacatcatagatctggcccttgatggccatgaggagaggcttctcgggatcggagccgtcgtaggccttgagttcttcctcggtgacctcgccgatttgaacagggggtcgcagaggctccatctggggctcgaagtcacgcgaggcggtgttgtggcggtggtcggaggaggaggggaagaggcccgaaacgacgtagtagagggccaggatgagggccagcagggtgaagaaggtgttcggagagagccccgtgtacgcttctatggcctccttcagtgtctcccatagttgcaaagccatcttctccttctcttgttgctgctgctgctgcacactgtgtgtgtttcagtgtttgcgtgctggtgtgtgtcagagagagataagggagagttgaaaaaatgttgtcttcaactcattaatcttggtctcatcagcaacgtctcaatctccattccaatgggcgtgaaa

SEQ ID NO: 34920 - DNA, 223 bp, Glycine max
  Clone ID: PAT_MRT3847_131535C.1
cctacgaaaagacgagactaaacaattccagggccttaggaaccttaatgcacaggcctattaagctttacatgcttcctacaatatcccaaaaccagtgtttgccgcaatcttaaataaatacaccaaaggaattatgttagccatacccgatagttcttttgaaactttggagccctacaaaccaggttaattaaattttgccacagaacaacgtgatcta

SEQ ID NO: 34921 - DNA, 1818 bp, Glycine max
  Clone ID: PAT_MRT3847_131536C.1
tgaatattctggaaaagttctgtgtttttcgctaagtgctgtgaatggtggggttgtttgttttagttagaatttgtttgattttaaaggttagaacttgcaatcttgaatgaggtttttcactaggatttgttggggttattagagaagagatattttgttggcagatctgtcagaatttgtagggtgaccgttgaggtgctttatcaggatcattttttggaaggaagatggttggaagcaatgggaatgcacattcaaatggaactcttgagaactcgagccgaatcggcttgagagagaaggttgatgagattcgtgggcttcttgggaaagtggagggtgatccattgagaatagttggtgtaggagctggtgcttggggtagtgtgtttattgctatgctgcaggaggcttatggtagtttaagagaaaaagttctgataaggatatggagaaggccgggaagaatggttgacagggccacggctgagcacttgttcgaggtgatcaattcaagggaggatgtactgaggagacttattaggaggtgtgcatatttaaaatatgtcgaggctagattaggtgatagaacactttatgcagatgagattttgaaagatgggttttgcctgaatatgattgatacccctctgtgccctctgaaggttgtgacaaacctgcaggaggctgtgtgggatgctgatatcgtgattaatggcttgccatcaacggaaactcgtgaggtgtttgaggaaattagtaagtactggaaagagagaatcactgtccctgtcattgtatccttggcaaaaggtgtagaggctgaattgggcactgagccacggataataacaccaactctaatgatcaatcaagcaactggcgttcccttggacagcatcctttatcttggaggaccgaacattgcctcagaaatttacaacaaggaatatgcaaatgctcggatatgtggggcagaaaaatggaggaaaacattggcaaagtttttgaggcaacctcactttatagtgtgggataatggtgatcttgttactcatgaaatcatgggtggattaaagaatgtatatgctattggagcaggaatggtagctgctttaacaaatgaaagtgccaccagcaaatctgtatactttgctcactgtacttcagagatgatttttatcactcatctattggcagaagaaccagaaaaacttgctgggccacttttggctgatacttatgtaaccttgttgaaaggtcgtaatgcgtggtatggacagaagttggccaaaggggaattgagccttgaaatgggtgacagtatcaagggcaaggggatgattcagggagtctctgctgttagggccttttatgagctacttagccagtccagcttaaatgtcctaaatcctgaagagaacaagcatgtagccccagtggagctctgtcccatcttgaagatgttatacagaatattgataataagggaatatccagcccaggccattcttgaagcattaagggatgagacaatgaatgatccccgtgaccgcattgagattgcccaaagccatgtgttttataggccatctcttcttggtcacaagccttagagtgtttgtttttacgtttaaaagtttcaaactacagtttaactcaatgagacaatgacactagacccttggattggggtgtaaatgcattggaactctgtaatgtgaaatattaacacacctagtctaattggtttggaagtaaatttcgagacttggtaatagtatttgtaaatatcaatgcattttattcttatgc

SEQ ID NO: 34922 - DNA, 371 bp, Glycine max
  Clone ID: PAT_MRT3847_131537C.1
ctagtgccttataccttgcaacttactgttatgcaggaattgaattctattaaacctaggcactcacgtgttgtgatgaatgctgtgcagcgagaggctcctacatctcagttgtctgaactatggtcaacctatggaaagccaaggatggaaaccttatgttgaatcaaataagccaacagcattaccagagaagtcacatggatatatccaggtctttcttgatggaggtttgaaccaacaaaaaattgggatattttgatgcattttctgatgcaaagatacttaacgctactctggtgatcccatacctggaactgaatcctgtatttcgagaattcaaccttcttcctggatatatttgatttcga

SEQ ID NO: 34923 - DNA, 406 bp, Glycine max
  Clone ID: PAT_MRT3847_131538C.1
tttgcaaattttttttttcagtgggggaggattttcacggaggtttctcaacttgcccacccagtgtacaaaaaatcaaacagaatgataaacaatttttttttacgagggattttaaaataacaaaacacccacctttctcggtacataaactttaccatcctaaacaaaatttacagttctcaacaaatcaatcagggcaggactttaaccaacggggggggcttaacaatcttaaaaaactccaagttattctcaaatggtgacagcgtcaaatccaaaaccgaaactaaattggggtcagcgtttttattgggtgaagaatcaaaactactaccggcactactactactcgtggtcgaagcataaaatgtcactttttttttcaaacaaatttgtaaaattt

SEQ ID NO: 34924 - DNA, 271 bp, Glycine max
  unsure (1)..(271): unsure at all n locations
  Clone ID: PAT_MRT3847_131539C.1
tgaaatgagagttcgtaccaatatagtatttacttatcacttatcagtagtgaatctgacgggagaaatccgttcatataatcatattgtatcttaatcttttttatagtaatgtttcttgtgaccaaggcccttcatgggaatgtacacaatatctccaattaaattatttttattgtcaaaaaaaaaaaaaaannnnnnnnnnanaaaaaaaaaaaaaaaaaaaaaaaaaaaaaaaaaaaaaaaaaaaaaaaaaaaaaaaaaaaaaaaa

SEQ ID NO: 34925 - DNA, 280 bp, Glycine max
  Clone ID: PAT_MRT3847_13153C.1
tggcatcgaatcttatgtttgctttgtgtatgatgcttcatctatgtttgatctgcagcatgttgtgatctttctgcctcttccatctcttcggcaggcgccttctgttatgcagattgatgttgaatgtaggtgtgacgtcttgtgttcccttttggtgtggtctgtccttctgattggtgttttcaatgtctgtgagtcactggagtttggtggtccactggcgcattcatcagtgttctttctggttgcgggccgctgtgtcggccctgatactttc

SEQ ID NO: 34926 - DNA, 393 bp, Glycine max
  Clone ID: PAT_MRT3847_131540C.1
ctcgagccgattcggctcgaggtaaaaacagaagaacggtgttcgaatatggataatgtgatgcgactgataccatggcttcgatcactgccttgcagatcttattatttcgttcttcgaccttctcttatctatcgctctgccaatcctcttacttctacttcaccctcagaatgcaagtctgctctctcaatgagtctagggagtatgagattctatagtagaagatgtgacccacatgcccaatattaaggaccctgagcgttacaatgctgtcaaggatttgatggcggacagttgcagtgagcttccggattctgtcatatctgatcgttagaatgcactgtctagaaacactgatgacatagctggcaaggaggttgtggaaaatgt

SEQ ID NO: 34927 - DNA, 314 bp, Glycine max
  unsure (1)..(314): unsure at all n locations
  Clone ID: PAT_MRT3847_131541C.1
cggaatncccgggtcgaccaacgcgtccgatttaatttaaaaaaaaaaaaaaaaaaaaaataatatatttttaaaaaaaataaaaaaataaagaagggaaaattttaaaaaattaaaaataattaaaaaaaataataaataaaattgggggcggccgttttaaagaatcaaagtttacttacccttgcttgcaaaataataatttttttatagtgtcactaaaattaaattaattggccgtttttttaaaactttttaattgtaaaaaccttggttttaccaaattaaattgctttgaagaaaaattccttttt

SEQ ID NO: 34928 - DNA, 501 bp, Glycine max
  Clone ID: PAT_MRT3847_131542C.1
accaaccaacatggtgtgacttagttgacagataactttgtcttttaagcatgtggtcatgggtttgatactcgggtctgtgtgtatggaaaacatctgctgggagatatcaaacccttagatgaatcctagtatttcaaattattaacccttcatttccgcctggggtacactgaattcaaccaaaaatatatatttgaccacatatagaatattattttgataatttaaaaagaagttatgattctcaaactattttcataagctcaaataagcttcccataagttcttcaaaacgtccccttagttgtttctagtgatacatgtacttttcttggttgtcctcctgttttgtttttggaatttattgtatttttaagatgttagtattattatgcatagaagaaaggcttacatatttgcatgcgaaagaactcttagatcttgtagtcaatatgtaattcttgaaaagtcatactccctttctttaaagtcagggaa

SEQ ID NO: 34929 - DNA, 511 bp, Glycine max
  Clone ID: PAT_MRT3847_131543C.1
accgcaacaaaatttggttttggtccctaaaaaaaaataacttttttaaagggacaggtcgaaccccttaaatttaggagtttttaaaagaagaaaatttaacctggggggggggctcaaacaaattttccaaaaagaggaaaacaaacgggtttatttaaaaggggggttttttctggaggggaagggaggttttttttaaacattttttggaataggggaattagctttcttacaaaagggttcccaaatgacaaccttatgggtgacctaaggtgggtggtttgcttaatttaacaggtaaatttaatatcacgctccaagggcccttcttggttggcctataaacaaaaacgggggggttccccccacccaaaaaagccactttggtttttttgtggggggttcatagatgggaactttttgggggggtttgggtttccctttgtgggcatattccccatggcaactttcacaggcttctgggtaaagtttttccctttggattttt

SEQ ID NO: 34930 - DNA, 259 bp, Glycine max
  Clone ID: PAT_MRT3847_131544C.1
tttgataacacaaaatttccggttgggcctcactcccaaaaggctggctttgttaaaaaagatgggtcatcttctgtttctgctgcagatgttaaacacctgtcaagtgtgacacgaagagaatcaattgctgcatgggagaggagtcattttcataaaaaggctgatggtccctttagtaatgccccaaaacctctgtagaaaatatggacagatgatattttcatgtgcaatacaaatcatattaccctgtgagatg

SEQ ID NO: 34931 - DNA, 287 bp, Glycine max
  Clone ID: PAT_MRT3847_131545C.1
ctggttcaaaaatttcgtgaggaactgcaacaagtcggtgacgagtacttaagcaaactcggtcatatgggtgctgaaggtgggggtcacattgcgggacgagcagcctgcttgcttgacacacgcgatgaacgtgccgctactgaatcacagcataagggcactggctaggaccgtgaccctcatgaagaggctgacctggcaagttgtttcgtacccggagatgactaaaccgagcaggcacaattgagaacagagcttgctgggcctctgcatccagcttcaag

SEQ ID NO: 34932 - DNA, 285 bp, Glycine max
  Clone ID: PAT_MRT3847_131546C.1
gggctcggatgttataaaccaacagatgggaactgatgaggggaaacaactggctggctcagttgtctcttgaccacataatgccactgttaaccgaacacgacccaacgttgctgctgcattaactcgactgaagggcattggtgacttgtgcaccatgcagaccaactatgaactgtactgatattagtaccatcacaatgatgaaagcattgaatcttaccacaggcacctaaccagaataagatatatgggactcttttttacctgccacaattatatgat

SEQ ID NO: 34933 - DNA, 371 bp, Glycine max
  Clone ID: PAT_MRT3847_131547C.1
gataattgtattatttttttcatttttttaaccccaaaaaaaaaaacgggggttattccccttttttactacactcttaatggtcttcatttttcccccaccgcctcttttataacaaaaccatgcaaatcagttaacactctgggatgcactttgtgctattataaaaacatgggctcaaacaaagtactactcatatactcgctgcatatatgggccggacatttttttttgcaaaattgtggacatcaattactttttattttaattgggggggccttactctatccaccttgatagtttttttccaagtcgtgattcatacctgaagatcacacatagcctttgtacccacccccttggggaggaac

SEQ ID NO: 34934 - DNA, 123 bp, Glycine max
  Clone ID: PAT_MRT3847_131548C.1
aacccaaaaaaagcttcccttattttattgggatgactaccgacttatttttggagaggggcccatcgttgaataaaaagaagatttacttttaccgccccagaacaagggttctcatccacc

SEQ ID NO: 34935 - DNA, 1664 bp, Glycine max
  Clone ID: PAT_MRT3847_131549C.1
aatttccatgcggtactatgttttctttgcaagtactagcacaaacagctagctactatttttgaacttgtcataattagtctctaattctaattagccatacattgaacacaccagcacaccttaaacgtaagtggtatttgttccacacaggtacactatgccttcactctcagaagcctaccgagcccaccccgtgcacgttcaacacaagcaccctgacttaaactccctacaagaactccccgagtcttacacttggacacaccatagccatgatgatcatactcctgcagcttccaacgagagtgtccccgttattgatctcaacgacccaaatgcttcaaagttgatacaccatgcatgcataacttggggagcgtaccaagtggtgaaccatgccatacccatgagcctcctccaagacattcaatgggttggggagacactcttctctctcccttgtcaccaaaaacaaaaagcagctcgttcccctgacggtgctgatggctatggccttgctcgcatctcttccttcttccccaaactcatgtggtctgagggattcacaattgttggatcccctcttgagcattttcgtcaactctggccccaagattaccacaaatactgtgatatcgtcaagcgatatgatgaagccatgaaaaagctagtgggaaagctgatgtggctgatgttggattctctgggtattacaaaggaagacctgaaatgggccgggtccaaaggccaattcaaaaagacatgcgcagccttgcaattgaactcttacccgacttgtccggatccggatcgggccatgggtctggccgcccacaccgactccacccttctcacaatcctttaccaaaacaacataagcgggttgcaggttcaccgaaaaggcggcgggtgggtgacggtggcaccagtccccgaagggcttgtgatcaatgtaggcgacctcctccacatattgtcgaacgggttgtacccgagtgtgctccaccgggtcttagtgaaccggatccagcaaaggctttcagttgcgtatttatgtgggccccctccgaatgtggagatatgtccacatgcgaagctagtgggcccaaataagcctcccctttataaggcagtgacttggaatgagtaccttggcactaaagcaaagcatttcaacaaggcactctcaaccgttcggctttgtgcacctagctagctattagcggttcgtttgatgtaaaccagcctcacacaattgcttcgatccttccctcttgcatggtctattttctaccaaacatgaatgaaacacctcttctttttcttttttttgcttaatatgaatggaaacttggtggggatcgatgccaacaataaataagttcaagagggtgtatatgtatgtagatatatttgtttggctctaaactggagagagaatactggggataagatagtctcatccgtgtttcatttgtctttgtctttgtctggaaagggacatcactaaattgtcgaagctgattattcaattcgaccacaggactcgccaaaaaacattttctttccaactcggtttctttatttatttatgttcatattatttttagggtgtaagcatttatgatatatacttttaacttgtacctttataatgagga

SEQ ID NO: 34936 - DNA, 285 bp, Glycine max
  Clone ID: PAT_MRT3847_13154C.1
ataagacccggggcctttataagaccaggccagaaagcacagaagaccacgcgcaacgccgaacgcgatcagcggcataaaggaacaacaggacactcggcatcatggaaaacagctcagggccaataaccaagaggagcaggcaagcgcagtcacttgcacacagggacctaaggaacgctaggctgcctaccagcaaaaaccccgaaaatcagatacaggccaaagtgagggagcggacgaaacttcccgggtagggggccccaccattgcatccgacgaggg

SEQ ID NO: 34937 - DNA, 264 bp, Glycine max
  Clone ID: PAT_MRT3847_131550C.1
ggagctaagagaccataagctccaatgctagaccgcccggaaccacaatgactgagtcagacccttaagagggttggaagtggccttcaccaagatataaactaatgaactaccaatgcattttagaaggggaaactattattacgtggaaaggagaggctatcccacccaagtgttaaacgccaacacatggacccaccccaggacggtgtgatcgtgcaccaacagagagatatcctttaacctgggtttcacacgcaaaac

SEQ ID NO: 34938 - DNA, 811 bp, Glycine max
  Clone ID: PAT_MRT3847_131551C.1
acaaacaaaagcaaattaagaaataaaaaaataaatagtaaattacaaaagaaagaaaaggacgaattggtcatcatcatggttctctcccctcaaacacagacacaacacaacaaggttgcaaagtgaagaaggattaagccatgaaagctctaattttaatcctcacgctatgcatcattgctgtcaccttctcatcacaagcagcaacctccatagtcactcaaccccaacccaacgaatttttcaagctcaaccaaaccaagccacagaatgatggtagttcctgtagttacacggtgagcataaaaacaagctgcagttctccctcctacaccagagattacatcggtcttgcatttggtgatgcttatggctatcaggtttatgttccaagactggatgatcctggttcaggtacattcgagcggtgctctacggatacatttgagatatacggtccatgtacgtaccagacatgttatctgtatctataccggagtggatacgacggttggatgccagagaaagtgaccgtatacagctattactaccaacctgttacattttactacaacacttacatacctaatgatatttggtatggctttgactattgtcgcggttatttaccctccggtactgccgcacagtagaggctagagtagtgtgtacccttctcagttctcatcacaaattactacaataaaacaagtacaagtccaaatatgaaccctgctatctattgtagtggaccttctttaatgtatcaagttaccatgtgatatttaattcgagacacttttttata

SEQ ID NO: 34939 - DNA, 949 bp, Glycine max
  Clone ID: PAT_MRT3847_131552C.1
tacggctgcgagaagacgacagaagggggttggggtgttctgtcaaagtccaagacggaggtggtcctccttctcttccctcaaacacagacacagacacaagaacaagtttgcaagtcatgaaagctctaattttaatcctcacgctatgcagcttctcacaagcagcaacctccatagtcagtcaaccccaacccaaagagtctttcaagctcaaccaaaccaagccacagaatgatgaggctagtagttcctgtagttacacggtgagcataaaaacaagctgcagttctcccccctacaccagagattacatcagtcttgcatttggtgatgcttatggctaccaggttcagttcctacctacggatacatttgaaaaaaaatgaatgaatccactgcaggtttatgttccaagactggacggtcctcgttcaggaacattcgagcggtgctctacggatacatttgagatatacggtccatgtacgtaccaaacatgttatctgtatctatacaggacaggatacgatggttggatgccggagaaagtgaccgtgtacagctattactaccagcctgttacattttactacaacacttacatacctaatgctatttggtatggctttgactattgtaacggttatttaccctccacctcaactactactgcgccgcagtagacaccctttttatcactaaatactataatcaaataagtacaggtccacatgtgaaccctcatatgctatatagtggaccatctattcagtattcaagtttttttttttttggtcatgaactttagtcgttaccatgtgatctgtaattcgacgttagtacgttaccatgtggtgagagactttttttttttattttttatttatatcatggcgtgtttcttttatttggaatcaactcctctttgtatgcatcgaggatgatt

SEQ ID NO: 34940 - DNA, 1068 bp, Glycine max
  Clone ID: PAT_MRT3847_131553C.1
gtgatggcgcagagagctcaaccagtattggccacagatgttttccaaatgggaaacatccaatggaagcaattcaatgttgatacatccagtgcttccttctcacctccaaaaccattgctaatttttacaccaactgttcctggcgcataccctgtaatattgttcgtccatggctttttcattcgcaatttctactactcaaagctcctagcccacatagtctcacatggacagttgaggagcaacgattatgaatccatgtgagactatgtgggctaggagctttgagtagtagaatatgcaggaaaagttgcggattggatagctgaggagcttcaacatttgcttccagagaacgttgaagccaatttggacaaactggttctatcaggtcacagtaggggtgggaaaactgtatttgctgtggctcttggtcatgcaaaaactaatctcaagttttcagcacttgtaggcacatctaaatattgtagaacacgtcctcatattctcactggcaagccacggtcctttgatttgaaaatgccagttgaagtaattggcactggattgggcccagagaagcttaattgttgtactccaccgtgtgctcctgatggggtgaactataaggagttcttcaacgagtgcaaacccccttgtgctaaatttgttgtagcaaagtatggtcacatggacatgttgaatgatgacacaccagggctaattgggacattggtgtcaaagtgtatgtgtaagaatgggacgacgggtcctagggacttgatgagaaggaccactggagggttggttgtgtccttcttgagggcacaattgaatgacctatggaaggattttgatgctattttaaaggaccctaatcttgctcccactgaagtcgatggtgtagactacataccagcatgaattgatcaacactcaacgttcgtttgcgtttttatttccctgaaaggcctataaatgtctttcgaaataatcgtctatggttatttatgtattctcgctatcctgtcatagtataagaaaaaaaaattaaaatattatcgt

SEQ ID NO: 34941 - DNA, 538 bp, Glycine max
  Clone ID: PAT_MRT3847_131554C.1
ggtattcggcgcgaggtgatggcgcagagagctcaaccagtattggccacagatgttttccaaatgggaaacatccaatggaagcaattcaatgttgatacatccagtgcttccttctcacctccaaaaccattgctaatttttacaccaactgttcctggcgcataccctgtaatattgttcgtccatggctttttcattcgcaatttctactactcaaagctcctagcccacatagtctcacatggattcataatcgttgctcctcaactgttttccaatgggcttcctatgtatggacccactgaagtggaatatgcaggaaaagttgcggattggatagctgaggagcttcaacatttgcttccagagaacgttgaagccaatttggacaaactggttctatcaggtcacagtaggggtgggaaaactgtatttgctgtggctcttggtcatgcaaaaactaatctcaagttttcagcacttgtaggcacatctaaatattgtagaacacgtcctcatattctcactggcaagc

SEQ ID NO: 34942 - DNA, 359 bp, Glycine max
  unsure (1)..(359): unsure at all n locations
  Clone ID: PAT_MRT3847_131555C.1
tcaacaaacaaaactctaaaacaggggggtcaatctacgtcctagaaagcaccctcccacaactngaccaacgaaaccgaacaaaaacccatctctgcctacctatatctgcatccaaagagggctcacaaaaacggaaaaattgaggggggggagaccttccaccaccaatgcacaatgaattacagaaatccagagagtctgcgagacattaaaaaccaaagactagccaggcagacaaaattcagagaacaggccagagctaaactaatgcaaaggtagggcactgcataaggacaggcacagcccaaggaagccacaaccagcgcgaaccccaactgcccaataccataacagcc

SEQ ID NO: 34943 - DNA, 401 bp, Glycine max
  Clone ID: PAT_MRT3847_131556C.1
atcgcaaaaccaagaataccattgaattttggttttagcacggggagcttttgacaatttgctatcgacctcatcgctggaggaattatagtggccaaaactgtagattggattgcacttatacaaaattctcctattcgtaacttggtgagagacgctgattggaagaaaggctgtttaatgatggatcttgtgatgcctctgaatgcaaaagtaaaaaggggtgatggagcctcaatgggacaagtgtttttaacatacaggtgctgtacagagtattttgatgcatgtaagtggtcaaaatcagaaccacatgcctgagaattgatcttctcaagcgaggtatgagtgcctagtaacggttttgaaatgtggagttgtgagtgggcatatgaaacttc

SEQ ID NO: 34944 - DNA, 307 bp, Glycine max
  Clone ID: PAT_MRT3847_131557C.1
ctcacatcactggccaacaaacaaggcgaaggccgcttccgagaagcgtgtatataccaagaccgcgaagacaaatgctcgcacagaagctgacgtaacactacgtgcgaacaatatcattatttacaaacaacgacaagacctgcatatacacgccactggcgcacaagataaaatgagcgcatcgtacgcgcgtgtgcttcaaggattatatgaagcacccactcttctgttgaggagcaacgctgacacacgacaggacctcgagaacttggatctcactctcttgcgtctcgacgagagtgtg

SEQ ID NO: 34945 - DNA, 259 bp, Glycine max
  Clone ID: PAT_MRT3847_131558C.1
ccagcgtccgcggacgcgtgggtttggttataaattaaaacttgttcttcatctgataaagcttatatataaacgataggtatggggtttgcttttgggatattatccatatgaatcaacatatgctgagagagaattcctgaagtcagttaagaagttagaatacgagaacataaagaaccagtggcaggttttcatttgctccaaccattcttttccattgatgtacttctctttctgctttcctactattctcttc

SEQ ID NO: 34946 - DNA, 712 bp, Glycine max
  Clone ID: PAT_MRT3847_131559C.1
tgcagctaattggtatttaattagacaaccaaagccgcaagagtcagtcagcaaggaagatggcaacaaccttcaagtactttacttccatcctcttcctcaccctcgtcatcaaagggtcatgtgatgactgttccttgaacaacatcaatattggcacatcaagaactgggagagaaatccagggccagcctgagtggaacgtgaccgtgatcaacaattgcaactgtgaacagagtcagataaagttgtcttgcaaaggttttcaaagtgcagaaagtgttgacccttcaattctttccatggaaggtgatagctgcttactcatcaatgggaatccaatgaagggttctgatactgttaacttctcctatgcctgggatcctccctttctgcttttgcctacaagctctgttttaggtccttgttcatagggatttgcttaacagaatatgaaaaagaaagaaagaaaaagcaataataatgataataactgtgaatttgaagcatgctgtggatttcagttctatgaacctttgagttttcgttgattttgtataattttattatgttttgattgatttgcagctcctaataaaacaggatataaaaaattaatatgattttgatccagaatcaatatacaaatcaatggatatcaattattgtggtgggttaaaaaaaaaaaaaaaaaacgcgagactagtctggt

SEQ ID NO: 34947 - DNA, 113 bp, Glycine max
  Clone ID: PAT_MRT3847_13155C.1
cccgtccgaggaagtgaagtttatggctacagtcccgccttcccatgcaaaatttggggaacagaaaaggttaaattcatggtaaacccccattattaatacttcacctgccc

SEQ ID NO: 34948 - DNA, 204 bp, Glycine max
  unsure (1)..(204): unsure at all n locations
  Clone ID: PAT_MRT3847_131560C.1
ccacgcgtccggttacacgcgttagtagttactcactttccttctcttcacaaacctacttgtttctctctcattttttccccactatagcatgtctctaagtctagccatcaaactacacctggncttcttcttctccttctttttcctccttaccnctcacaccaccacatgcnaacagttaacaactccgaaacttgtcca

SEQ ID NO: 34949 - DNA, 725 bp, Glycine max
  Clone ID: PAT_MRT3847_131561C.1
cttgtttattatcgtgtatatattgagaagatacatgcctatctatcatcatttcgttagcaaatttctcaaactttctctcaagatctgaaaccactctgatggagcaaagtaaggagaaaaatgctccttggttatcagtgccacagtttggggactgggatcagaagggacaagtgccagactactctctagatttctctaaaattcgggaaatgaggaagcaaaacaagacaaatatttcaagggcaagtcttggtaatgaagaggagctcatggcttcttctgccactaacaatacaagcactgtccacagtgatgaccaccagcacccccactaccaccaaaccaactctccaactacaaggaggagcttcctgagctacttcaactgttgcataaaagcttaattctcaatggaatgtagaaccttttcgtgtctccctaacgccgtggacggacaataattgtggttttgagcttggtgatcatttacttggcacttgtttctgatttaggaaaacaaatgtttcatttaagccctaatcttaaacagtgattctatattacacttgcgttttagtttgaaatttgtgtatttaatttagaggtataaagaagatggtaagcatgtaaatggcgcttaggactctttgaacctgtaccaccagctccaaaatatgatgatgaattaatccagcacagtaacgatcttcattggtttc

SEQ ID NO: 34950 - DNA, 446 bp, Glycine max
  Clone ID: PAT_MRT3847_131562C.1
cttcctctctctcttctcttctgctttacttgctctgaaccaaatggccaaagcccttagcatcgagtgctggctctttctccttcgagcgtgtgagtaatagttattgcttgtacatcttgatacttgaacactcttccacctctcttactcctcactcctcaaccctgattcacgtcccaccacactcaaccaccatcttcatcccacacaccaacatgcatactcatcccacatccaccactcaccaccatccaccaccactacatcacccagcaccatgtatccttcaccttcatcaccacaatcacacctactactcctacccctgctaatcctactactcaccatcatcaccatcaccctcctgctcctgctaatgcaactcctgctcctgttcatcctccatctaaacctactgtttctgttcaccctccaactaaacc

SEQ ID NO: 34951 - DNA, 810 bp, Glycine max
  Clone ID: PAT_MRT3847_131563C.1
ctctcctagtattaaatgcacacccatacgccattactcattcttcggttcaatctctctttttccgctgacaaaatttgagtcctttaaaatgccaccactactgtgaaggtttgaactaacaaacaatagaacgatactctcttgttgtacgagtctgcaagaagatccactatttcaaatttgctcagtgaatgtttttagtgaagcctgaattgaaaccatcatcatcgtcaaattggagaggcacaaagagaaaagcatgtcgtcgctgatgagaaaaagactagcttgctgcacaaaggaagccaaaatcagcattgattttgatgagccagaaaggattatgacatataatggccttgataattgcattccggataatcgatcctacggagatgaaagcagaactagcagaggagatggatgtataactgattcattcaatgatgatgatgactccagctcttcatccagcaaagatgcttttggatcattctcatcaaaatgttttgcaatgaaaagagatgagatggaattggaagagtgggaaatcgcagaaagtcctcaacatttctatgttaaagataagtccgcttttgacgtggtcaattgttcagatgtagaagccatgaaagaaaagtttgcaaagctgcttctaggtggtgatgttacaggaggagctaaaggcctcaatacagctttggcactgtctactgccatcacaaaccttgcagtgacagtttttggtgagttatggaaattggaacctctatctgaagagaggaagagcaaatggcgacgagaaat

SEQ ID NO: 34952 - DNA, 718 bp, Glycine max
  unsure (1)..(718): unsure at all n locations
  Clone ID: PAT_MRT3847_131564C.1
aattcagtaacgtacaagtcttcgtagactagtntgcggagaacatcctcaacaatttccttcactagtatagcttcattcctgcgatctactacatggaaaccggataaatctgcagctctgttgagtgcgctgctccacctccacaacacttgttccgcatgctctcctgaatatgttttttctacagctgattttaaagcttttccaaaagcacccttctgatgtcgaacaacggatggttcaatatcgtaaaatatgggcataactatttggtcatgaagtttgcggcattcaagaattttttcaagctcatcaagacaccaagtagattcagtatagcttttggagaaaacaaccaaagatatctgagacccttctattgctcgcatcagttcatctttcagtgtcattcccttaagtaggttctcgtcgtcaatgaaagtgttgactccagcttttgagagggcataatgaagatgagaaacgaacttccctcgagtgtcttctcccctaaaatttatgaacacatcgtacagccgtttgggtttcgattttgagaaggatgatgaaggtttcgactgtgagaaggaagaagaagaagccacgaattccatcgaaggaactgaagtcaacggttacaacagtatgcaataatgcaaaatacagagcaggggaggttgtgttgcatttttactgggcgtggcgtggggggggg

SEQ ID NO: 34953 - DNA, 293 bp, Glycine max
  unsure (1)..(293): unsure at all n locations
  Clone ID: PAT_MRT3847_131565C.1
cccacgcgtccgattttatgcaattgtaagctgatgatgattggaagatgaagaaatgtcggcatgtgattattgcggaaaaaaaaaaaaaaaaaaaaaaaaaaaaaaaaaaaaaaaaaaaaaaaaaaaaaaaaatgcacacatgcacactaactataaatatagtaatgcaaacaatattgattttgtgactactttaacaaaattagttcatgaaaatcttaaaacaaattatgcataataaaacgaaagngggtggggttgtaaaagataaaataacttgatgtatatat

SEQ ID NO: 34954 - DNA, 291 bp, Glycine max
  Clone ID: PAT_MRT3847_131566C.1
ttcgaccgcttacgggtccgtgagggcatggaaaatttttgccactataaaaggaactgaacatactcacgaggctgaggagccattttgcgtaacattgtaatggatggattaagggacatagggcatgtggatagcaagtgtagagagacagggcactaattttaagaaaggaatgatagaagaggtgaccacagtggggaattgtgaaaatacaaggatagtattggacggcgatatgcagagaaagaggagggggcgagccacttatgacctttacaccatatgatc

SEQ ID NO: 34955 - DNA, 352 bp, Glycine max
  Clone ID: PAT_MRT3847_131567C.1
ccccgcgtccggatcacacgtatgatcacggatcaataggattttctcgagggtagtgttttttggagaggaagctgggtgtttcggtcttttcctctttgtttatgtggggcgggatatcgccagtcgagaatgactttgaatggcaatccgaaaggaagaaccaccaaaaaatgggttttcctttgccgacagtcacttagcttgccgaaaatttatctagtctgaagatcttctgttctctttctttcattgatcgggaattactctgttttcctccaattgttcctttttacttcctttcgatcttcggtcgggaatccttcttttcctttactagttctagatgcga

SEQ ID NO: 34956 - DNA, 233 bp, Glycine max
  Clone ID: PAT_MRT3847_131568C.1
gggcatagcaaggtcatttctcgaatttaatcaacactgtgcacaccaagtcccttcggcgattacgaatcgcagagcattgggacggaccatgcaaagcgctcggaactccaccggacgaaaggctccgctgacgcaattggcattgaaagccgcgcggaagtcagctccggagaacggaggagtgaagaaaccccaccgcatcacgtcaggaatggtggctctgaaggaca

SEQ ID NO: 34957 - DNA, 176 bp, Glycine max
  Clone ID: PAT_MRT3847_131569C.1
tcctttttcactaaaaaattaatattccaaaaatcatttcctcttacttcccacacctatcaatacgcctctttttcaccaccaccacaagcaccgcattccccgttactttacccaaaccctcattactctacctctcatcacttatattactctatcatctcttacataccatc

SEQ ID NO: 34958 - DNA, 183 bp, Glycine max
  Clone ID: PAT_MRT3847_13156C.1
ccatcggtggtcaatctgctggctgcatcgtgatggagctctacgccgacgtcactccccgcaccgccgattaacattgtgctcattcctaatgtaagaagggcttagtgcggagcgggaatcccctccactagaacggctcgtcctttcactgcgtgattccgagtttcatgtgtcagggtg

SEQ ID NO: 34959 - DNA, 827 bp, Glycine max
  Clone ID: PAT_MRT3847_131570C.1
gttgggttttttttttttttttttttttttttttttttttttttttttaaaaaaataataattaatatatttaaaaataagttatcaacaagataatgagtacttcatgctgatactggaacgacttaaaaaaataggcctatatttcttacacactcgtaaaaaaataagcctatatttcttaacaagatttattttcaatgattaatttctcactgaaccatttattttttctgaaggaaaaatctcgcagggaaaatataccatctttatttttctgaagccggagcaccatgaatgatggcatcccaataagtatcatcccattcatctctgtacttttcattcatttcaacaaagttcttaaagcactgtttaagcatattctctttccattcttccaacggaggcaatccaatttcagccactagccagtgtttatagtcagcctgaagtggataaagggaatgagtgtaacgcttgggcaacccattttcctccatgagttgatagtattctttaacagattccatcatttccttttctgtaggtaaaagaactttaccagacaaaacttttgcaacccacttgcattgcaactcaattatttggtagactgaattcttgaaggttaaaccaatgaaagagagccatggagacaatgcaggaggaaagacgtgtttgtatagtggcccaacgcgattatcatcaacggttactagtccattggtttcaaggaaaggaaagtggtacttgtatcctgtacagtggattatggcatctgcataaacggagaatccatcttcaaaggcaaccaaaccatcttc

SEQ ID NO: 34960 - DNA, 134 bp, Glycine max
  Clone ID: PAT_MRT3847_131571C.1
ggtccggaattaatctccaggctcgacagagttcttcctcgatcatgtctcacttcaaagacgagtaccatgatgagcggattggggatgctgttaacattggcactcatggaaacgaatttctaaccgcttat

SEQ ID NO: 34961 - DNA, 390 bp, Glycine max
  Clone ID: PAT_MRT3847_131572C.1
tcgattttgctggacatctcggctttgaagttgctaagatgacttcttcctacattaaacgcacagactgtttgttcataccattcggaaactaggctgatgacaccatagatattgaggcgcgttccccacaagctggagcagtttggagagatttaggaaaaagtggtatggaaatgttgacaagaggaatttattacagcttggtcaactcaggtgcggcctacaacaactctgttggctgatgggtgttcatatttgaatgctatggtgcatgaaagtgcagtggctacaataccaggtgattctgtcattggtgttgagtggacaaccatcaacaatatgggtgcatatgggctcagtgctggccatacaggatattgaatattg

SEQ ID NO: 34962 - DNA, 334 bp, Glycine max
  unsure (1)..(334): unsure at all n locations
  Clone ID: PAT_MRT3847_131573C.1
tcgcatgcacgcgtacgtaagctcggnattcggctcgagnggctcgagctcgagccgaatcggctcgaggtacatatgcaatacgtacgatttntgganaaacacntnannnnaaggaaantgntaanntgngnattgtacnaattcttttcngttcataantttgagtgtagnggttaattccngtagatgaaantcngntntcagtgtantcaatangggttganactagatatccangtcatatcataagttttnggagctgtgctnanttgttgnggtnnggtaatgcttgatccataanagggggagncantntcgttctatnggngan

SEQ ID NO: 34963 - DNA, 515 bp, Glycine max
  Clone ID: PAT_MRT3847_131574C.1
tttacctccttccccctccttacctcgaattcgtctcggaaaaaatcattttttatcacaacaaaaaaaaaaaaaaaaggggaattacaaaaataaaggcaaaaaaaaaacataataaaaaaaatactaaatataataataaaaatgcccccaaattttttgaccggggcccccccctttttttttgccctcttccccgtaattttttaaaaggggcgcccccggactctcctcctttttcccccggtttttatttctccccccttccccctgggcccccccctttccctttttgggggggctttttaacccgggccctatctttccaaaattttttcccgggggactttttttttcccccccctaatccccaacaaattgagccccctgctaaatttccaaatccgttcgttccctccttgaggaatttaatccctttgtttgcgtgtggttataataccttttttaatggggaaaaatgtgtcctccctttttttaccagaaaccggcccccc

SEQ ID NO: 34964 - DNA, 503 bp, Glycine max
  Clone ID: PAT_MRT3847_131575C.1
ccacgcgtccgcgctaagttaagccaccatgtggacgagggctttagcgacggtgctgctgttcgtggcaggcgccgcgctgctcggcgtcggcggcgccagcgcgcagcagggcgtgtggagcatcatcactcgtcccatgttccagagcatgctgagccaccgcggcgacagcgggtgccagggcgccttctacacctacgacgcgttcatcgaggccgccagcaagttccccggcttcggcaccaccggcgacgagcagacgcgcaggcgggagctcgccgccttcttcggccagacgtcccacgaaaccaccggtggatgggcgactgctcctggtggaccgtttgcctggggatactgccgggtgaaggaacagaacccgacggacccaccctactatggacgaggacccatacagctaactcatgagtacaactacaggctcgccgggcaagcgctgaacctgaacctggtgggcaacccggacctggtggcgagcg

SEQ ID NO: 34965 - DNA, 384 bp, Glycine max
  Clone ID: PAT_MRT3847_131576C.1
ggctgctgattatgttagtcaggtggatgcttcaacagctgatgttccagctaatagttatgacactaaggttggtgatgatagttctgggctccttttggaagctcaaagaaaggaggtaactatttgtcacactgaggaagccttggtgattaaaaatcatgaagatcatcatttacaaactgattcagaagaggttgtatcttgtatgaagagacagagtgtcttcaaaagttgtttggaattaaatgagtttactcaccaccaggctggaaatgctgattcacaagatgtaagtttcttcattggaggttcaaaattcagcagaggaatctaatgcgaattgttcaattacggattaaaatgaacaggaaaacatcaaac

SEQ ID NO: 34966 - DNA, 556 bp, Glycine max
  Clone ID: PAT_MRT3847_131577C.1
gcataagaaggccatcttacaatataccaggagaatcaaatggtccaatgagatgggttacaaatatgtcagaatcaagtcttcaagcaatcagctatggcaccaatcatatctcttgttgataatgtcttatttaactaagtaaacttttagagaagatgaagagaccctttttcttgtcccgacatgtttcacttctttgtttgcttggcacactttaaaaacaagagttttgatgtagagaatacagcaatggattatatgtgtttacactaaggtacagtttgctccttatgtaaatttaaccctttattttgaaacaattttctcaggtgtaggcactgtttgtctggttgttaaaaaacaaaagtccctccgaaagggtaagttttggattatgtttacattttgtgtttatagtttgggtggtgttctggttgtttgattgggttcacgtgtgagagagttgcaaaaggtgtgtctatttttgttgtatacttgagagaacacaaagttctttagttattattaagtgaaccctcttttattttctttt

SEQ ID NO: 34967 - DNA, 191 bp, Glycine max
  Clone ID: PAT_MRT3847_131578C.1
gttacattacttagtactctatataaactattatgaggatactgatacgtacaataatagttatgttcatgcatgaagagtggtgtaccagacaggctcccaggatgtcccccttgtgctggaatctccattctccagagctgcttgaactcttctcatcatctgtctctctgatctctgcctcgcactgg

SEQ ID NO: 34968 - DNA, 875 bp, Glycine max
  Clone ID: PAT_MRT3847_131579C.1
taagttgccactgggtatgtctcaaaaacatcctacaagtcgcaaaactggtcctccattccttccgcatggagagtttggaactggattcaatccagatatgtctgattccttaccctcttggctcacagaagatgatcttgcttattatgtctccaaattcgagaaaactggcttcactggaggcttgaactactacagaaatatttgcatagattgggagctgacagctccatggacaggagtgcaaatcaaggtgcccgtaaaattcattacaggtgagttggactcggtatatacctcgctaaacttgaaggagtatatccacggtggagggttcaagcaagatgtgccaaacttagaacaagtgattgtgcagaaaggagtggctcacttcaataatcaagaagccgccgaggaaatcaatactcacatttacgattttatcaagaagttttaatctcatccaaaaacgaattcatcctgaatatagttgcaggatcatatatatatacagtttaaatcgttaaagttgtatgtaataataataatatatggcatagcctctaaattaattttcaatcttatcctgctacatatacgattttatcaacaagttctgatcttgtccaaaaacgaattcaaccagatataaagtcgcagctcaagtgaaagggtgttataattgcgcttttgttttgatatttaaggtatcgagatcttttttatgggcaggattcatcaactgcagaaaacctccataccatcaaccttcctatgcttgtttgtattaattaactgataataatactgaatggtttggtaaaaaaaacaaaaaaaaaaaaaaaaaagggcggccaccgactaatgagctc

SEQ ID NO: 34969 - DNA, 196 bp, Glycine max
  Clone ID: PAT_MRT3847_13157C.1
ggctcgagctcgaattctgccatcctcgatctcagttctaactatacatgctgatgggcggcgaaggacaaatcaatgaaggtcgcctccgtgcagcatgactacctagaagaacgaataggaacgatgccacattacggtctggatcactgagatctctgatggagggcctcagactcaagcacagcctaaagcg

SEQ ID NO: 34970 - DNA, 574 bp, Glycine max
  Clone ID: PAT_MRT3847_131580C.1
ctttaacctggaaaagaaaaaggaaagacacgtttatattttagatttagatttttagttcccaaaggccaaacacacatacgtacgttgtcgtattttacattctctcttacggggaaagcaaagcaaacccaatcaataataataccaagaaccaatgccgtgtgggttgtggtcgtcctcatgactcatgtgagtcatgggggtatgttaaaaatgttaatgtgctatttcactttcttctttcccaaccataccctaaactaaacccttctttgatatttttattttatttattctatgcctttatgcctagaacgtttacttgaagctgcatcaatcgaggagggattcttcttcatctttggattcgcttttgatgcctcggagtcagagctgggatgaaagctgaattttggggaaaatggcaactctagttgaacctcccaacagaattaagccaaagggcaagcattattatacaatatggcaaacattgtttgagattgatacgaagtatgttccaattaaacctataggccgaggagcgtatggcgtagtgtgctcttcgatc

SEQ ID NO: 34971 - DNA, 872 bp, Glycine max
  unsure (1)..(872): unsure at all n locations
  Clone ID: PAT_MRT3847_131581C.1
cccactcgtccgtatttattaatatgatgactatggctatatactccttttcttctctagtctgatctcgcttaaattgaagacatttattattgtttatatgataagatttgaaatgatatgaaatccacttcttgaaatccaatccattacccactctattctatagattattgcttgagctgtgaaaatttgatttttgtgcagaacgtttacttgaagctgcatcaatcgaggagggattcttcttcatctttggattcgcttttgatgcctcggagtcagagctgggatgaaagctgaattttggggaaaatggcaactctagttgaacctcccaacagaattaagccaaagggcaagcattattatacaatatggcaaacattgtttgagattgatacgaagtatgttccaattaaacctataggccgaggagcgtatggcgtggtgtgctcttcgatcaacagggagaccaatgagaaagttgcaattaagaagattggtaatatatttgagaattctattgatgcattgagaactttaagggagctgaagctgcttagacatattcggcatgagaatgtcattgctttgaaagatgttatgatgccaatccacaaaacaagttttaaggatgtctacctggtctacgaactcatggatacagatcttcatcaaattattaagtcctctcagccactttccaatgatcattgcaaatatttcttgtttcagctccttcgaggtcttaaataccttcattcagcaaacattcttcaccgggacttgaagcctgngaatctgctcgtcatgccaattgcgatttaaaatatgcgactttgggcttgcacgaactaatggagttgatg

SEQ ID NO: 34972 - DNA, 397 bp, Glycine max
  unsure (1)..(397): unsure at all n locations
  Clone ID: PAT_MRT3847_131582C.1
tcctcnttttttttttttttttttttttttttgtgtttttttttttttttttttttaaaaaaccaggacctttaggcttcggtttttccaaaaaaggaaattttcccccattttccccttaaccccgtcccgggggggaaaattttacccccctccgggccaactttttggtttggctttcacggaattttcccggcattttaagggtttgggaatggaaaccatggtttggtttaccaccccccaataggacaggggggcctcaaaagaagaaccctaacctgaaataattggccccaaatggcggggggaggcattaccattctttttttagaaatttttttttccaagaccgttccagggaaccgggttggtccctatccgggggggcgggggg

SEQ ID NO: 34973 - DNA, 2001 bp, Glycine max
  Clone ID: PAT_MRT3847_131583C.1
gctcgagctttaacctggaaaagattaaggaaagacacgtttatattttagatttagatttttggttcttaaaggccaaacacacatacgtactttgtcgtattttacattctctcttacggggaaagcaaagcaaacccaatcaataataataccaagaaccaatgccgtgtgggttgtggacgtcctcatgactcatgtgagtcggacgcgtggggtctgaccttgcttaaattgaatacatttattattgggcatacgatgagatttgaaatgatatgatatccactttgaaatccaatccattacccactctattctataaattattgcttggggtatgccgtatgtcaaaaatgttaatgtgcttatttcactttcttctttccctaccataccctaaactaaaccctcctttgatatttcattttattctattctatgcctttatgccaaggacgtttacttgaagctgcatcaattgaggagggattcttcatctttggattcgcttttggtgcctcggagtcagagctgcaaggaaagtggagatgctgggatgaaagctgaattttgtgggaaatggctactttagttgaaccccccaacagaattaagcctaaggggaagcattattatacaatatggcaaacattgtttgagattgatacgaagtacgttccaatcaaacctataggccgaggagcatatggcgtggtgtgctcttccatcaacagggagaccaatgagaaagttgcaattaagaagattggtaatatatttgagaattctattgatgcattgagaactttaagggagctgaagctgcttagacatattcggcacgagaatgtcattgctttgaaagatgttatgatgccaatccacaaaacaagttttaaggatgtctacttggtctacgatctcatggatacagatcttcatcaaattattaagtcctctcaaccactttccaatgatcattgcaaaatatttcttgtttcagctccttcgaggtctaaaatttcttcatttagcaaacattcttcaccgggacttgaagcctgggaatctgctcgtcaatgccaattgcgatttgaagatatgtgactttgggcttgcacgaactaatggagttgatggccagtttatgacagagtatgttgtcactcgctggtatcgtgcaccggagctcttgttatgctgtgacaattatggaacctctattgatgtctggtcagtagggtgcatttttgctgagattcttggtagaaagccaatcttccctggaactgaatgtctcaaccagctgaaactaattataagcgttcttggaagccagcatgaatctcatcttgagtttattgacaatgcaaaagccaggagatttatcaaatcactgccctgtactagaggcagacacttctctcagctatacccacaagcagatccattagccatagatttgttgcaaaaaatgcttttgtttgatccaaccaagagaattactgtcttggaagctctccaacacccgtatatggctggcctatatgatccaaggtgcaaccctcctgctcaggttcccatcagtcttgacatagatgaacattggggagaaccgatgattagggaaatgatgtggaatgagatgctacattatcatcctgaagctgcttctaccaatgcatagattattaattcttccaaaggctttctagtcctgttgcttgtctctagggatagttctgattttccctagataaactgtaatcttaaaaggatttaactaccgaattttgtactttgcacgagattactttagaacctttttaatttgacgtctccacaaggataatggcatcttgtaacttgtatatagccatgcacactgtttttggtttttcggctaaaaacccatttgaactagtgttgttcatcagttgtttcctaaaatttaacagaaaagagtaagacaatttgtgctttcccaaaaaaaaaaaa

SEQ ID NO: 34974 - DNA, 289 bp, Glycine max
  unsure (1)..(289): unsure at all n locations
  Clone ID: PAT_MRT3847_131584C.1
atatgtgaatgtgatgtaaatattctcatttcagtcccatgcttagttttatatgtagtttggcatgtggtttactgttctatccacttctgtttgagatagatacgatatgcctgctattttgctttaagactgcttacatgtttcaaactagatccaccgtgggactagatgaggtgataagagtttgatgtttgttagtatgcatcccttgctttaactagattgttattcatgtagttttgctacgtgtaacaatatgctctgtaagtctatatgcttnatattc

SEQ ID NO: 34975 - DNA, 1003 bp, Glycine max
  Clone ID: PAT_MRT3847_131585C.1
cgggcgggtttctggactctttttcaagatatctgcattctattgttgtcacttaagatgaaaaatatgtgcaaaactagaatatatttattgaaattatttcgtgagtttatatatacatctaactaccgtagtttgaaaatttgaatttgtgatttccaggtgtcaccaaactgaacagatatggaagggtccgtgatcagcatatgaatcagacagaatatttatagttggcaaagctaaagcagtgaagtggtcacacatagctgcttggcttatacaataaatttcgatgcacataatgttacacttacaccatccgttgacaactcatgatgtttggtgaatctaacgctacataaaaagacagctcccaaattattgtggtgatttagtgataagtattatccattacttacacgtgctctaattcccctagctcccgtgtctagtgagaattggttgagagaaaacttaatgcaagaaccctatttgttgtttctcgatattttcttctggttggttggggcaggattttcacatgggtcttagaaggctttctcaccctatggttcacttctaatggttgagccttcagtccctcaagtacatctctggtttgttccttcttgcactctcttttttggaatgaccagtctagaatatgaaattatatgctagaatatatcttttttccgcttccagattaaccaatccgaaagataaaagaaaagaaatttctgcaggaaacaactacaacagccgcacgacttcctgatactctctgtggctttgaccagtttatgaatttagttgttgacaaccctgtggaagtgaatggcaatgagaaaaatgacatagggatggtgggtttcaaaatggagggtctatcaatttggaggtgtaggatcatcaaagttatggctttgttaaattggtattttgatttgatactttccagcaaaaagcctttgaatgtttgaaataaaatatatggacctga

SEQ ID NO: 34976 - DNA, 723 bp, Glycine max
  Clone ID: PAT_MRT3847_131586C.1
cggctcttgggatcgaaattgacaattctgagtcattgcaatttagcattaacgacatacgaaatgctacagatgacttctccgattacaataaaattggagaaggtggatttggtgctgtttacaagggaaggcttttcaatggacaagagattgccatcaaaaggttgtctggaaaaactagccaaggagatagagaattcgagaacgaagttcgtttactatctaaacttcagcaccgaaatttagttaggctacttggtttctgtgtggaaggaaaagaaagactacttgtctatgaatatgttattaataaaagccttgattacttcatatttgatcaaactatgaaagcacaattggattggaaaagtcgctacaaaatcattagaggtatagctcgaggccttctatacctccatgaagattctcgactgcgtattatacatcgtgatctcaaagcaagcaacattctcttagacgaagagatgagtccgaaaatagcagattttggcatggcaagactggttttagtggatcaaactcaagcaaatacaagtagaattgttggaacctagtaagtattagaatatgctataggctattattttttaagagttttatttcaatctagcataaatttccaccaaatcatgtattagtagattattcaaagagcttgagtcttaactcttaaataattgttagaatcgttcccctttc

SEQ ID NO: 34977 - DNA, 484 bp, Glycine max
  Clone ID: PAT_MRT3847_131587C.1
aaaattttgcatggagtactgctaccatcttaccactttagagaatagcttaactgaagcttaaaattttggctagctgtgaacggggacaatgtgacactttgcagtttccttgagataatgtgcatcattgcggttttcaagggttaaaaaaaaaaaaaaaaaaaaaaaaaaaaaaaaaaaaaaaaaaaaaaaaaaaaaaaaggggcgccgttcgcgatctaaaacggtttttttagcaaccttggttgttgttcaaccagctacaatcaatggccttgctggaagttccctctctggaactaagctttttttcaagccctttcgccacagggtcaaatccaaaaacttcaggagtggtgccggggtaccaaagtatggtgacaagagtgtgtactttgatttggaggatctgggcaacactacagggcagggggacttgtatggctaaaatgcaccttcaccctacaacccttttcaaagc

SEQ ID NO: 34978 - DNA, 473 bp, Glycine max
  Clone ID: PAT_MRT3847_131588C.1
gctggagcaacttttatatttttttcaccaaaaaaaacgccgaaaagggcgccgccgaacacacctgttgttcattaggtgtcttcatgttgtccctagcaatagacacacgcgaaacatcgccgagaattccatacttctattatgaaacaacatgccgtcatattactacttttcaatcagatactccactaaaataacaaccatccaccgggaactattttctcgaaaccctcttctgcccccagccccccacaaaaacggggacgccatcttctccgctgttagtactgctgataacaccgctgactattatagcacaactgatggatgtttggtttctgatggatgacaccacaaaccaccttcttaaagacgcttctctaccgaccaactaggtgtctaatcaaaagctgctaaaccaccctggtggccataataggatcccccacctccgcgggagggaggaggac

SEQ ID NO: 34979 - DNA, 270 bp, Glycine max
  Clone ID: PAT_MRT3847_131589C.1
cttgattccaagatggttctgctagcgacgctctgagatgacgttcgttgctggccctcaacctgaacgtagccttggcaagctcagaaaactcaccatcctcaaaactattgatgaaggagacagtaggaagctggagcagacgttctcgatgccgtcgagaccgacaaccccgctgactcccacgactcgaacgacaccgggatccgagcgtaaagctgacaacgattggaggagcgtcttccatccttggagcaactccgccacaaa

SEQ ID NO: 34980 - DNA, 226 bp, Glycine max
  Clone ID: PAT_MRT3847_13158C.1
gtccgcgagggatgggcttaacgttaatttcatgtcatgcctttcaacccactcacacactctctcttttttattcatgcccgcctccctattatctttctttgatccgctcatacagtggatagatgatggaatactgtgattgtatagacacacaggatcctacagatgaactattcaaaagaatcaatacatgtcggatgagctaaaaggccttgactatatg

SEQ ID NO: 34981 - DNA, 419 bp, Glycine max
  Clone ID: PAT_MRT3847_131590C.1
gtttggggtttcctttctcaataactctctttgttgttccgtttaaagggttcaccaggaggctcaaaacggcggttcggggaaggccgttcttgttgttccggggtcgttggtcgttgtgaagccgcagttcctcgtggaggttcccaaggccaccgccccctttttgtttttaagggttgctttgggcgctgaggaagttggccgtccgctcaaccttaagcgcaaggttgagcccgggctccttttattcctttccgaagaactaaaaatggttggttcaaccattttcgtggccgcacctggtggatgccactttttcgccggcgaaaccggggggaaccggggtcgttttgggcttgaggccggaggacgtggatggggcagtacctaaggcggtaggcgctgttccatttgcg

SEQ ID NO: 34982 - DNA, 252 bp, Glycine max
  unsure (1)..(252): unsure at all n locations
  Clone ID: PAT_MRT3847_131591C.1
cggtcgcgtgggcggacgcgtgggcggacgcgtgggcggacgcgtgggttcaaatcttatggtatgtgaattaacaaattgtagctctcgttgagttttacttgtacgtgaacnttnagattttttgggctagtggttgaattaccgccatttatgtggatatctcgtcctagaacggcttcaaatctttttatccaggatgagccatgttgtggcaatgataatgagcgattctgattattatacttgtta

SEQ ID NO: 34983 - DNA, 262 bp, Glycine max
  Clone ID: PAT_MRT3847_131592C.1
tttgaggaaaaaaggtcacaagtttcggatagagagcagcttgttcagattctcaataagatacctttgcctgcagatcttgcaaccaagttgctggatgctgggagtggtaatgttaatgggaaaaaggatcatgtgcaattgcagacaccatcatcctcctatcaatgtcacgagtctcatgacctactgaacaccccccacccccggactgccctttactgtcttctcctttgttcttttcttgatcctcaatactcga

SEQ ID NO: 34984 - DNA, 995 bp, Glycine max
  Clone ID: PAT_MRT3847_131593C.1
agcgtattaacccttctgatattagtggggtgccaaagaagagcagctgggacatgattgtggatactacttctcttgtaaacaaggaatcaaggaaagctatgcagcttttacaaggtctcaaagggactcggttaatcattccaagattggtcataggggaactggaacgtatgaagcagcagttcacaattttcagaagaatttcagaggtttctttggcattggaatggattgaagaatgtatggtgaagtcaaactggtggattcatatccagagctcagtggatgagggaaggctaattgctccaaccccacctgcttctcctctgactcagtttagtgaagagagttggacttctctttcaacccagaagttctccatggaaattgcttcaccaacagtagaagatcacatccttgactttgctcttctatacagaagaaaccaaaatgatggacaacttatcctgcttagtgaggatgtcacattgaaaatcaaatgcatggcagaggggttgctatgtgaaccagtgcaagagtttcgtgagagtctagtgaatccattctctgagaggttcttgtgggacaaaagcattcctcgaggacagacttggtcttgccaagacgacgtagtcttaagggagaaattttgtcgtttaaggaagccatcaaagggagttgcaagcggtttgaagctaattctacttcacaactctcaatatggactctgagccagtggcaaaaacagttcagttgagccagctgaacagttttgattgaccacagttttctcatttgctggttgcaatgccttaaacttttttttattgcaaacattacctataaatattaatcaattagattttagccagctggtagcaacgtcttaaaaaccctcctcacaacagggattgtgaatagtgctatactacatcaaaataaaatttcatgaatttatctagtgtaaaatattttttcagtgttttctcatt

SEQ ID NO: 34985 - DNA, 533 bp, Glycine max
  Clone ID: PAT_MRT3847_131594C.1
gtaagctcggaattcggctcgagctcgagccgaatcggctcgagtgggagttataaggttggcttggtgattaagagagaaggaggggagagaaaagttaacaactaacattgacctttaaaataaactatattgtctctgtttgttgcatcatatatttatttggaacttcatttaatgcctttgttggcattgcaatgtctcttgcagatttctcgactaattggtgatcttgagtgtgtgacatttgtcttcgactctgctgaagaagcagctgggaaggttgtgaaacgattgctccagcaagatccttcaacgtcagataaagatttaatggaggaatctgaaataaaagattttcagtttgtagcagcaagacttggtattacatccccaacggccatcctaatagagaaacgatctattaagaagttgctagaaaaactcaaacgaaatgaccagacaaaagagattgtcttgaaaaatcctttgtttcccctgagatagcacctcagatcaatcacaggagaaca

SEQ ID NO: 34986 - DNA, 741 bp, Glycine max
  Clone ID: PAT_MRT3847_131595C.1
cccacgcgtccgtacggctgcgagaagacgacagaagggggggtttggtgaatgagaatcggattgaagaagaagaagacgaccagcggtgcagcttcgaaattgctggccatggcgaagaagctaagctcgaagcccaccattttgttcatcttcgtctctttcatgcttttttgcgcctttcttcctgttttcgctcctcttccttctttctcctctcaccattctcatcgcaatacagttaacagaaagttcgagatcgccaacgataggttctggaaagatggtgaaccatttcagatcatcggtggtgacgtgcattattttcgagtgcatccagagtactgggaagatagactgctaaaagccaaggcattgggcttgaacacaattcagacatatgttccttggaatctgcatgagcccgcaccgggaaagcttgtttttgagggttttgcaaacattgaagcattcctcaacctttgtcacaaacatggtctccttgtgatgattcgacccggaccatacatatgcggagagtgggattggggcggtttcccaggttggttctattccatgatcccaacccccaaaccaagatcatctgatcctacttatcttcaactggttgaaagatggtggggtaacctgcttccaaagtttgttcctcttctatatgaaaatggaggccctataataatggctcagattgaaactgagtatggtttttatggagatgac

SEQ ID NO: 34987 - DNA, 941 bp, Glycine max
  unsure (1)..(941): unsure at all n locations
  Clone ID: PAT_MRT3847_131596C.1
cccacgcgtccgcccacgcgtccgtacggctgcgagacgacagaaggggattcatagcaacacattcttacaatcttacatgtcaaaactaaacaaaagtgagagaaacatcggaacatggcaacccaattaaacaatgtgttcagaacttcaattctgaagcacaagatccaatcagagacccctttgaaaaccacaataagaaccacaagatttcaagtgatcaatgctaccagcagtgcaaggcagctcatagagtctggcacagtgaggccaatattgccaaaagatgcttccacagccataaactcagagggatttgttctccttgatgttagaccaacttgggagagagaaaaggcccgtgtggcagggtctttgcacgtgccaatgtttgtggaggacacggataacagtcccataactctgcttaagaagtgggtgcattttgggtacattggcttgtggactggccagtacctcactactttgaattctgagttccttagtcaagtggaaaatgccattcctggtaaggaggccaagcttcttgtggcgtgtggagaagggttaaggtcaatgacagcagcttcaaaactgtataacggaggttacaaaaatctgggatggttggctggaggctttaatcgttttaagaacaacgacttcccagcagtagaaggaaaagagaagttgcagcatgcaacagttgggggtgtttcttacatattccttcagttgctcatattattaaaggctgttgattaaggaattattttgataacttattaattttcatgtttgtgaatcttttgaatttgtaagcctctgtagcctagtgacaagtacattttattaaaattccatttaaattaagactatgcaattttgtagataagcaggccaggtttcnnnacttcacacagatcatgcatttcgtg

SEQ ID NO: 34988 - DNA, 363 bp, Glycine max
  Clone ID: PAT_MRT3847_131597C.1
aactaaacaaaccaaattcaaaatgggcgtattttatactttcaatcaaaactccatcataaactcaaaaagtaaaaaccctccatcaccctataagttacaccccctctacaaatatcaaaccaataattttcccacttattaaatattccactcttcaactaatccacacatattcaacatacactaatctgtattttaaaagtaaaatcatataacttctcaaatcatcaatataaatcaatggcctttttatattccatgacctccaatcctcttcttttataaaacttcattcactaaacttacccaacaatagcgcaccatcttctctctaatttttatcataaccaaaaacaaaac

SEQ ID NO: 34989 - DNA, 161 bp, Glycine max
  Clone ID: PAT_MRT3847_131598C.1
ctggcggcgaccctgaatacaggagatcttcagatccggctactgctagtgttgattacatttaatttagtgtcgtcctgaggtttctgatgtctgcagcatcaatggtacctgttgtagtagatcgtcactcctaatcgagcaactgttattcgtgttcc

SEQ ID NO: 34990 - DNA, 483 bp, Glycine max
  unsure (1)..(483): unsure at all n locations
  Clone ID: PAT_MRT3847_131599C.1
aaaaggcaaaacctgctttgttttttattaagggtggcccatgaaatatcaaaaatcgcccgtaaacaaaagatgcttagtcagagggacatttataaaaatctatccgggaaattcactaaattcagtggggggggcatgaaaattttggaacaaaactcttttctttttacccctagcattttttatttttggggggcggggccccaaggctttaaaatcctttgggggaccaaaatttcacctgcggcccacaaaaaaatggggggggagtttttgttagccctaactcaggaaggggggaaggggcaactccaacaaaattttacctagccggatctttttttttaaaatcaagggggggggaaaaatcttttgagatggaagggcaaagtataaaatccttcatttctattatccccttggaagggtcaaaacttcccccaccagggcatcncctcgatctttttttgacctttctac

SEQ ID NO: 34991 - DNA, 382 bp, Glycine max
  Clone ID: PAT_MRT3847_13159C.1
ctctaaattatcattgatagactaacacgttcttattgcaacatggacggtgcaacggtggcggttaccactgatcataccaaccctgaaaatgcggtccagggcgcttatgttacacgtgtcaaaggcggaacgcccattctcgtcgttacgtttacgagtactatgtgtgcagtaacgaacctgacatgaatggaaagggacaggatgaagactaccactaccacagatgtacctgtactaggtaacgatctaggagcgcctaaagataatcgcgcttgtgctgctgacgcttaggcataaagtgacactacaactccattgcaggaatatactttgcccaaagacaggaccttaatcgaggactatttcggaaggatgt

SEQ ID NO: 34992 - DNA, 487 bp, Glycine max
  Clone ID: PAT_MRT3847_1315C.1
tacggctgcgagaagactacagaagggggatagagagaggtgaaaagaaacgttgcataaaaaatcaaataatgcgtgtggctctcactcaacccacctgggacctggctcggaagtgctaagaaagttacaaagctcttttctcctttcttctctgtggtgtgtgtggtgatggtggttgtggtggtggaggggaatcccatttgctgctccaaccgcaaagtgcagatatttatttgtattgtaccctcttttgtatttattggtttctgtttttgtgctaataatgggagaggaagcacaggtaaggcacttcagatcataggtactttttttttttaactttaacacaactttgtgattatttccagaggggaaggggcatgtacatatggttcattttggattttaaacagggacctagaatcagttgaataaatttagttccaactgcaccagagttttggtacagcttcaaaaaaccact

SEQ ID NO: 34993 - DNA, 283 bp, Glycine max
  unsure (1)..(283): unsure at all n locations
  Clone ID: PAT_MRT3847_131600C.1
ggctaaagatgatcttggaataggaatcctgtcccacaaaaatccaagattgcatcttttgtaacaaaggtaataatcctggtcttggaatacacaagggagttaactgacaaaaaaaaattnggttanagaaaccgaaatggccagggctacattttaaggttatgcgggattgctacttctagagangttcaacaagcangctggaaagcaccagctgctaggtactctcctacatatgcaaaggaccgagcctctcaagaatcacaaccattggatgccg

SEQ ID NO: 34994 - DNA, 324 bp, Glycine max
  unsure (1)..(324): unsure at all n locations
  Clone ID: PAT_MRT3847_131601C.1
cacgcgtccggtccgaaaacgcaatccaatcccatccccctatctctcttcctcccgaatccatggtaccttgttccgtcacatccccttcgtcaccgttcactgcaatcatcccacgccacaccttcttctctcgctcttcctctcttccccttcgccgcgcacgtgcttttcccataaactcgctctccaatggctcctcctcccagttcaaccagcaactcttccggccccgcgacccgccgcagccccgaaccctcttccccggcggctacaagaggcccgagctcaaggtccccactctcgtnctccaactcgatcccg

SEQ ID NO: 34995 - DNA, 398 bp, Glycine max
  Clone ID: PAT_MRT3847_131602C.1
cggacgcgtgggcggacgcgtgggcaaagcttttgagttggagttgagctggatctgtgatgaatggaaccgccagcatcagaaggttccaaatgaactgttggagcaggccaaagctgctgctcaggcagctcttgaggagatggatgctgactaagaaacaggacgatttgcccagacttggtgtttttggtgctgttgaaatctccgatccctttggggtgtgacccactggacatggccaatttgtcacaatttattattttgacccatgtcatgtgaaactcctttcgttgaaatctggtatctagattgacttgtaccagaactgtggtttacgcaaactggattctggagtactggactgggtgtgtttttttcggaactgggcatcttac

SEQ ID NO: 34996 - DNA, 114 bp, Glycine max
  Clone ID: PAT_MRT3847_131603C.1
acgttggagcatgaggcgacgacaaagaagaagaatccgatgattactcaaagtactcaatcattcatcatcagctacctttactacatctaacatccttcctctgtctaatgt

SEQ ID NO: 34997 - DNA, 234 bp, Glycine max
  Clone ID: PAT_MRT3847_131604C.1
atactccatgaccattaaaacttctggactgtcactagggacctatcctgattacaaaaccgacgcgcatgtacgttgcaaaaaatacatgatgtattctcaagacgcagctaacgctttatatacaattgaagatcaagtggcgggcatctggaagaccaatagctgatgcatatgatctcgtaaaccctgaacgagtatactgtgaaacaacctctctacagtgtagatcat

SEQ ID NO: 34998 - DNA, 400 bp, Glycine max
  Clone ID: PAT_MRT3847_131605C.1
aaaaaaaccgcggggggtatttttaattttgcaaaaaaaattacccaatcccagcccgacctcaaaaatgaggggggccttttccaccttaaaagcaaaggataactttggcccttaacccgaaacatgccccacctaaaaaacaaaattttacctttttacaaacaaaaaacaaaaactttaaattttaaaaaaaaaaaaagagataacccgttctttttattgaaaggaaccccaaccccccaaactttgggttaatttttgggggggggggggcccccaacttgattaaacaaaacccgtttaattgaatcccttggacttaaagggaagggcccttattacaaccctggggaaaaagccctcaaaaccccccccaataaatggccccacccaaaaa

SEQ ID NO: 34999 - DNA, 499 bp, Glycine max
  Clone ID: PAT_MRT3847_131606C.1
ccaccggaggagggattataattatgcataacaggggtccaagcgtagttggataatccagttaactcatactcaaaatgaaccagccaaaaacttatcattgtatatgaaaagaactggcccttttaaaaaaaaaaaaaaaaacccacctttcctcattttttgcaaataaaggatccctccaccaggaaaataccttgaaagggataccaaaggctaaaaggaaggggttacaatctgcaatgcattgtttccaaacaaatcatgaggatagtagtttttcgtttaaatacccctatttctcaaacagttttaaaagcattttttgggcacaatggagggaccaaactcgcaatattctgcctttgcaatccacatttgttggaaggggctaaaagatgccaagataaaaccaccgatccaaacactgttttttttttccgggggggctacaaccttgatcttaatgctgcggggggccaaggccaaaatttccttg

SEQ ID NO: 35000 - DNA, 766 bp, Glycine max
  Clone ID: PAT_MRT3847_131607C.1
gtcgcatgcacgcgtacgtaagctcggaattcggctcgagtcgccttgctgaagacctctgcgatcgaggtgatgcttctggagacatcgcggaggtacaaccctgggagtgagagcatcaccttcctcaaggatttcagttacaaccgggaagactttgccaaagcagggctgcaggtggagttcattaaccccatctttgagttctccagatccatgaatgaactgcaactcaatgatgctgaatttgctctgctcatagccatcagcatcttctctgcagaccggcccaacgtgcaggaccagctccaagtagagagactgcaacacacatatgtggaggccctgcatgcctatgtctccatcaaccacccccacgaccgactgatgttcccacggatgctaatgaagctggtgagcctccggactttgagcagcgtccattcagagcaagtgtttgcacttcgcctgcaggacaaaaaacttccccctctgctctccgagatctgggatgtccacgaatgactgtttctccgtgtcctctgtgttggccacgcagctgaagcttactgactgcttcctagaggtggagcagactgaggagggcaaacattcctgggcgctgggtgaaagagacccttgcatggcactaaagagagtcaaagggttgggtgttttgtggctgctgggcagttggggacctactaacgttgtatgccatctgaaggccttgttgacccaaccaaataaactagccaggagaaaa

SEQ ID NO: 35001 - DNA, 1894 bp, Glycine max
  Clone ID: PAT_MRT3847_131608C.1
tatttttggtcaaagattaaactcaaatattatttaaataattcatttttaaatttagaacattaaccattatattaaatctcttgtttacatcataatcatcgcttagtagacagcatcataatttacattatccgttcttactatgttgctatttttctcgactttagtgttgtatattcgaacacccctctccttcgctgtggcctatttggctgcatgtttgctgcgtgtttaatgaaaataaatatacgaatccatttctttattgtcgtcaaatattacagccgcacattgccgaatcaataaagaatttccccgcccataacacagaattcaataatggtattcctattgataatctaacctataaaaaataaataaataaataactagaataaaaaaaaaaaaaaactaaaaactaattactacgttgttgcctatttggctgtatgtataatacgtagtattggagtctggtacccaaaaatgatggtatagatgtagtaattaaacgatgtcgggtgagctatcccttcatcaaacgaatcacatccacgtgagcatgggctcatattcaactaaggttgttcttggtgtgcaagagaatagggtcccactcctactaccatcttgtttgggccaatgaacgtggccttgattgagaaaaataagtattatttagaagagccacatagccatcgtcatactgacaatgccggcgagggcttgggattggaacacgtggctgcacgtggcccacgagatttcattctggccaaatgcaccttcatacaccattgtgccgttgttgttcagcaagggagaggtagaagaaccatcttgcccctgtgatgccttctgactggtggtgggggaagggcaaaaggttatggtataatccgcggaagcgcaagtgaaggtgctggtcttgtcgtcgtacgcgtagctataagcgcgtgggcaagcgctcttgaatatcgctgagtaagccgaagacttgcacgtgtcgggcgtgccgtacgcgccactgcagcaatactgcggcgagttgaacgcctcgcacgcgctcttgcacgccaccacgccctctctcccatcggcactcatcaccttcagctccgagggacacgcgccgttcaggtcccccacgcaccccgtcgcggtgcacttctcgccggagccaccctgcggcaccaccagcatcggcacgttgtagccgtcgacaaggcttacatcgaagaaatcgagtcctccggcgccgtccagggtgaactcggccagggtggcaggcggcgcggcgccgtttccggagcactcgagcttgccggagccgcagtcgccggtgacgcaggagaatttgccggtggagtcttcggagcagagtgttctgccccagaaacggccaccccaagacgcgggtgcggcgattgtggtggaggcgccggtttggagaaccaagccggtggttgaaagaggaggaacacccgcattggaaagaattcccggccacacggtgtagtcacatttgttaactagagtgaatgttgttgaaattacccctgataatgatagatgaagtgttagtaggaatgaaaataatgatgatagtgttgggcgatccatagtctgatctaatgtgaataaggaaaaggagaaagaagaagaagagagaaaattaattatatgaatgaatagtccaagttcttcttcttctaaaattaattttaacaagaatccttggagtgagagggggtatttatgcaagaaataaaaggagagggagggcgctcgagctcgagccttaactcgaccctgagaagaatgaatggagggagagggggtatttatagaagaaataaaaggagagggagggcggctcgagctcgagccg

SEQ ID NO: 35002 - DNA, 539 bp, Glycine max
  Clone ID: PAT_MRT3847_131609C.1
agccaccctgcggcaccaccagcatcggcacgttgtagccgtcgacaaggcttacatcgaagaaatcgagtcttccggcgccgtccagggtgaactcggccagggtggcaggcggcgcggcgccgtttccggagcactcgagcttgccggagccgcagtcgccggtgacgcaggagaacttgccgctggttgagtcctgggagcataatgttctgccccagaaacggccaccccaagacgcgggtgcggcgattgtagtggacgcgccggtttggagaacgaagcctgtggtggaaagaggaggaacaccagcattggaaagaattcccggccacaccgtgtactcacatttgttaactagagtgaaagtggttgaaattacccctgatagtgatagatggagtgttagtaggaatgaaaataatgatagtgttgggcgatccataatcagagaaataagaagaagaagaactgagagaattaattagttataattaacaattatccaagttcttcttcttcttcttcttcctcgagcc

SEQ ID NO: 35003 - DNA, 298 bp, Glycine max
  Clone ID: PAT_MRT3847_13160C.1
ggctcccaagggtttaatctggtgggttgtttggggcttctcagtactgtcactgaatcgttgactagcggaggataatggacttgttatgaactgctacaaggaatcatgccctcacgctgaatacatcattaaagatctagtcttgcttctctacaagcgccacaagaacactgctttctcctggctcagatacatctgccatgactgggctgttcagagttgggatgcttcactgttgcttggattccacaagaacgatcttgtctgaaatgaaacagacagaagcttcgggttg

SEQ ID NO: 35004 - DNA, 313 bp, Glycine max
  Clone ID: PAT_MRT3847_131610C.1
ggagttgagcatgagggggttggggaaagttgctgcggtgctgttcctatggggatgcactgcagcagtgggtggtgctcgcttcgatccgaggtcatgcgtcagcggaggtgtgcactgtgctgataccggcaattactatgttaagtccacagcgagtgcttgctgtggcagctgtgctggcacgaaatcaatccgtccacagtggcggtgttgagatattggaaggacatggcactctgcgtgccagactggtatttgcactcgctcaattgctcctcaggggcattgcgcggacgtagcgcgcttctgt

SEQ ID NO: 35005 - DNA, 213 bp, Glycine max
  Clone ID: PAT_MRT3847_131611C.1
gattgaccaatttgtgctacgttcatcatgcatcaaatgttatgggtacgcctatttgaggtgcacttgggactactatagcgatggatctgtgtgcactactatgactacattaattgactgtttgggatctcatttagatgatgcctttattattgatgtgatgatctatgcaatgtaaacataagtgcctttgcttgcctctaatataaa

SEQ ID NO: 35006 - DNA, 298 bp, Glycine max
  Clone ID: PAT_MRT3847_131612C.1
ggaatacagatggatacagacgcgttggtccacgtatacgtcgatcactatgacatcaccttcgatatcaaccggaacggtttaccgaaactgtatcatgatggttccatgcatatcttcgaataggcataagattcatggcacctctagcatcgtttctcatcgcacgtcactcactttcgaacagtgctagtactccatcgcgactgtcgactgccacactttcggtgtcaacaactggcatgcctatcgttgtcatgagaaaacttcaactcgctggacattacgacactctcaa

SEQ ID NO: 35007 - DNA, 595 bp, Glycine max
  Clone ID: PAT_MRT3847_131613C.1
gcacagcaaagaagtatgtatattaatatgtgaagttgaatgtgtcataagaagtgccaaaatccaacttagaattacaaacaacatactaacttagaagtttttgtaaggaaccaacttcataaacatgcagcacgaatatcccgctcatctattatgcctatgcctgtatcaaatctcatattttacccaaccaaaacccacccagcttactccacactattatggcatgtgctgcaagcactccctaggctgaagattccacgcctacagagaagaatcaaaacttggcacgtaagctttggcccaagtccatgctctatatttaatttcttctattggattgggaaaaacccaaattccactagtgagactctgaaccaggagcatttgagtcaactgcagaaggattgagttggtactgaactgaaattaaaccaccctctgattctcctgcagatacaggtgatccctggaaacttgccactgaggttttaccggatgacatgcctttttgccagaaggggaaggaagggcagatccaatggcggaagagttgggaataattattatttattacagagagcgagggatg

SEQ ID NO: 35008 - DNA, 532 bp, Glycine max
  Clone ID: PAT_MRT3847_131614C.1
aaatccgtgacttttttgtgttagcccaattagaccgttgtatgtaagaagacttttttttttaaagtatatatccgaagactctgattgaggacataaaaactagaaatttgataaaatatagttgcactcttatttattttatttatatatgtagaaaaataaaaaattatatttttttaaaaatggattaaatcttaaatatacactaaaaaatatgaagtagtattattgtcgaaaaataactgctctacataccttagtcttttatattaaagtattgttaaggtaatgacagaaaaaaaacttaaaaaagaaagtgccaatgacattaaaatcgggatggtagctagaaaggaaactatcttaattatgaagaaacatatattaaatacttgcagaaaatgtaaaagtagagataattatagataatgttacaaaatagcggcaatgatttgttctcgaaataattaacgttgtttggatatttgaatcacaatgtatctaagtggactcactgcgttgtcgttct

SEQ ID NO: 35009 - DNA, 223 bp, Glycine max
  Clone ID: PAT_MRT3847_131615C.1
tcttctcgtaactcgctctacttctttttttcttccgagattatccaagcttagtctgtcaccttaaaatgtctggctgccttcttaactgtcacctacataaactcctgcaactgccgcaacacctcctcaagcttcaaaatgcacccacacttcaactacacttaatcaaccaccacctaaacctttgtcattgtaactgcaccttttaatgctcaatttc

SEQ ID NO: 35010 - DNA, 525 bp, Glycine max
  Clone ID: PAT_MRT3847_131616C.1
tctagctatctcgatcgaactgtccaaggtcctgtcactattattatggttattattataacgcctcagcagcgcgttgccatcaccaggcgagcgagaaccaacccacccaccaacgtagttataacgtaggtggctacgtagttggccgcccaagtggccagcatggtccatgcgttcggcgtggagcgttggcgtagcaccaacgtaagcaacgttaacgaaacgatttacacctagcgtgtataccgtataacccggacaacgaccacgagggtccgtagtacgtgatgcggccgcatgcgccggggcgtggctagcaatattagcacaaaaccacggacaaacacagcacaactgtaccaaacaagtattattagtgcgggcctgcaatagcagaaagaggtagagagaaggaagaggtaactgttaaacgagtattagcttgcgcgagtgtgagtagagtggttagggtgacgcgcgttgggcaagaaaggtgcgcgtcaatggcaacacgcgggaagg

SEQ ID NO: 35011 - DNA, 462 bp, Glycine max
  Clone ID: PAT_MRT3847_131617C.1
gggaatgaatagcaaaagtcaaaagggtctaatttaatttaattctctgatccgattccaaagtccagtagggcaaaatcaaattgcaaaatattttgcctaaagttaaaaaaaaaaaaggaaaaaggaggagccttattaccatttttgattatgattgatttaatgaaaccccgatttttcaaaaaaattggaagacacattttccttaatttccttggggatcacatccttaataatatcccaaaacccctccggcaaggcacaatggtccggcacggggtcctccgccacagtgcctttagcattaccaggaggagcgagagtcaacgcggtcaacggatcatcctcaaagtcaaagtggcaaaaaggaccggaaaaaaaaccacccacttcgttgttggcgggattaacattaaggttaatacctttggctttgcccttgaaaggggagttccaggg

SEQ ID NO: 35012 - DNA, 581 bp, Glycine max
  Clone ID: PAT_MRT3847_131618C.1
aaagtaaaagcaggcactttacactaccaaattttgaatctctaataatcatgctttacaataaaatcatgattttgttagcatacgattcaaaattaaactcacaggaaaaagatgcacactactactaacaaggattgatgcacgacaaaaatggagaatacttgtgcattagctccctcccgccccggtcattgctcagccttgcttttcacaagtctcgacggtctaaatattggaatgcctgcgaagtgcgaacgtcttgttccaacgcatcattcacaggtaacccctttctgcccatctttttgtatttactttaatccaattactgtacttataactcttttttctggcaccatagcgacgtcgtgtggtatatacattataaaaatgaaactaaaatggaaactgtaaaaggatcttccaaagaaatcacgaaaatttcaagcatcttgcttctgcaaataaaaccaccttttgtaaccagtttcagacataaacaatgtatcatcatctctcactattatccatgcacaatctgatggtccacatccccatccacaagactgtgatgatga

SEQ ID NO: 35013 - DNA, 372 bp, Glycine max
  Clone ID: PAT_MRT3847_131619C.1
cagatgatgatagccgaaaggcatggcgaagcgaaactgcttgcacctgattatgcgtgggtgaatggacacccagttttttatcatgaatcgttaactctcctgaatcgccccaaccctcccaagaaacttaatccactgacctattcgcatgaataagtatacgcgttttcatggacagacagacacaagcctttacacattataactcctcatctcgatgttgtacgccccatccaacaagatgccagcaatggaaacactcaagtgttcattaatgggacgaacataacccaactcgagctcataatgttccagatctcaggacttcactgctgcgccgacccacatttctcgatcaatgatgatggt

SEQ ID NO: 35014 - DNA, 274 bp, Glycine max
  Clone ID: PAT_MRT3847_13161C.1
ttttattttttcatcttggctgtctattatacaagtagcatcttaatttagaaaatccctaccgccttacattaggaggcataagtataccttgttgatttacattcttccatctctttctcacttgctgtaatttattttaggcggattctgagttatattcatattctcggcttattttaccaccggcagatacaaattctggactaaacacgagaaaatatcttgcttctgacagaatcacgataaagaattgaagttgattttgataaca

SEQ ID NO: 35015 - DNA, 358 bp, Glycine max
  unsure (1)..(358): unsure at all n locations
  Clone ID: PAT_MRT3847_131620C.1
tttttgtcacttttatttaattgattatattgttggattttcagggttgggctttttttgtttggtnggtcacaaaaagcccaacaagattttttttggtgaaccttcttgaggaaatttccttaaggggggctttatctttcaattgtgccgaaaacagaaacagggggttctataaatccttgttgtttcaagggggggcccacatttcctttacaatgggcatttaactttttttttttttagcgcaaccttttcaaaaaacacttttttttaaggggtccacctcgggagtgtgtaaaaaaaactttcacctgttctcgccccaaatttttggtgggttaacttttttaaaaac

SEQ ID NO: 35016 - DNA, 180 bp, Glycine max
  Clone ID: PAT_MRT3847_131621C.1
atctccatctctacagaacttttttattcccatatacatgcatcactcaccgggggcaatgccatcctactgggctgcatccttctactactatatcttcatgcccttcaaaagaaatgaccaactgacccttacaaaatttacttgagcaatgccatatacaaaacttacgctactcca

SEQ ID NO: 35017 - DNA, 691 bp, Glycine max
  Clone ID: PAT_MRT3847_131622C.1
aagctggtagattccaaccatgggcaacagttgtcatatgggtatgataatgtggtcaaagatgggtggtcaggtaataattccatgccatcatcagatcctaatatgctaagcttttcaacaaagccacttgatggacagtacacaaatgcatcttctcaagaggaggttggttatggtaaaaaaattgctcttaatgttgctgacagtaacaaagcagcctctgttaaaagtgattattctctggtaaatcctcaaatggcaccatcatggtttgagcgatatggaacttttaaaaatggtaagatgttgccaatgtacaatgcacagaagatgactgctgctaagataatggaccagcctttcattgtagcaaaccaatcagatagtttgcgctttcataattcagtagagcaaattcagagtgtcagtgatgctcagctaagtaatgctagtgaaagtccaatgcctgctttagctgcaaataagcatgcagactctcagttatcgacacctgctgttgaacctgacttacttattatgagaccgaagaagcgaaaaagtgccacatctgaactcataccatggcataaagaactgttacagggttctgaaaggcttcgagatatcagtgtggcagaattagactgggctcaaagtgcaagcagattgattgaaaaagttgaagaca

SEQ ID NO: 35018 - DNA, 272 bp, Glycine max
  Clone ID: PAT_MRT3847_131623C.1
attacccggggtcgacccacgcgtccggactctctcatggtacccaaaaaacgtgaaagagggcctggatctaattctaaattacggagctcatgacacccgcctgatgaattgccggatacactaaactgcttgggaggatcctatgggttaacggacgcttctctatttgaagcatcacacaccatctgaacggggagcgtgagaacactccttgggctttcaaatggggcccatatcgaaacaacgtcaagggattaattggcggttca

SEQ ID NO: 35019 - DNA, 383 bp, Glycine max
  Clone ID: PAT_MRT3847_131624C.1
ggcacaagtgagtttgttgatcgagatcactacaaacagtgtgatgaaaatgaacgtccttgttttcatcgttgctacaattttggtacgcatggcaatgccatgcgtacgatatgttctctctccgaatgaacagagggtacggtgcacgtacatccagacgtgaaatgcgcacattataggcttgctgtggaagcacacaagatctttggctttgataccattcctgaagagtgcgttgatcgcaacaagagaatacatccatggcgaacaatacatatcagactccagcacagttaaccaacacacatacttatatgccagatacctcgatgtatatcccaacgacacatgtgtgttcagtagatatggcaccgtactct

SEQ ID NO: 35020 - DNA, 411 bp, Glycine max
  Clone ID: PAT_MRT3847_131625C.1
aaacacaacacaaaagcttattcattaggtctcatccattaatttccattggaggccgaaaaccgaaaccaaaaatccgggggggtgaaatttcaaaaagcaaaaacaaaggggaatggtgtttaagtacaaacaaacaaagggggggggggggtacaaatgctttggaaatttttcacacttaaaaacctgggggcttgttggggataaaacttttgccctgcacttggggaacgttggcgaatcccatgataccgatgaagccgcggggggatgcaatcttagccttttgaagctccttcaacacctgggaaggatcagggccacccaacataggggggttccacatgggccaggagcggccattgtattatcctggggacctgttgggctcacggggcacaaaaccgg

SEQ ID NO: 35021 - DNA, 435 bp, Glycine max
  Clone ID: PAT_MRT3847_131626C.1
gggggagcaatacggcaaaaatattttatcagggagggaccaagtccatttttttttaaaattaccccaaaagacattcaaggctaaacatcattggcagaacataaaattgtgacaaattccaaggccctttaaactggaaatttacatttcccaaagattccctttacccacgcccaatccactatgggggaacccctatatctaattcaaccccaatggggaccctaccaaaagacgttattcacgagccgttggggccaaaacctacaaggcccaacaaccttgggccttccaaacgagggttaaactaaaaggtattcaagggaatatgcccgaaaggcccggaggttggaaatgtcccccataaaccattaatgggaacatccccttctttaagggttgaaacggcaaccaggtccttggggaacgggc

SEQ ID NO: 35022 - DNA, 339 bp, Glycine max
  Clone ID: PAT_MRT3847_131627C.1
cccaaccaagaaaactaggccctttcttatttatgcctgaaaatgaaaaatattttctcaacccagcttttagaaccggcaacagccctatttatcctgggagattgaatcgaaatcaccccctagcaagcctcccttgggtggaaaaaaaatagggcaacccccttattgaatcatttatctcactctcttcacaacaaataactgcacaccaccccttttcattcataatttaacattgcgacaccaaaccaacagggaccataatctttcactctaatctaatctaaacaccgcatgttacgatgcctcaaatggttgattttgttaggcaaagaa

SEQ ID NO: 35023 - DNA, 606 bp, Glycine max
  unsure (1)..(606): unsure at all n locations
  Clone ID: PAT_MRT3847_131628C.1
tnccgtccgagttttttggggaaaaaaaaaaaaaaaaaaaaagaagaggaacgatataaaggaaaaaaaaattaaaaaaaaaaaaaatgaaaaaaaaaaaaaaaaaaaaaaaaaaaaaaaaaaaaaaaaaaaaatgaaaagaagataaaaaaaaaaaaaaactggaaaaaaacatggagggggggggcttttttggggggcagcagttttccctttgggcggttgggggaatagctttttttttggggcccctcgattttcctttctggggcgcttttttaaaggcgaggggttgggaaactgtgggggttcccaaaattaaggcggctggggaggttcccctttttgggaccggtggaattgacaaagggggtaccgcccggtccttttttttaaaatgggttcctttcttgaggggtaagggggctcccccctttaaggtctaatttggggggggggtttgggggtttttttcaggggtttacgtttcctttggcccggccatttggcccgggtttttggtttttttacttttctttttccctgatggacggggttttccccgtagacgtttaaagggggggttttttttaggggtctcttttt

SEQ ID NO: 35024 - DNA, 232 bp, Glycine max
  Clone ID: PAT_MRT3847_131629C.1
atgggaaactaaagcatggatggggaacattggagaaacgttcttcatattacaaacgttaagacacttaaaagattttttcagaaaacttcttttcaagggggtaggacgggacttattttacccttttttcaattgcttaacaagggggttttttcttttaaattttatcacctttttaatttttttcaacttgattatatagagcgttaatcttttaatttgttttttt

SEQ ID NO: 35025 - DNA, 338 bp, Glycine max
  unsure (1)..(338): unsure at all n locations
  Clone ID: PAT_MRT3847_13162C.1
ttggagtgtccctctctaacaaggcgtttgacctaattgatagggctctatcttgagtcttatcagaagaattcaaacccatgacctctccttccctccttcccttcaacaattaagtcaaccttacaactcttaactgagaaattcttatcaatttcctttctgcatccagttctttttgtggtatatggaagagagtttcaaggtggaaaccttggtttcactctaacaaccttttgctctgcttcatttgtgctcaggaaatcttttcttaagaaagatgatatttctaaacaggactgactatttagaggtccgatttntttgttatattaaca

SEQ ID NO: 35026 - DNA, 339 bp, Glycine max
  Clone ID: PAT_MRT3847_131630C.1
aaaggaaaaaacccttttttaataaaaaaccttggaaccacaaacatggggatttttagcccaacctcccaagcaaaaaaaaaagattttgggccctcggcttttttaacattttatacaacggggcttttaaaccctttgagaataatttaatcccagaaggcgtaaaaggggaaaaaaaaacaacaaatttttgagccaaaataattaacttttccctcaaaaatgaattttttggagaaagaaatttttcccgctttttctcgggggaaaattaaaaaccaaagcctttccccacaaaattctcatcggcactattatttaggggttcaagggggt

SEQ ID NO: 35027 - DNA, 887 bp, Glycine max
  unsure (1)..(887): unsure at all n locations
  Clone ID: PAT_MRT3847_131631C.1
aattcggctcgagcagatgttgacattgtatatttgcagaatccttttgatcatctataccgtgattcagacgtggagtccatgagtgatggtcatgataacatgacagcttatggctataatgatgtgtttgatgagcctacaatgggttgggctcgatatgctcatactatgaggatatgggtttacaactctggtttcttctatatcagaccaacaatcccttcaattgagcttttggatcgtgtggcaacacgactttcaaaggagcaagcatgggaccaggctgttttcaacgaggaactgttttacccctcacatcctggttatgatgggcttcatgctgccagaagaactatggataggtatcaattcatgaacagcaaggtcctgttcaagacagtgaggaacgatgctagcctcagcaaattgaagccagtaattattcacgtgaattaccaccctgataagcttccccgaatgaaagcaattgtcgaatactacgttaatgggaagcaagaggctctcaaacctttccctgatggctcagattagtaaccttgtatctgcagctgagggtatattttcttggtgtcaattgtttagaacagttttacagtagattttattagttacaaaacatatgtgcaggtaaaaaaacagatatcattttacgagcacatttatttatgtttttaggcacctttttgagatggttcggccttttcttctattcgtttttcacgcttgctttaggtggggtttacataagatttcttctgtaacatttgttgtatgctaatttgaagtttttgctgtttttatctcaaccccacgtacagattggaaaataaatatatatttaggccctggagacctannnnntg

SEQ ID NO: 35028 - DNA, 167 bp, Glycine max
  Clone ID: PAT_MRT3847_131632C.1
gctggtaatgcggctcgagctatgcctgtcgtgcgcctcattggaaggatcacgagccggtgtggctgcactctactgtgacggctccatgaccgagaccaagagggtcgtcttttcttacatggtcggcctagcccagatgcttcgaggcggcgtcatcatggacg

SEQ ID NO: 35029 - DNA, 214 bp, Glycine max
  Clone ID: PAT_MRT3847_131633C.1
ctttctctttttttctttttccaaacttggcaacacagtttttaattatttaattaataaatggtgggggcgatgacgtcgtcgatggcggccaagttcgccttcttcccccccaatccagcgtcgtaccgtgtcggcttggatgacgtcacggggaagctgaagatgaccggggttgccaccaaggaaaacgtcgacgtattgaagcttttca

SEQ ID NO: 35030 - DNA, 920 bp, Glycine max
  Clone ID: PAT_MRT3847_131634C.1
ccccgtgtatatttcagaaatcaagaaacttgatgatgggtgtgggtatagaagtagcatgaaaaggaaagacgtgccacaaaactatacggaacctatagactctggagtctggactgaaatcgaagtcgaagcaagcaatgggcaacgctcagtcacctcccaacaatgatcctcgatatgtttcagcaaccagagcttttactcaaaaggaacttgaagacttgaggtctctgttcaacaatctggcaaatcaatcccagagcaacgggaaatacatctctccctccgtttttcagtcatattttggacttcatggccctcttggggagaggatgtttgatttagttactcaggagcgcaaggatcagaggctaacctttgaagacctcgtggatgctaaagctacttatgagaaagggacaaaagatgaaattgaagaattcatctttcgcttattggatgtatctggagataattttgtagggaggtctgatttggaaactgttatgattgccatttttaatgatatattacgcataaaaggttctgatgatagatcaagttcacatgaagatattttcaacatatttctgaatgctgcaaatttctccaagcatgatgaagggggcactgaggagactatgtcttttgaagatttcagaagctggtgtactcatctcccctctgtgaggaagcttcttggaagcctgcttttgccacctgattcaggacgacctggttatcagattcctaaactattgacttcgaaggctattgattctaacattatacttttgagaaaggaatatgcttggcatattggaggagcactctctcaccaagacctggaagattggaaccttttgtatcatagttctctcaatggtcttagttgtaatacattcttgggcaacatt

SEQ ID NO: 35031 - DNA, 392 bp, Glycine max
  Clone ID: PAT_MRT3847_131635C.1
ctttgggctgatttatgtgcttgcatggtcgtgagaagatgatagaaggggatagtaaaataacccctaaatctaaccattacgttacaattcaaactcttctcccgcccttgagctagagagtaatggtatgcattaagtaaattgtctgtaagcttattggtggaaaggtgttgaggaagtaaccggtgatcaaagttgtctgtaagctagtcttggttattggtggagcgaagaagttttattgtcctaggtttggaatggcggtctcgagggagactagaaagcattagaagagtatcgaatcctcgacttgaaaatctttaccttagaggtctgctagagaaactgtctaggaccctaaaatagactcctgcccttagagtagtgtc

SEQ ID NO: 35032 - DNA, 416 bp, Glycine max
  unsure (1)..(416): unsure at all n locations
  Clone ID: PAT_MRT3847_131636C.1
aacagcagncacgaaacagattacacagattgggcagttccactgaaaatcatctcgggaaccatacttgctgcacttgtggcaacaactttatggaaactcttttcctttcttagagatgccggtcatgggggagtctacgctggtagtgtaaggttagcactcacacccgcaagggtgcctgacgcccatagtagagaggccaacaaatatgaaggatgccaaaacagatatcgtaatgtgccaatacagcgcatagcatggggtgaaggccaaaggtatctcgatcagtcggtaccagcaatcatgcctaaatgcaaggccaggatgagaacgagaaacactgacgctcacattttgatgggtccagggcgcagatgcataacgcatggacatgtgttcaaaaatcagactca

SEQ ID NO: 35033 - DNA, 1229 bp, Glycine max
  Clone ID: PAT_MRT3847_131637C.1
cccacgcgtccgcccacgcgtccgcattttcacccatcaccaacacccacacccaccaccaccatctcctcccaaaatattggcgcgctaccaatgaccaccattgtcatgcaaacataaaccgatccttttctcttgcattccatctgcaatttctttgttctcatggctccgaaacgacgtcctaagaaaggcgagtcgcgaatggacgcagcactcgacgccatgaaaccctacggcttccccaacagactcgtccgaacaaccgttaacagtctcctcaaagtttacggtggcaacggtggctggttcttcatcgaagaatccgcgtactctctgctgatcgagacgcttcttgaaaaacaagccaattcttcacctcaggatggtttgatagaggctaatccagatggtcccaatgaggtaacagacactggatgctcaaacagtgcccttctagcttgctctaacacacaaacttctgatgatacactgttaactattcaggcagcggacactgtatcgtcatccagtggaactggtattcaacttcccatcaatggtgtggacactgtatctgcaaaaactgagattggtagtgaacttcccatcaagtctgtagacatttcatcagtacccagtgaacctgctaatcaacctttaatcaaggctgccagtgaaactcccattgaggcatttaaagaatcaggttatcaatgcagaaaaagaaatgaggctgccagtgaaactcccatggaggcagaaaaagaatcagagtttcagccagtaaaaaaattggctttggccgaaaatcatgtatcaaagtccccacaacttgggacgggacttagtgacaaaaggtataaaccttgctatggctggatatctaatgatgacgaggaggaagaagagctaatagagctacctctagctccgtggttaagtggggtaaattagtgtaaacaggacagggtattacatatagttagtagaagagaactatactcttcgaaaaagaacaaggacaaaatgagtaattttagtcattgataagaaaatcaatggttaatatcttcacataatcatggtttattatacatgtgtactgaatatggatctatatacttttctcattaatgtttgataaaaagtcgacctatcatagtgtatgtagtcagtagtaaaagggataagcctgtccaccttttaagttttaaatacggcatccc

SEQ ID NO: 35034 - DNA, 552 bp, Glycine max
  Clone ID: PAT_MRT3847_131638C.1
cctggcaaccttaaatctcccacaaggtatatgaaaccccattttctccctactaacaatcctcccatccccactgttctgtacatccaaccaacttatcctcactccaaaaggattcaccgagacagtttcatcaatcaaggcataattcctcggcattccatcatcatcatcatacaccgcccacacttggcctttcttaaagcttcttccaactctatctttgtcaaaatcataaaaatcagaatccaccaccgccatagtctccaactcccctccactagaaccccccctatgcttctcaattatcaaccccttcctcttctcctcaatcgcaggcttcacactcttcttcaaacccctcacctccccatcctctaaacctccattatttctcaatcccaaccggcggcggctcctctccgcggggtttctcctcttctcaattccctcctcctccttttccttttccttttctttttctttttccttcaactttccctcctgcaatttcctcttcacttgattctgaaattcagccaatgtcatcat

SEQ ID NO: 35035 - DNA, 342 bp, Glycine max
  Clone ID: PAT_MRT3847_131639C.1
aaaaaattaaaaaaaaaaaaaaaaaaaaaaaaaatggggaaaatttaaaaaaaaaaaaaaaaaaaaaaaaaaaaataataaaaataaaaaaaggcgggacttaattctagtaacaaatacctccccccgtactaaaattttcctcttcttctgtcgaattaacccttttacctattcatggggggtcccccccccctttgtgaccttgttctcccctaatttttttcgggccagatcctttccggctccctttttttctttttatgggggtgcttaaggtttgggcttactcccgttaattttttttctcttggtgaccttttttccgtccccaaacccccc

SEQ ID NO: 35036 - DNA, 698 bp, Glycine max
  Clone ID: PAT_MRT3847_13163C.1
catacacgcaccttagttactcttgaggtcctattgtggaagaataacccaaaattgaggctttaactttttggtttttacttgtattactgtggtaaagttgtgccttggtgacttgttggtcatcggttcgaatccggaaacagcctctttgcatatgcaagggtaagactgcgtacaacatccctccctgataccttcgcatagcgaagagcctctgggcaatgaggtacgaagttacttgtattactgtggtaactggactaaaatctgctggttgggagtggaaagtaactttgagatgctacataaaaccacaattttgctttgcctctcttggatgtgtgaatattcttggttaaagcaacccctccttccgtttccaaaataataataaaaaagatcataaatgctaacaataggtgttccaacacctatataaataaatctgctgcccatgatatcgatgggggttccaaaacctttcctgtcttgatccattgtaggttcttaacttctttcatattcaattaatgtagagatgctccattatacttggagtgggctccttccaatattcttagccaaagttcaacatctaaaaataatgaaataaatggtgcaattggtgaaaatgaagccaagaggcagatattggagcaacaagtggaaagaataacaaatggggatattgattc

SEQ ID NO: 35037 - DNA, 452 bp, Glycine max
  Clone ID: PAT_MRT3847_131640C.1
tacggctgcgagaagacgacagaaggggggagtgtgaactggccaatcagagtatcatcatcacacgcttctcatttttatgtatctttgtttaacacgacatgctggggaaaaaatgagtaggcaatcaaaatttataaaaataaaaaagataataaattatcatttttattccaatgataatataacatgagatggaacaaaaatttcgatttagtatttgaatgtgtgaaagtgagacaataatgttatatatataatttaatgataaatttgacattgaattttataatttaatgtcaaattaattattaacaaataaaattaacattaaattaattttaaaatattataatttaataaaaaataattttagaaaactatatgtaaaacataattatttcatattttttatacattcaaaaattaaatcaaaatatttatttttaaaa

SEQ ID NO: 35038 - DNA, 701 bp, Glycine max
  Clone ID: PAT_MRT3847_131641C.1
atggctactaatggtccacttaagagaaaatctccaccagatgatgattctgtcaacttaaaaatcaaacttcaggatgggcgtaatttgttcttcaaggtgaaccgggatttgaagttaattaatgtattcaaagaattctgtgatcgacagaatttggattacgagacgctgaagttcatttatgacggttttaacattaaggggaaacatacagcaagaatgaagaacatggctacctccagaggtcgaccacctaagagaaaatccccagatgataatgaggctactgataatatccaaatcaatttttctatcatagatcaggatgggcgccatatgtacttcaaggtgaatcacaacttggagttaattaaggtattcaaagatttctgtgagcgaaagaacttggaatacgagacaatgcagttcctatgcgatggtattcacattaagggaaaacatacaccaaaaatgcttaatatggaagatgatgctgagatctttgccgcgacacatcaagttggaggtggtggtgacatgagatgttaggacatggttgttttattagtgcttggagtttgtttgtttaactgatatggtacattatcagaaaaaaaataatacgcaatttaactgtttgtaaatggaacttacatgttaaacttgagtagtagtaactaatgaatgtactgctggcc

SEQ ID NO: 35039 - DNA, 238 bp, Glycine max
  Clone ID: PAT_MRT3847_131642C.1
attgtgagggcattgggaatgcgatcgtgcatctcggctgttggagctggtggacaatgccctcctatacgtcctatttcgcctgaatcggacatggatggtggggagaagacaaggttaaggggttcctcttccgttgatttcagagtgcctgggagggtgttgttgaatgggtcaagcgatgatgcgtccatgcattgcaagcaatgaagaaaagtgatcaaccgagctgctatgc

SEQ ID NO: 35040 - DNA, 482 bp, Glycine max
  Clone ID: PAT_MRT3847_131643C.1
gccggtacggaatttatagcggggtcgaccagctttcttttcggcggccggcctgtttggctattgttacgagaactactagatgtgagctattatgatactgcaaaatggaacctcacatcttgtcaccaacgcagtctagttaactaagtgaaataggctgcgtgggtgacatgatgcggggttcaaattaccggtataataatagcatacgtcatgaagtcattggaacataaatcgtaccgggctgtctcccaaaaccaaaactgggaaaaccccacaagccggattactgttacaaaagtgacgcgttgtcagaattttttgtgttatggtgcccctgaaatgaacaaacaaatggaggagacacgctcatctcctttttcaaaccccgtttgcacccatcctaattttctcgcttctccttgcggttcattcggaattcgatttcggaaatcattaaccatgagaggcaacccttc

SEQ ID NO: 35041 - DNA, 449 bp, Glycine max
  Clone ID: PAT_MRT3847_131644C.1
attttaatttcaatttcaactctatttccatttatgcttttgcagtttgcactgatttctatttcctacacttagcatttggtgccaaatttaaagaaaccttattgtgttctcacatactgtaggtacaagatgcacccacttttgatattgcttcttatttatgttgtcactaacattttctacatatttctttggttttcatatgttggccataatgcccatgcaatctgtctctgtcaataatgcaataaatagactaaattcagtgatttggatttttggtccaggtgtgggatgacttgattattcagtctgctctaaaaacattctatgattctgatctttctattatgatacaagccattcaaaggaatattacatataattggccaaatgatgtatcaatttgggaatattgtgcccacaactacacagcctgtccaaat

SEQ ID NO: 35042 - DNA, 442 bp, Glycine max
  Clone ID: PAT_MRT3847_131645C.1
gtacaagaggcatatattctgagtacttgctcgactagattatggcagtcaatacagattataaattttaaagcacttagatgcacaaagatttcaatataaaaacatgattaacacctacaaagaactgttttactatgaaattcgaacatgaaagtctgattcaagccattccatgtaaaaagtacaaaattttgcatttgctatatcacaaactatgcaggttagatcaatcaactttaatgctcctggccgaaataatcatgacacaaacttccaccgtatttcaaaaaagaacggatcaacttgcatttccatctttgacgatcagacaacactgaacgctgactgaaagggagatgagaaccgataggcatttgcttgagaggcaaaatgttgaatcagcttcttggcatatttttttgcatttggtaaaaccaac

SEQ ID NO: 35043 - DNA, 251 bp, Glycine max
  Clone ID: PAT_MRT3847_131646C.1
taatccacaggggccggtcaaaactagctgaagccattatataagattctagacccacaatatcaagaggaatcaaaattccatattctatcaaactcctgaattccttgcagagtgaacttcaatcaaagatctctttaacccataccgcattcttattggatgcaaggaaaccccatatggccaaaaagctattcaaacattgaaagatgtttatgctcaatgagtccccgaagaaaaaatactgacca

SEQ ID NO: 35044 - DNA, 497 bp, Glycine max
  Clone ID: PAT_MRT3847_131647C.1
gaattcggcacgagaatgggtactatggcaatgcctttgcctttccaatggcgctttctaaggctggacttttgtgccaaagcccattggaatatgcattgggtttgataaaaaaggcaaaggcccaaatgggtctagaatatgtgaaatcagtggcggatcttatggttctcaagggtcggcccaaatacaaaacaaaagaaaattaccttattggggatactacccatgtggggttctatgatgtggattttgggtgggggagtcctatctatggagggcctgcaggggctataccttttgttagcttctatggacggtttagaaacaatgaaggtgaggatggggttgttgtgccaattttgttgccacaccatgtcatgaagaggtttctctttgagctggtgaagatcacaagtgaggtacctgtaggtttgtcttacaacaaaataacaaataggtccatgttgtaacactgctgttagataaaggaagag

SEQ ID NO: 35045 - DNA, 251 bp, Glycine max
  Clone ID: PAT_MRT3847_131648C.1
atgatcatggaagcttttagggtgaaaggcaaatgcccaaaatcttatctttactcttaaacgggcgtcccttattcaagttaaaaccaaattacatgtgtttttggccaataacaccaaaaaaaatgtttgtgactttaaagtcaaaagtagttgggtggaaccatcctgcggtggttattctggtgaatctaacaacattgttggccaaatgcataaaaagcacaccggtcaaaatattttgattggga

SEQ ID NO: 35046 - DNA, 288 bp, Glycine max
  Clone ID: PAT_MRT3847_131649C.1
ggggtggtggtgggtgaccaataaatcaaatctggatgggtatgattaaaaaattcagtcatttattaattatggtggattttgtagtatgtaggttcatgtatattataaatttatataaaacctgattaatgaatgaaataatctatattttgggtaggcacaattgacaagcttttccatgtgttctgtttatatggaaaggagactagtcaacggacgccttgtgtgctacagaaattaccttgactgtcgggttcctgcatatgatgttaattaaccaagctt

SEQ ID NO: 35047 - DNA, 399 bp, Glycine max
  Clone ID: PAT_MRT3847_13164C.1
gccacgccctcggtcaattcctattatttaataatctggagagtattgatatatcacgacaggttaaaccattaggcaggcaagatatacatttaactattattctcattgttagcatcattatgctactttacactaacatcatttgccaaaactgctactccaccatctctgatcccaacttcagcaccaacccctacaccagacttcgctaacctcactgagttactaagtcatgctcatccataccacaccttccttggatacctatactccactaaattgattcacacttaccataaccaacatatcatcactgactaaggactcaccatctttgttcctaaagacagactcttcactgctctacagaaaactaccctatacaacatcacctct

SEQ ID NO: 35048 - DNA, 343 bp, Glycine max
  Clone ID: PAT_MRT3847_131650C.1
tgacaccatcgaccacgtgacggctaagatccaagacaaggaaagcgttcctccggaccagcagcgcttaatcttcgacggaaatctgctggaggacggacgcaccctctccgactacaacatacaaaaagagtccaccctccacctcgttctccgtctccgcggtggcgccaagaagcgcaagaaagaagaccttacacctagccccacgaagatcaaacacaagcacaagaaggtcaagctcggcattctccagttctacaaggtcgacgattctggaaaagtgcataggctccagcagggttgcccgaacgccgagtgtggtgccgggactttcatggca

SEQ ID NO: 35049 - DNA, 523 bp, Glycine max
  Clone ID: PAT_MRT3847_131651C.1
aaaaaaagaagtaactacggctattttttcgtttctgaccaaaacaattacaacttgggctggtcacatgaatatgatttaccctatttgcaggatttttgttgataccggaaacctatggctcttggttatttttaaccctccctaatggtcgcttgcgtgaacaagggaaactactgaatcttcaagccttgtatagcatcccaacttcaatccgttgttgggggggaaccccttgagccggcaggggacatttacggtttttgcgcctgactttttaaaactttaactcaaatttgtgaaaccagccaccgttcaggccaccgtaaaattttgtctttccacgaacaggaactaccccggcacaccctgcctgttttaagggtgaggtcttttcaatctcctgagaatcaaataaaagcttgtcaagacagttctgtatatgctggggaaaactagggttgacttgattaacaaaacggcctccttgtaaattaaaagcttgcgcttagccgttctgaag

SEQ ID NO: 35050 - DNA, 545 bp, Glycine max
  unsure (1)..(545): unsure at all n locations
  Clone ID: PAT_MRT3847_131652C.1
tccttgtggaaaagtttactgttttaaactggtggaaatgaagaaagtctggaacaaaaaaagtttgaaaaaaaaacctcaaaaatccaaaaatattgccaaaaaaattaaaaaaaaaaccaactttctcaaaaaagaaaaaaacttcttgctgaaaaaaaaagtcaaaaaaaactgagaattaatggtggttcaaatggaaaaaaaaaaaattaattattgaaaaaacgaaacttggtggaatacnccccaattggaaacaacaattatgtcggaaaaaaaaattttggccccaattaattccaaataataacccgtggaaaaaaaaatgaagaaaagtaataaaattcaaaaaaantctaaaacctaaaaactattagacttttaatggtttcaacaaaaaaacaaaaaaactgcaaaaaaaaaaaagaataactgaaaaaanaatctgggcaatngtgaataatcaaacgaacgcaaaatctaaaaaaatgcaatntgaaaactgtctncaatttggaagaatgggggaaaaatggggtttg

SEQ ID NO: 35051 - DNA, 241 bp, Glycine max
  Clone ID: PAT_MRT3847_131653C.1
cagattcacagaattgcttaactggcacatttccacgatctattacaaatgttacaacactgtccttgtgtaaaatcaatgaacagtgttgtaacatttgtaacagattcacagaattgcttaactggcacatttccacgatctattttcatttttccaacagaaaatctgttttagttgttttccattgaccaatttagtttagtgtgctgctaagactcgaataatcttttcatcttac

SEQ ID NO: 35052 - DNA, 222 bp, Glycine max
  Clone ID: PAT_MRT3847_131654C.1
tacggctgcgagaagacaacagaaggggggagccaaattttgatataaaggtcaccccaaattaggattgttattgaactggggaaaatggaattcaactagcccctaatgtgaaaatagctaaaggtaaggccaaaaattttgttgcagctttggaggttacttggccaaaatttttgggtcctgcctttaaaggtttaaaatgggtaaagcaaaattttt

SEQ ID NO: 35053 - DNA, 170 bp, Glycine max
  unsure (1)..(170): unsure at all n locations
  Clone ID: PAT_MRT3847_131655C.1
gtggcaggnaaccaagtcccaaacgcnnggtcttggttggccnntgttgtctggnnatantggatttacaagcaangtgncatagataanngaatttcgacttagaggaaaaaggcnntcaaatncgcataactagatagggtatatatttgtatgtggaggatactgtt

SEQ ID NO: 35054 - DNA, 119 bp, Glycine max
  Clone ID: PAT_MRT3847_131656C.1
gcggacggtacagaggagccaagacgacggacgcgtgcaggcgacataagaccacagaaagagagggacgtaaaaacacgacacagggcgacggttgacaacagacggacgggggaaac

SEQ ID NO: 35055 - DNA, 269 bp, Glycine max
  Clone ID: PAT_MRT3847_131657C.1
acgcccacgcgtacgatggtacgtgaatatgtccaatttagactatgcttaaaaatgaggaggagggatataaaagtatacatgggatatgtgatatgatatggtagaaaaataaatagaaaaacttgtgttaatgaaatatttgaaataaaaaattgtatactataattactctttaatatttttactggacagaacaatttttttttctgtagactaagaataatgatattcggatattcatatatcataaatgcatatttgatatt

SEQ ID NO: 35056 - DNA, 326 bp, Glycine max
  unsure (1)..(326): unsure at all n locations
  Clone ID: PAT_MRT3847_131658C.1
aagaaacattagttgcagaacaaattcaatcattattctatgatggtgttttaccagaagtagattatgactctgcaaaagttgtgaaaaatgaaaatagtgattatagtgatggaaagtatggaaaatcataccacgacattcgtanagaacagttagaagatgacgataaagaagatgatgacaaccatgaaaaagatgaagtaaaccaagacaacacagacagagaagctgataatacttcacatacgaatgaaccaggtcatcaacattctccgaacatcgataaaccatacaatcctaacgatccaaatcatagacaatag

SEQ ID NO: 35057 - DNA, 878 bp, Glycine max
  Clone ID: PAT_MRT3847_131659C.1
cttcaactgaacttgtcactctctctctcttcaatggcttccttttctctcacctcctcgtctcctacccttcacaaagccaccatcatcgacccttcttcttcttcttcttcttcttcttcttcttctcatgccttccctcaccgtccccccttcgttttgcgaatgccccaccaaccccgtcgccttcaaacccctcttgttttgcccaagattcaatctttgcgccacaaaactagagctacaccagttaccaaagacttgtgggataattccattctgaaaagtgaaaccccagtccttgttatattctacgcaaattggtgcggcccgtgcaggatggttcaccggataatagacgagattgcaactgagtatgctgggaaactcaagtgctttatagtcaacacagacactgacatgcaaattgctgaagactatgaaattaaggctgtaccagtggttttgatgtttaaaaatggtgagaaatgtgattctgtaattggtaccatgccgaaggagttttatgtggctgctattgaaagggtgctcaagtcgtaatcatggatcaatgcgggcaaaacctcagtgaagggagtgaactttttgtccattttcagttaaattttctgttagtttgtctgactacgaagcattgctgagttcttgtacaaattttggttcctttttttttttttttccataataggggcagccatgtgagactgctttcgtaatgacccactttcaatctctataatttcctttgaaaaatcttgttcagctatagagaatatcatagttgaaatttaagtgttcctttggtccttgattcggacagttttattttgggggtaggattttatttcccttgtgct

SEQ ID NO: 35058 - DNA, 265 bp, Glycine max
  Clone ID: PAT_MRT3847_13165C.1
ttgccagactccgtgccacctacttatactgtacaaagacgaatgtgaataacgtgaaattccacgaccacaaccacgaccacaacacccatagagggaacctcaccaacccgctgagaaggaggaagactataacgagcaaccacgtacaattccattcgcacgcccacatcctcatctacaataatagcacgagcagagatagcgacaagcatggtctcacacggcataaatgctcggagaaaacgcaagacgacacgacgat

SEQ ID NO: 35059 - DNA, 1039 bp, Glycine max
  Clone ID: PAT_MRT3847_131660C.1
gaggtttctggaataaaaaatactatggagacaagaaaaggtgtatttattactgaagaaattaaacatgcaagtgtgcagatcatgtgtgctggtgttgtaattggactggtaactttggttggtttaaagtttttacctactaggaatggctcacccattcttcgtaaaatgactggttccgcaatggtgtcagatactatcaacttaggttccttgggagatgaagaaaaagtagagcagctaccaaaaatggatgcaagggttgccgaggctttagttcgcaagtggcaaagtgtaaaatccgaagcttttggacctgaccattgcttgggaaggttgcatgaggttttggacggtgagatgttgaagatatggacagatcgtgcagctgagattgcagagcgtggttggtcctatgactacaccttggaggacctcaacatcgatagtgtgaccatatcacagaatgggcgccgtgcagtggtggaaacaactctgaaagagtctactcacctgaatgccgtaggtcatccgcaacacgatgcttctaatagcagaacctacacaacaagatatgagatgtcttttacaggcgcagagtggaaaattgttgaaggagctgtccttgagtcctaagtagatttacgtaaatacgtatgtatgtacatcaggttataccacttcaatttcaatcgatcaacctacatccaatgcctttagtatgtacgtttttttaaacgtcgtgcacttttgaagcacatacctcagtcaagctgtaaatactcgcggtgtttgttgttatgatggtccagttaggatgtcaatccacttttttacttgcattcctttagaaaggaggatgaaatgaaatgaaaatgagataaaatgaaaagaagttaatatgtaaccactttaatatccaattctattaaataagtaacagtagttccacactgttgtaaattattatcactttagttcctgactcattctgttataaaatattaccttctaaataagaaacaagttataatgt

SEQ ID NO: 35060 - DNA, 190 bp, Glycine max
  Clone ID: PAT_MRT3847_131661C.1
gcagatcttcatcaagacccttacggataagactattaccctcgaagtaaaaatctccaacaccattaacaatgtgaaggcaaacatccgaaacaaagaaggaatcccaccaaaccagcaaaaacttattgttactaacaaacagctaaatgataaaaagaccctgactaactacaacatgcaaaagaat

SEQ ID NO: 35061 - DNA, 459 bp, Glycine max
  Clone ID: PAT_MRT3847_131662C.1
ccacgcgtccgtccccacccacacacagacagagaaaagcacatcacagttccacagaacctgaacattaaacaccaacacgatctcactctcacttcaccttcacctcaccaaccaaaccctctccctcttttgttctccccttactctcttctccttcttccctgcaacttcctctctctaccattttctctgcaactttctctctctctctaccattttctctgcaactttctctttctaccattttctctgcacaaatggaaattatagctctctacaagctcgagtctcgcgggatagtgtagtcccctcgagactttgcaacttcggtggcggtctctcgttctttcttcttcttcttctctctcttgcttttttccctctttgtctctgtaaaatttactatggcggaagaaggactgacgggaccggaatatgaccagggagaacttggga

SEQ ID NO: 35062 - DNA, 402 bp, Glycine max
  Clone ID: PAT_MRT3847_131663C.1
ggctcgagggaacggagtgttgtataatggcgggagcttcctgggaggaaacacagagctgtacttatcaagatcggtgagaccgaggctggccaattaccaagggagggccatgaggacggtccgtaatggcccctactgggctgatatcatcgaattgacagactagattgaggacaagtatgccatgatgtgactacactatgataatgctacttaggacaccaatatgaaggatggctctgggtcaactgtgtggcaaagaaagaatgggcctggattggatcaatgtatcaggactcatacgaagaatcacaatgtgactgacggcattcgtaagacacaaactggagctcacctccacaggcatcaatggattgaggatgatctgaccgggaccat

SEQ ID NO: 35063 - DNA, 1225 bp, Glycine max
  Clone ID: PAT_MRT3847_131664C.1
ttccgctcgatcagtattcctgtcactacgtacacaacctatatataagtgtctgtgttttttcaaaatgttgtacaaatcatctgtgaggcctttgaagattgtgatcatggctaatttgctcacaatgttttttgttatggaaatgataatagtgagtggtctcagtttcggagcaagtggcctgaacatgaattactacttgttgagttgtccttttgttgaacctgttgttaagaacactgtcaacagagctctgcaggatgatcccaccctagctgcaggtcttgggagaaaacacttccaattattttggtattagggatgcgatggctctgttctgattgactccactaaggataatacagcagaaaaggattctccagggaatttgagcctgagaggctttgaagtcatagatgccatcaaagaagagcttgaaagacaatgccctggggtggtttcatgcgctgatattcttgccatggctgctagagatgcagttttctttgctggaggcccagtgtatgacatacctaaaggtagaaaggatggaacaagatccaaaattgaggatactatcaatttgcctgccccctttttcaatgcctctgagctcatcaagatgttcgggcaacgtgggttttctgcaagagacatggtggctctctcaggagctcacacattaggagtggcaaggtgttcttcgttcaagcacagactgacccaagtggacccaactttggactcagaatttgcaaagacactctccaagacatgcagtgcgggtgacactgctgagcaaccctttgactccacgaggaacgattttgacaacgaatacttcaacgatttggtctcaaacaacggggttcttacatcggaccaaacgttgtacaacagcccacaaacgaggaacattgtgaatgcttatgcaatgaaccaagccttgtttttcttggatttccaacaagcaatggtgaagatgagcatgctcgacgtcaaagaagggttcaagggggaagtacggaaaaattgccataaaataaattgaactattgtgggtttgtgattgtatggagtgggggaggaaactcttaaaagttgccacttgccattagatgaaagcacatggtgtgtatgtcataatcatagataatatgtctggttaactaactctacataattgttcccatgaaatttatatattattattattattgag

SEQ ID NO: 35064 - DNA, 653 bp, Glycine max
  Clone ID: PAT_MRT3847_131665C.1
ggctcgagtgtgtacactatcccatcccccactatgtagtttgccaactattccccactatataaggctcttaatttttgggtattacatatcacaaacccaacttcagtattcctctcactacgtacacaacctatatataagtgtctgtgttttttcaaaatgttgtacaaatcatctgtgaggcctttaaaggtggtcatggctaatttgcttacagtgtttttgctaattgaggtgtttgcatatggctacagttacggacaatatggcttaaacacgaattactacttgatgagctcttgtccttttgttgaacctgttgttaagaacattgtcaacagagctttgcaggatgatcccaccctagcagctggtctgattagaatgcactttcacgactgcttcattgagggatgcgatggctctgttctgattgactccactaaggataatacagcagaaaaggattctccagggaatttgagcctgagaggctttgaagtcatagatgccatcaaaaaagagcttgaaagacaatgccctggggtggtttcatgcgctgatattcttgccatggctgctagagatgcagttttcttttgctggaggccccagtgtatgacatacctaaaaggaagaaaggattgaag

SEQ ID NO: 35065 - DNA, 246 bp, Glycine max
  Clone ID: PAT_MRT3847_131666C.1
gcagctaactcggctgcggccgccctcttaaaaataatttgcaaactttaccggtggcgccggccaacggttgatggggctttatatctaaagctctgcactccttctctatacagctggggcctagaattttgtacaggaacacaggagtgccgtcaagtactctgatttgatcttcaccactcgtgttatggtccaaaaaagcatatttgacgctgttatgaggaaaaaaaaggttgtgctcaa

SEQ ID NO: 35066 - DNA, 610 bp, Glycine max
  unsure (1)..(610): unsure at all n locations
  Clone ID: PAT_MRT3847_131667C.1
attctataatactaaacgaaaatcttatctattaatatcttatctcttggttgaccttgtaatttaaatttaaatcttatctaattgctacgacttaatttagatcaaaacaaaagtattttctaaatcttgaaattttaaaaatgaaaattgttttcaaaagataaaaacatttttttaaaatcaaacgccccttatcttttgttatcttatttcttatcttagcttagatcaaaacaaatctgatgtcatatcttcttattacttttatattagattagattaagtcgatcttatcttctatcatttanntgtacatagattctctttaaatgtacaccattttcactttccgatgctggttaaaaatttaagagttaatgctttttgccatgaggatatttttcttatcacttatcagtgatgctatagcctatattatcacagctactactgttggctatattgctatggtttataaannataagcagctacttttnnntttaattatntggattgttggtaaatcccaaccacctataccttttgaattgagcatatttgtgagtngnnntgtatcnnnactcgagngnnngcnnnntncccaat

SEQ ID NO: 35067 - DNA, 293 bp, Glycine max
  Clone ID: PAT_MRT3847_131668C.1
cccacgcgttcgtcgatatggcgagcggctttttgatgtttggatacattatgtggagattgaggaaggccagggctcctagataaaaacagggttactgccgtgagttgcgcaatcaagcaggctacttgtttggggaaccgctgacagaatagggagaggcgggcccaacaccaatataggtatcacttatacatacgcgtgtatgccgcattctatactacccaataactttacaccgatgtaatagctttcaatattcattacaaaagggagaccgaatgtgaattttc

SEQ ID NO: 35068 - DNA, 400 bp, Glycine max
  unsure (1)..(400): unsure at all n locations
  Clone ID: PAT_MRT3847_131669C.1
gaaatatcttgattttatttatgattaattttttttaaaaaaaatctaactaataatctttggtaagatctctttctttaattacattttttttatctataattaagtttgattcccccgcatntcntgcactaaaaatatttatttttggactgtatatcatatcacataaaataaaaaataaaaaataaaaagatatanaagccangggaaagagttttgactttaatttttggggacaagagggtttcccaagggcaattaataggtgaatttcagcctacnatattattttcnnaaacgactagtngagagtttctaagcaagctctatcagtttaattctgacaaactttttatatttgatcagtatccttcgaccnntnatatatcatatatat

SEQ ID NO: 35069 - DNA, 211 bp, Glycine max
  Clone ID: PAT_MRT3847_13166C.1
ggggggggagccaaggagacacccagcgtagacgtgcgacgggcaaagcaactgcaaaagtgccaccaaggggacaactaactggacgtcactggacagcgactaaaaagggaagacccgggaaaaacccaacttaacccacctgaagcacatggccgtacacccccctggcgcaagagggaaaaggcccgaacaggccgcccccgacaac

SEQ ID NO: 35070 - DNA, 345 bp, Glycine max
  unsure (1)..(345): unsure at all n locations
  Clone ID: PAT_MRT3847_131670C.1
acccacgcgngcggngaagattttcaggaaggcgcagngccccaaagcccagagacncaccaacncnctcangaggcacggaaggaacaacggaaagaagcncanggcngncaggacnaccaagcaggcaagggaaannanncacnggcncactgaccngaacccaanncaggncangggggangccgncatcaanagggggcgcccgagaagaagttttttgtttggnncngccggagnggngaggagacaggccggggggggggaccccnnacaccccccaancaggccancnancnnccaacaacaggggcncgggaagcggccnncagaaacaacaagaca

SEQ ID NO: 35071 - DNA, 466 bp, Glycine max
  Clone ID: PAT_MRT3847_131671C.1
tttcgatctttgataaaaacccacatctgtgggggatcgggggggcagatcattctaacgctatatgtaggttgactccatgcattggtcactagtcaagaactgcgggatcacttatatgcccaaggacaaattgaatctatcaaaatggttcgacaacgggcttgagcttggggacacatacaaccagaggatgtgcataaaaggcctcgtaagaactgtacaacaaactggtttttaagggccttaggctaaagcttttgtggggcaatgcctcagacatccaaacccgagtctgatggttctgatcaaactaggccgaaagcgtctgtagctcatagcgcagatgttgccttggcgcagttatattcacagtagctaaaccaggaccaagcccaaagaatgctattctataacaaatcccgcatctactcagcatgaaagaagctactacccatcaatggat

SEQ ID NO: 35072 - DNA, 1509 bp, Glycine max
  Clone ID: PAT_MRT3847_131672C.1
ggtctccgtgcatgccaagtgcgtgtcgaaagggagacgggtcccttcacattcccgccaaccgcacttataaaagacaacacattctctctactcttttgcgttccgcccacgcccgctgcgatcgcaacacacagcgcaaaaccctaaaccgtcgagcgatggcgcgtactcctaaacctaaaggcggcccctccgctgcggcctccgccgccactgccttcttcaaacccggtactgccgtcgaagtcagttccgaggacgacggtttccggggatcctggttcaccggcaccgtcatccgccgcctcgcctccgagaggttcctagtcgaatacgacaacctcttggcggacgacaaaaccacgaagaagttgagagaagtcctcggtctccgccacctccgccctcttcccccgacggagactgaccgcgaattcaaattcggcgacgaggttgatgcgttccacaacgacggttggtgggagggccacataacccaggaattggagaacgaaagatttgcggtgtatttcagagtgtccaaggagcaattggtcttttccaaggaacaactcaggctccaccgggagtggttaaatcacgattgggtcccaccactgcagcagaaacaacaaaggcaacagggcaatggtgaatcgaagaaagtgttgttgacaccgaatgtgaaatctgttgaaactgtaaaggggaaggggataggtgtgggggcgatagttgaggttagcagtgatgaagatgggttcagtggagcttggtttgctgccactgttgttgaggcactggggaaggataagttccttgttgagtaccatgatctgttggctgatgatgattcccagcttagagaggagattgatgctctgcacattaggcctcatccgctggacacggatgttgatggtcaattcagtattcttgatgaagttgatgctttctacaatgatggttggtgggttggtgtgatttccaaggctcttgcagattcaaggtatgtagtttacttcaggtcttctaatgaagaactggagtttgagaactcccagttgaggctgcaccaggactggattggtggcaaatgggtcatgccttgtaaggcattgaagttgtgaactctgaagatagcaagaggcagaagaaaaaacccgattcagttcagtcactcattagaacttactattagtttgtatcaatcaaaacttgaaatcatcttgccagatatgctaatgagtaatgaccattttagaatccagtacatactctggaattgcaatttgtacttactgggggagcacttttccttttctggcatgccggtttgctatgtggcagcacactattctaatttttcataatgttatcttgtgcctttaaaaacattagataagcaatcaaaaaggttttcattaaaaaaatgatgtcaatataccctagagtaatttttcatgcattttccaactgaatttctagaccctttcataattatgg

SEQ ID NO: 35073 - DNA, 511 bp, Glycine max
  Clone ID: PAT_MRT3847_131673C.1
ctacaagaaccttgactttgggggtgatttaaactcttagattgctttggttggacccaatggaacttggaaaaattccttacttgaacttattaatggggaattggaaccttttaaatggcttggttcaaccccccattaactttgggttggcccattttacccacccttgggttgaaaacttaaattggaaatggtttgccttccattttttaataaaaaattcccttgaaaccaaggaggaaaggttaaaacgccccttgggaaatttggacttgtttgccaaaccccaggtattcctattaagaatttattccatgggccaaagagcccggtgatattctcatgggtaggttattaaccggctctcctggttcttttggatgaacccaccaaccctttggatattgaaacaattgacttattggctgtggcgttgaatgaatgtgatggtggcatggtgcttggtaaccatgaatttaagggtattaatcaaggtggccatgagata

SEQ ID NO: 35074 - DNA, 787 bp, Glycine max
  unsure (1)..(787): unsure at all n locations
  Clone ID: PAT_MRT3847_131674C.1
ccacgcgtccgcctaaggcagaaaagatatttttgtatccatcatcccatccaagtttgaaggcgtgtttgttgtgtgggtggcgtttagggtttctcgatcttcgtcaataatcgtcgtctccatttcagtcagggttttagtcttcctctcctcccaatacacactgcatacagggtgatcgcttggaagcatgcgaacttcatgggctgatttggctgccaattcggcgtctgaaaatgcgggaacctctaactccacagctccttcgcggccggtttatgtgcctccgcatctgaggaaccgtggaccatcagaatcccttgctccagcacctccatccaataataataataatgtgggatcacggtggggtgctctgccacccagaaacggatgggggaacagaagtggtggttgggatcggcgcgaagtgaatcccttcggaggtcaggaggatgcagcagcagaagaggagttgggaggcgaggagcagcaggagagcacgggaattaactttgatgcgtatgaggacattccggtggagacgagcggtgaaaacgtgcccccggctgtgaatacttttgcggagattgacttaggcaacgcgcttaatcagaacattagacgctgcaaatatgtgaagccaacgccggttcagcggcatgccataccgatatcccttgcggngcgggatttgatggcttgtgcgcagactggttctggaaagactgccgcattctgtttcccaatcatcagtgggattatgagaggccaagcccaagtc

SEQ ID NO: 35075 - DNA, 451 bp, Glycine max
  Clone ID: PAT_MRT3847_131675C.1
ataaataaaacctgtttcaatgatatactcagccttcttttgctagttattttggtctccatgagtagtttatgtaaaattaacagatttgggatggggtggggagtaggggtcaactaatgaatacaaaagtactgtctggacattctcttttaaagggccaggatacaaataagaagctttactcttcgaagagtttattagagaaagcaaattgtcacttacagacacctttatactaccatcggtattgacaactttaagggccctacctggtggctctcacgctctgcattccaagatgttagccacccattattagatggaccttattcaactacagtctatagatccaatccgatgaatgcatgcttgatgcacaccaaagtatgctggagcttatgaaatttgaacatactcttataaagactgctagtgtggacagggtgga

SEQ ID NO: 35076 - DNA, 333 bp, Glycine max
  Clone ID: PAT_MRT3847_131676C.1
agagaacattcttttttttttgctagacaacaataggccaatgttttaaaccccattctaagggaaactccagggggctcttcaaaacaggccgatcaaaatcgcgttctaatggacggacacaataaaaatgtcctgtacatccacaattcataacgaagagacctgaatgccccaaaaagcctggcaccgatatttgctataccacctcttgcctagcaaacttgacccaagggaggtcctaccactaactttcagtccggtgagtttaacttttgtcccctgcacctttgggagcgggtcctttgatggcatgcccaccaacatactatg

SEQ ID NO: 35077 - DNA, 702 bp, Glycine max
  unsure (1)..(702): unsure at all n locations
  Clone ID: PAT_MRT3847_131677C.1
ccacgcgtccgataattcttagaatttgggcatagggtctaactcaacccctcaaaattggcttgtaaggtgaggactgctcaagctttataagctctatttaagccatatctttagttgatgtgggactaaaccaccatccttgaggttgcaattaaggtagcccccaaagaggctgaaactaaggctggttaggggtatccgcaattaaggtggctttccaacaataattgacaagctgtccatggaggatatctccaagaaaatgttttttgttaggggtggggcagggggttgttagcatccatcaataaatgtttgattttattttattactgtaaatattctgttttattaggttagagtgtgaatattctacaaattaggaaatcagctctctaggatgctgcgattaagctaggatattttgtactttcttttatggtagtaatttttatttatggttcattggttctccctgtccatcctctctgtaagaggatttgtatttgtagtagtacagaaaacttattccaaatgtctttgatatccttgtcaatagtgtgtctccttcctttaaacttgatttttagattggatccacttgngtatttggttggtttgaacccaagtattctagttttctttagtaaaccaaggatatattttctctgtgaaattgagggcctgtttgatttcaat

SEQ ID NO: 35078 - DNA, 631 bp, Glycine max
  unsure (1)..(631): unsure at all n locations
  Clone ID: PAT_MRT3847_131678C.1
gtttctgttaaaattgttcaataaagacaagtaacccttttattttcctttcctttgatcactgacccaattcatggatgattcaattgcactcaatctcctagtctttattgtttattctcagatcctttcctcacctaatcatgctcctatttccccactaatcacctaggttttggcgagggttagattgaaacatatcaggtttgaactggtcagtggaatttaatattttgaggtaaaccccatctctttgcggcttgtttccttggtgagtgaggtcatccatctcataggtgacatcccaggtttccattttttttaaagtttgattatttttaagaatatctgaagagattatgtctccaataaggaagttggttgttggaagatttgtattttactcctttcattttatcacatttttcatcctctgtaattaaaaaaaggaagatattttaggtggnggtttgtactgtggcattgttaggagtatcttgngagtgaacaatttgttgatggatcaacatagaagtgaggtattggatccggttcatgatgggaatttgagccattcggctgaaagggttgcaattgcaagagataatataagtggagaagctggtacttc

SEQ ID NO: 35079 - DNA, 368 bp, Glycine max
  Clone ID: PAT_MRT3847_131679C.1
ggctcgagctcgatccctagaatgtcttgaaatctcaaatcacattcatctacgctccgtaccattccaaatcccggatttaaccccccctttttttaatgttgatgtaaggaactaatttcaatggtggtggttattatgttattagcccttatggcatataaatgttgagtacctatgcttattctgtctttacccgttcctttctccccaatccaattaaaggtattcccctaccatctacacttttaccttttcccgccatcttttgaatcttattcccagtctccaaaaaacatatttgagtttttgtttattaaatcacgaccattatttttcatattcaccctctccttaaattattttat

SEQ ID NO: 35080 - DNA, 404 bp, Glycine max
  Clone ID: PAT_MRT3847_13167C.1
tgcaatatcagtcagtatgtatccaatgcacgcctcgatgctgcaatttgggtctagagctcgggtcaagagcatatatggttggtgggtttgggcatttgtcagcttggctgattgtcctcacgccagcccttgatccaccaacagcgccggtcgttggtgacaccttggccttcatacaagtcatcggttgtctgagtctccaaaggcatgacacgggtactgctgtctctgagcccgagaaaacactagctcctgcaattgaagagagagccctgcatgaccccgacaagactaactgaccttccacagctgattttgagtatgctgaggagttcaggaatggcgtggcagcacaggatactgttgttcaagctgtatggactgctgagaaacatgactga

SEQ ID NO: 35081 - DNA, 735 bp, Glycine max
  Clone ID: PAT_MRT3847_131680C.1
taattccaatatcactttatgtgtccatagaacttgtgaaagttctgcagagtattttcatcaaccatgaccaggaaatgtattatgaagaaacagataggccagctcgtgcacgtacatctaatttgaatgaagaacttggtcaggttgatacaatattgagtgataaaactggtactttgacatgtaactcgatggagtttgtcaaatgttcaatagggggcattccgtatggccgtggtatgacagaagtggagaaggcacttgctaggagaggaaaagatgtggaatctgaagttgatgggggatcatctgatttgttgggtcagagtaatgactttgtggactctcggcatccaattaagggctttaactttagagatgagcggataatgaacgggcaatgggttaatgaaccatatacagacttcattcagagattctttcgagttttagctatttgtcacacagctattccagatgtagataaagagtcaagagaaatttcctatgaagctgagtcaccagatgaagcggcttttgtcatagctgcaagggagctttggttttgagttttttgcaaggacacaaacaagcatatcattgcatgaattgaattatgaaagtggaaaaaaggttgacaagagtgtaccagcttctgcatgtctttagaagtcagcagttcccgcaaagaatgtcagtgatagtgaggaatgaggaaaatcaattattgct

SEQ ID NO: 35082 - DNA, 372 bp, Glycine max
  Clone ID: PAT_MRT3847_131681C.1
aattcggctcgaggggaaatcgtaaaagttggagaacgaatatcttatcgaggactttgagaaggaccttaatgctagactccaatgagcacttttatttgaagcaggtgtatctgtgaaagatgtaatataaaacaacctatgaagtccacttgaggaaacgtatcactagagacaatatttggaatacgagctgactaacatgcggatgcttgtgtcgaagaataaactgtcatgaattaatgacctggacaagggatctaatgatgtgctaaccaaggttaaaagtgcgcatactacatctgatgcatacttttatagaaatgcaatacaaagagggtgttattttagggagcatgggagaaatgagtg

SEQ ID NO: 35083 - DNA, 746 bp, Glycine max
  unsure (1)..(746): unsure at all n locations
  Clone ID: PAT_MRT3847_131682C.1
gggccggctcgaggccnggcccgggccgggaatcttctcgttactaaacatattccatctgatgtaatctattgaggacgaattagcaacatgagggacgaagacggatatactgatcctatacctgtcgcacatgctccttttgatctcctcacaactgacatctcacgtaatataagagaggccagtgatgctgatgcaagagacagatgaagtgattgatgccaaattagttgctgcaagtgaggctgttgcaagagacccatgaagtgattgataccagattacctgctgcccctcaggctgatccacacactcatgaagaggctgataccagattactatgctgccggtgacgatgttccacagacaaatgaagagactgataacaaattagtgtggcgtcaggtgacagatgtctaaacaaataaatacaatgctgtatggaatactattgggcgccgatgattatgattatcatacattgataaggaggacaacacctctccttatagaaagtgagctatctgcatgagactgagcataaaatatctactacaatatcatagtgcccaagcttctaaccccatgatagtaaaaaatccatacaacatcatctgtctgacgcgaaaggatggatacatatctacggctggctatcttatcactaaataatgttagtactaatatgcatagtgccacggtgacatgacctaagagacaactcaaatatttactgggcgaga

SEQ ID NO: 35084 - DNA, 415 bp, Glycine max
  unsure (1)..(415): unsure at all n locations
  Clone ID: PAT_MRT3847_131683C.1
tagaactccccaagagaacggaatagatatacatgaatgatcatataaacgctgaagcgttcatatacgtttagactctgcaccttctgttcccgattctatgtctcctctcgtgcgccccctagaaatactcgtgcttgagcgagaaatgaatttctccttccgaaggggaccantgnggttgatagagagagccatgccacaatttanttccgccatgcagcacgaccggcagtaatcctgtgactttatgttcgacactcacggtaggaggctacactcttaggctcacgcacaggagatcaggactcactcttctagcttgaggatatacgacaatgatggcggcgtaacctgtggctagcttgatctgcattctttcgataccgagctttttcctgagggacaaagtttt

SEQ ID NO: 35085 - DNA, 253 bp, Glycine max
  Clone ID: PAT_MRT3847_131684C.1
gtcgcgggccgcccggccccgactcacccccccaccaatccgctctgccctccgcttccaccggctcacccgcccccccaccccccggactgtgatctataccaggtaataaaaaatacaatatatagcaacgatttcatgattaaaaacctttccccttcaacagtgaactaatgtcaccgaatcactcatcccagggatcaccactgtgtaggtctaagcaattccattgccattgacccatacctaactt

SEQ ID NO: 35086 - DNA, 387 bp, Glycine max
  Clone ID: PAT_MRT3847_131685C.1
aaaaccggaaggggccaattcccctcatgggggggggaaaaaatttccccaatgctccctggggggcaattaaagcaaatccctgaaaaaccccccccaaaaaatttcctttttttttaaaaagtccccatcaaaaggggccgggggtggaaaaaaaggggcccaattaaaaaatttattttgaaaaaccccggggttccccccgggggggccccaacccaaccgggggttgtaaaccgccttaaaggcctcaatttttattcctgaaacaaaaaaaaggggaactttatatttaaatttgcccctttttggggccaaaaaaggccttggggttttaaaaaccgaaattttgaacccctcctggtttttttaaggggccattaaggg

SEQ ID NO: 35087 - DNA, 233 bp, Glycine max
  Clone ID: PAT_MRT3847_131686C.1
ggttcacaaggctattctagagttatggagacctgaccccagtgaactaacccttttactcacaaaaggagttgattctactttactgaaggttcctccaaatgcaattactttgactggaagcagtgatccttgctatgttgaaggttatcatttggctgatgcaagtgatgggaggttcactctgcatttgaaggtcttaaacttaactgagcttgaataaaatcgggtgg

SEQ ID NO: 35088 - DNA, 218 bp, Glycine max
  Clone ID: PAT_MRT3847_131687C.1
agcagtctctacggtgtctcaacttgtaacagctccgcaacctcaggcaccacctatgcgagggatcttttccatgtgccaacatgcaaaactattctgattcaaacgggaacactgtgactactatagtttctaccctgaacagtatctagcgttcatttacccaggatgaaacatatgacctcctgaaccttcctagaacaagctcttggattcct

SEQ ID NO: 35089 - DNA, 152 bp, Glycine max
  Clone ID: PAT_MRT3847_131688C.1
ggtttcttagatagtaaatatctctaaacatgaaaagtaaactcatactggatacaattgcgcgataacatgtttcgcatgacattctctgtgacatactattgaagacgctcaacaacatgaaaaatcttttattgttccttcaccgaatg

SEQ ID NO: 35090 - DNA, 290 bp, Glycine max
  Clone ID: PAT_MRT3847_131689C.1
acggcagacgacagaaggcgataccacaccaacactcctctcccacaacactcctctcccacttcctaattcgcctcccaattctcttcaattcaagcaccaaactttcttcttcacgttcccgaacatgaacccgaaatcgaacccgaccctacttcgattgcgcacgctcacctgctcagtaccagacggcaacgaccacgaccacggatggtgccacggactcttcttctcttacggtgaagcctttcttcagcagaaaccagcaaacgagtcttatgagctcaaag

SEQ ID NO: 35091 - DNA, 351 bp, Glycine max
  Clone ID: PAT_MRT3847_13168C.1
cccacccgagtttttttttttttttttttgtcagagagaattggggttaaaaaaaaataaattgctttggggaaaacgaactgatgcgggggtaaaaaagggaaacccggaccggggggtggacccggaaattttggccggggaaagagaagattaaacgttgccttaaaaaaggcaaaatgagggttggggaaaaaaagaaattgactggccttcgcagaaaggatactaccgggtagtataaagagaaaaacacggggggggaaaaaaaggagaaaacccgggggggttgaggggggaaaatggcccccataagagggggaaaaccctctcgccccatttaaaataaaa

SEQ ID NO: 35092 - DNA, 281 bp, Glycine max
  Clone ID: PAT_MRT3847_131690C.1
cggaccgagatgacaacgacgcacgcgggggactcgatgtgtatcttatgcaacgcattaccaattttttgcgggcaccttcacttctttttcgatgccctcaaaccatccatcggtcggcgacctattccttttgggtgcccctcgcttaccttcttggcaagcccgaaattaattcttttccccgcctggcgcggacccaaccttccccaattcaaggtcctttgaaccagggctttacaaagggctctaaggtaactgggccgaatggggcatgagga

SEQ ID NO: 35093 - DNA, 382 bp, Glycine max
  unsure (1)..(382): unsure at all n locations
  Clone ID: PAT_MRT3847_131691C.1
caattggaaagaaaagaagctgagcaagctggggctaacaaggaaacacgaattgtcacacccctgatggaatttgttcgtcagagacgtgctgttgacagtggtatgcaggcttcatcagcggtggcaaaagttagcagaagatccagagctgctttgcctggcaagcctggctcangcaatactaaacgaggatctgaaaagaaaaagtatgttcagaaggacaatgccaagggtgttgctcgcaaagagtcaaaagacaagtcagcctttgttgtggtcccccggcgagacaatcaatcagctgaatcaatgcatggtattgaaggtcccttttctggaatttcactgacttctgactcangaaagaaaaaaatccttc

SEQ ID NO: 35094 - DNA, 466 bp, Glycine max
  unsure (1)..(466): unsure at all n locations
  Clone ID: PAT_MRT3847_131692C.1
tcctctagagcggccgctcttgatttttttttttaaacaccatcatcaacaggaatgagttattgcgaaggatgccaattacatcactgactacagcatacttaatactgctgatatgttactaaatatatgtccatgacaaataaatgaaaaattggctgccaaagcaggcatacagaggcataaatcttgtaaattagaatacaacatttgccagacctacaatgacatttaatcgacgcatanaaactatgatgaactaatagcgtatccacaaggttctgcgtctgaaccagttgtattcaagcaaacgctaaatatgacccgaggtggctataacaacatccttgaaatatatatatcgggacgcaacacgattaattgtactgacatcaacagcatcatttgtaacaaacaattcagcatatgagattcttcaaccatatgtgagtagctgacgaccact

SEQ ID NO: 35095 - DNA, 458 bp, Glycine max
  Clone ID: PAT_MRT3847_131693C.1
ggctcgagtggtaattcatgtaataaaattcaatttcagttactaagatgaaactaattggaaaactcagaactacaccgaaagtatttaaaaaagtgaatctaattgtcagcgtctaagatttgatggccttgtttctggggtgtcttagaaggtgatgtaactgtgcagggaaaaacagtatctctataatcgtgccaattgttgtcccaattgtcgttgtgattgtacttttcattgttggagtctgcttcctacgtaagagggcaagcaagaagtataacacttttgtccaggattcaattgtggatgatcttaccgatgtggagtccttgcaatttgatttggctacaattgaagctgccacgaatggattctcggatgagaacaagattggccaaggtggatttggtgtggtttataagggtatcctccttaacagacaggagatagctgtg

SEQ ID NO: 35096 - DNA, 1541 bp, Glycine max
  Clone ID: PAT_MRT3847_131694C.1
tcccacgcgtccgtacggctgcgagaagacgacagaaggggacactacaactaaacacactagctatagctagaatcccctccaatccctctttgtctttgtgcttttctttagttctttccaaaacagcaacaatgatgagttgccaagcatggcctgaacccatagttcgagtccaatccttagctgacagtggcctaagctcaatcccttcacgctatattaggccacactcccaaagaccctccaacaccacttcttttaaactttcacaaaccgaacatgatcatggtcacggtcgagagactcgtgaccatgatcatgttaacatccccgttattgacctggaacatcttttctcggaggatgaaatcctccgagaaaagatattccgacacgtggacgaggcgtgtcgggagtgggggttcttccaggtggtgaaccatggggttagccatgagttgatgaaaagttctagggaactgtggcgcgagttcttcaaccagccacttgaggtgaaggaggagtatgccaactcccccaccacttatgagggctatggaagtcgcttgggagtgcagaaaggtgccaccttggactggagtgactacttctttctccattacaggcctccctcacttaggaaccaagctaagtggcttgcatttccacaatcctttaggaaagtgattgctgaatatggggaggaagtggttaagctaggaggaaggatactcaaaatgatgtcaataaaccttggcttgaaagaagatttccttctcaatgcatttgggggagagagtgaggttggtgcatgcctaagggtgaatttctatccaaagtgccctcaacctgacctcacttttggactctcccctcactcagatcctggtggcatgaccattcttctccctgatgattttgtgtctggccttcaagtaagaagaggagatgaatgggtcatagttaagcctgtcccaaatgcattcatcatcaacattggtgaccaaattcaggtgctgagcaatgcaatatacaagagtgtagagcacagggtgattgtgaactcaaacaaagatcgtgtgtccttggcattgttctataacccgagaagtgatttactcattcaacctgccaaggagcttgtgacagaggagaggccagccttgtactcaccaatgacctatgatgaatacagactttacattaggctaaatggaccttgtggaaaggcccaagttgaatcactggctttccaaccatgacttaataatgtcaattaataacgtgtttggtttcacaatgtaattttctatgtttcatgtgtaattttaagttaatagttataacttatatttcccacataattttgtacttcttaagagttttcaaacatgttattacctttcctttaaaactattgatgctttttttttgtgatatctcaagaaataagtatttaataatatccacaaattagtatatttcccaaaaaaaaaaaaaaaaaaaaaaaaaaaaaagcggccgctctacaggatcca

SEQ ID NO: 35097 - DNA, 565 bp, Glycine max
  Clone ID: PAT_MRT3847_131695C.1
ttttacggctgcgagaagacgacagaagggtacggctgcgagaagacgacagaaggggacactacaactaaacacactagctatagctagaatcccctccaatccctctttgtctttgtgcttttctttagttctttccaaaacagcaacaatgatgagttgccaagcatggcctgaacccatagttcgagtccaatccttagctgacagtggcctaagctcaatcccttcacgctatattaggccacactcccaaagaccctccaacaccatgatcatgttaacatccccgttattgacctggaacatcttttctcggaggatgaaatcctccgagaaaagatattccgacacgtggacgaggcgtgtcgggagtgggggttcttccaggtggtgaaccatggggttagccatgagttgatgaaaagttctagggaactgtggcgcgagttcttcaaccagccacttgaggtgaaggaggagtatgccaactcccccaccacttatgagggctatggaagtcgcttgggagtgcagaaaggtgccaccttggactggagtgact

SEQ ID NO: 35098 - DNA, 553 bp, Glycine max
  Clone ID: PAT_MRT3847_131696C.1
gctaaaaacaatttcaggttttaattaatggatgaacaaggagatattgaattactataagaaggctatacgatatgattctcagctggtggaaacttacactattagattgtaaagattttaatgggatattgagattttggttgttaggaatttggaagcagttgttagactttgatcaattagatgggcctcatcacccaatgaagttcttcaaccattggaggtagctgcaagcaataacaacaccaaaggtgagggtgaagccgtgggatatttttagttaaactttaatatagctttatacgtatatatagatatttgcttgtttttattggtatgtaaataataaaaaaatggtggtgtgctcttaatgtattcaaatatttaaaagagaaaagctatttcgactcagctgttatatgcataccttgatcaattaggatacaaatgagctttgtgtggatcatatactgtagaagaacgatctattgatattttaattaaagccaaattggtgactatggtttgtcactgtaaaaaaaaaaaaaaa

SEQ ID NO: 35099 - DNA, 1680 bp, Glycine max
  Clone ID: PAT_MRT3847_131697C.1
cccgggtcgacccacgcgtccgtacggctgcagaaaccaacggagggggacactacaactaaacacactagctattagctatagctagaagtccctccaatccctctttgtctttgtgcttttctagttccttccaaaataccaacaaaagcaaagacaatgagttgccaagcatggcccgaacccatagttcgagtccaatccttagctgaaagtggcctaagttcaatcccttcacgctacattaggcctcactcccaaagaccctccaataccacttcttttccaactcctaaaccttttcaaactgatcatcatcatggtcatgatcagaaaacttccgatcatgaccatgatcatgatcatgttaacattcccgtcattgacctgaaacatgttttctcggaggatccgatcctccgagaacaagtgtttgggcaggtggaccaggcatgtcgggagtgggggttcttccaggtggtgaaccatggtgttagccatgagttgatgaagagttctagggaactgtggcgtgagttcttcaaccagccacttgagatgaaggaagagtatgcaaactcccccaccacttatgagggatatggtagtcgcttgggagtgcagaaaggtgccaccttggattggagtgactacttctttctccattacatgcctccttcacttaggaaccaagctaagtggcctgcatttccagaatccttgaggaaagtgattgctgaatatggtgaaggagtggttaagctaggaggaaggatactcaagatgatgtcaataaaccttggtttgaaagaagatttccttctcaatgcatttgggggagagagtgaggttggtgcatgcctaagggtgaatttctatccaaagtgccctcaacctgacctcactgggggactctcccctcactcagatcctggtggcatgaccattcttctccctgatgattttgtgtctggccttcaagtaagaagaggagatgaatggattacagttaagcctgtcccaaatgccttcatcatcaacattggtgaccaaattcaggtcctagccctctctagatttgttaaaacttcaaaccctttttactagtcaagctgctatataatgactaattacattaattactctttcttccacacgctattttagtcataacatttgtcttacatgtttggtttacttattttgaggaaataatcatatagtaatcatcccaaacaagcatttttaggctcaaatttcaacaattggtggttgttagtaattaatcaatgttcaatgccatgtttatcttttaggtgctgagcaatgcaatatacaagagtgtagaacacagggtgattgtgaactcaaacaaagatcgtgtgtccttggccttgttctacaacccgaggagtgatttactcattcaacctgccaaggagcttgtgacagaggagaagccagccttgtactcaccaatgacctatgatgaatacagactttacattaggcccaacggcccctgtggaaaggcccaagttgaatcattggcctcccaaacatgagttaatagtgtgaattaatagcaagtttggtttctcaatgtgattttctatgtttcagatgtcattttaagaagctctcataaaaagttaattgttataaaaacaaaaaaaccag

SEQ ID NO: 35100 - DNA, 1896 bp, Glycine max
  Clone ID: PAT_MRT3847_131698C.1
gcccacgcgtccgcccacgcgtccgacggctgcgagaagacgacagaaggggggggaaacaaaaacaaaacatttcgtccgaaactaatataacgtgttcctccttggaagaagccatagccataacataactaccacttgaaaacaaaacccaccaccaccttagttaaaaaaaaaaaaaggttagataaaaattaagctttgttcggtggtgaccatggaaagcaccgactcatcaagcggttcacaacaaccgaacctgccacctgggtttcggttccaccccactgatgaagagcttgtagttcactacctcaagaaaaaagcagcttctgctcctcttccggtagccatcatcgccgaggttgatctctacaagttcgatccatgggagctacccgctaaggccgcgtttggggagcaggagtggtatttctttactccgagggacaggaagtatccgaacggcgcgaggccaaacagggcggcgacatctgggtattggaaggctactgggactgataagcctgtgttgacctctggtgggacccataaggttggggtgtagaaggctttggttttctatggagggaagcccccaagagggatcaaaaccaattggatcatgcatgaatataggctaactgataacaagcctaacaataggcctcctcctggttgtgacttgggcaacaagaaaaacactctaaggcttgatgattgggtgctgtgccgaatctacaagaagagcaacacgcataggtcacccatggagcatgacagggaagattcaatggatgacatgattggagggattcctccatccatcaacgtgggccacatgagtgcgaggtttcatcatctttcaaagatgacgacagcctacaacaacggtgcattgttggaaaatgatcaccacaacttgttggaagggatgatgataggtaacagcaacggagggatgaacacaactactactactacacctggtcccatgtcatctcacttagggggatccaaggaagagctttcttttgttccaaccatgactcactcttcaaacacttctaagagaacactttcatcactgtattggaacgatgaggatgtggcgggtacctcatcttcgaacaaaaggttcaatttggaattaagtggggacaataataaccatggaagtgttgtgagggatgatcaagagaatggcactgcttcctctattgccactctgcttaatcaactccctcaaaccccttcattgcaccaacaatcaatattggggtcaataggtgatggacttcttagaacaacataccaaataccaggaatgaattggtatgcttagaacaatttcaggtttgttttaattattgatgaacaaggagatattgaattactataaagaaggatatatgatatgatcctcgatcagctggtggaaaccctacactattagattgtaatgattttaatgggatattgagattttggttgttaggaatttggaagcagttgttagagtttgatcatttagatgggcctcattatcatccaatgaagttcttcaaccattggagttagctgcaagcaataacaacaccaaaggtcaggccatgggatacttttagttaaactttaatatagctttatacgtatatatagatatttgctttttttattggtatgtaaataaaaaaatggtggtgtgctcttaattaatgtatacaaatattcaaatgagaaaagagatttcaactcctatttcgactcagctgttatatgcataccttgatcaattaggatacaaatgagctttgtgtggatcatatactgtagaagaacgatctattgatattttaattaaagccaaattggtgactatggtttgtcacgtgt

SEQ ID NO: 35101 - DNA, 431 bp, Glycine max
  Clone ID: PAT_MRT3847_131699C.1
caacacaaaaaacttatgtttggagctcggggaatcccgaatttccaaatcaccctttcccaaccttacaaaaaaaacccaggctgaaaacgtggaaaaacaaataaaaaaccccgggctaaataataaacatagttggattttgaacaaaaggccaaacctagctaaacctttctaagcctttacactatacacaatccaccccccccttggaccccattaaattaacctcaggtatactttgaagcccgggcctccatgacctatgaggaacatcgggggtttcgttactcgcaggatctttagcgggtatcaaccgacccaaaacttgttccgcaaaagcgggcccatgaccacctggcttataactattattcttttccccccccaacaacttttttagctccttcttggagatctttatcttcact

SEQ ID NO: 35102 - DNA, 786 bp, Glycine max
  Clone ID: PAT_MRT3847_13169C.1
gagtatagaaaatttattctcagcaacattaaaaccttgggggttactttacttgttcaaggttgcattaaactttaggtatattcgtcaaaattcaaccaatttttacaatcatcttggtcactaagtaacatctgatgcccataattgtacaatgcacacggggtttgttagggaatggtatgtagtggatctcggttgagttgaacctgcttttggttctttcttgacaaatcacactttatcttttttccctattgttcttgtaatttgtgccttcagaggtcagagaatgttcttatgaattattataactcatcagtcactcatgatgagtgccaagtagcagatgataatgaggggatgatgattattatgtgctactgatgattttcatgttttactgcagcactatgtcggttcaatctggtacgggggaacccactagataaatttatattcactatatctttttgcatggacccattgaatggttttttattcataatagctcttcatgtttttcttattcttcacctttgtacttatgagccgtatagaccatgagtttagattttcaatccacaatagcacaaatatgaagtatgtaattttagattgtgactgaaaatgccaattttgtttcttagttgcgtatttggttgggcacttctatatattcttggaacttttcattacattattttaggcttttaattgttgaggtggtgaaatggtcgatgagattgagatgtgtatagatcttaaagtcatgcagatggtggt

SEQ ID NO: 35103 - DNA, 310 bp, Glycine max
  Clone ID: PAT_MRT3847_1316C.1
ttagcgaagaaaaacggcgacaattatcgggcgcacccgggccacatcaagcactcgcacaggacatgagctcaaacgacctgctggggcctcatccactaccgcacttggattgccagcaaaggccaaagcggcgagagtgaggagctccatggaggaaaagccaacaagcagctcaaacctagggacggaggcatcctacgaagcagcaacagctgccgaaaccatgacaagcccagcagccacagctttggatgatgagagactcagcactgaaagaacagggctcacccttgggcttagcaacaac

SEQ ID NO: 35104 - DNA, 358 bp, Glycine max
  Clone ID: PAT_MRT3847_131700C.1
ggctcgagaaacactcttcttcatcggacccgctttgggtcttgtgatacatgcgcattgtaaaggagctgggtgggtctttaaataccacacactcctgcacaaggaccccgaccgctttctgtgcccgaatttatgagagccctacaggtccctattgggtgcccgcactgacatcatccacgatcctggccgagggactcctatcaattaagtggactgttgactgccgttgcagcccaagatgcaaaactagctttggatcgccggccaaggtctgtacaccctccattgcctgtactagcagcctgaaggccaccctggaaggatgcaatgggttgcctgtcctatccatggg

SEQ ID NO: 35105 - DNA, 395 bp, Glycine max
  Clone ID: PAT_MRT3847_131701C.1
tgcatgctatctgcaatactccgtatccacttcgttgctattagaaggggtcaataaaggcacataaagaaagaggccttgcaaatggttaataccctaattggctactactacttttccaaccttttcctttctcccaaagctattaaatgacattcacttccgactctttcacatgcgctatattccacccacaaaacgcagctcttgagtcccaggggcgattatgtctaaggggactgaagaatagtatgaatttagacatatgaccaccgaacatattcacgaagatgttgaccaccttaggggcgatcttgtcatgcttcaccttcagaaatcggatcacaacgagtacaagtccagcgaatttggtcgcatgcacaagaagattgctt

SEQ ID NO: 35106 - DNA, 650 bp, Glycine max
  Clone ID: PAT_MRT3847_131702C.1
gttatcttccagatatctgcatatatatttcaacctgcctcccttttgaatacccagaccagagtttcgtgtggatttaattaattaccggtacggtccacgaattgcagtggacaaatttataaagatctgtttggctttggtctataatttgatcgtgaagcagtgtaatggaagccacaaatgtcgcatcctgggaaaaagtaaaagacaactatgaaatatggaaaactctaatgaaaaactatttggtgggcaatgatctgtgggatgctatcgagacaccttctactccgagacatgatgctcatcggatgaatgcaatggctttgcatatcattcaacgatcatgtggatcaaagaatttcgatgagatttggcaatttgataaagcccaagcagcttggaatcacttgtgcgttcgttacagtgataatgagttaaaagccaaaccagatattgagcaaggtgttgtaggcgatgatgattttgagaataaagagctgtacaagtacgtggaagatggtgattggaaaaagacagagagtttcatcagcggtaacaaggtggaagtgtcgcgtttggcgccggattcaggtttcgttcttcacgttgcagcaatggccgggcatgcgaacattgttagggag

SEQ ID NO: 35107 - DNA, 358 bp, Glycine max
  Clone ID: PAT_MRT3847_131703C.1
agaaaggaaaaaaaccaaagactttaacctgggccccattgaaaaagggaccccagggacccaaaatttttccgggataccaacccattttgaacaaaaaagcttttttttgtatagaaaggtttagcttgttccccggggaaaattgctaggttcctaggggggtttaaacgagggcccactacaactccggggatgggggctaaactgtgggcgttttgggtacgaagcaacctgggggaccgggaagggacacgtggtgagctgttttcccaaaaaaaggcccccaggggggggaaattcgctgggcatccccaaaaggggccctttaaaagaccttgctggcccagtgaccctt

SEQ ID NO: 35108 - DNA, 692 bp, Glycine max
  unsure (1)..(692): unsure at all n locations
  Clone ID: PAT_MRT3847_131704C.1
taatttaannnnttggtagaatgaaaattcttatttagtctctgtataaaannnnngataattacattggataatttaataataaattaattcttaaatttataacttaatgtcaaattgattatttaaaaatataacttaatatttggtttatgaacattacaatttaataataaaatgatccaatgaaactaattatatgattgtcacatttttttttataaatttagggattaaattataatttttgtcctttcagagataattatatctaatttacacatttaggaactaaaatggccatgtaaaaaaaaatacaacaattacaatgtatcattattttcattggatcattttatcattaaattgtaatattcatgaactaaatattaaattattttttaaggaccaatttaatttaatttaagttgtatattttaagtattagtttgttaatttagggactaaatcataatttttattctttcagaaacaaaattatcactgatttacacgtttaagaactaaaatgattatttttgcttcttttaaattaaagaaaacgaagtatgaaacacctaaaatattatgaaacatgactcaaatannatttaatataatatatgtangnttaannnaaagttaaaatttcactcnnnncaaaattaacatnnnnaaaacnnnaacaagtc

SEQ ID NO: 35109 - DNA, 474 bp, Glycine max
  unsure (1)..(474): unsure at all n locations
  Clone ID: PAT_MRT3847_131705C.1
cccacgcgtccgcccacgcgtccgcccacgcgtccgcccacgcgtccgggagcatctcaaagcataattcaccgcgatgtaaagacaactaacatcctcttagatgataactttgttgctaaggttgcagactttggcctctccaaaactggtcctgctcttgatcagactcatgtgagcactgctgttaaaggtagtttcggttatcttgatcctgaatacttcagaaggcaacagcttacagagaaatcagatgtttattcatttggagtagttttgatggaagttttatgcacaagaccagccttgaaccccgtccttccaagggagcaggttaacatagctgagtgggcaatgagctggcagaagaaaggaatgcttgatcaaatcatggatcagaatctggcggngaaagtcaatcctgcttctcttaagaagtttggggagacagctgagaagtgcttggccgagtat

SEQ ID NO: 35110 - DNA, 739 bp, Glycine max
  Clone ID: PAT_MRT3847_131706C.1
aatacagaaattttactttattcgagtaaaaccggacaatatataagatactgaggcatatatatccactagttggccttgtacgtgacaaatatattatcaatttcaacacgtatataaggacacgactaattaaatactgataattaaacattacacctcattatagatccacacacaaggcaaccagatatagtattaattaattaattacttcagattaatcttgttcacgagtggacgggctttgcacatggcattcaatggagttaaccttgacaaagtgaaccaatttgcctccctcatatcaatctcttcctcattcactcttttccagtcaaagcactgaattaacaatcccaaagtcaagccaacgttctgcaaggctaaaccttctcctggacaagcccttcttcccattccaaatgcaattacctttttctccagaccttcttcatcaaacctctccggtttaaaacatgtggcttcattccacaccaaagggtctctctgcatagcccaaatattaatcatcactatagtgtctcgtggaacattgaattctcctatgttgatgtcttctgaagacacgtgtggtattgctagtggagcaggaggatgcaacctaagtgtctcaaggatgatcttcttaaggtaaaataggtttggaaggtctgattcatttaccaagcgatcttgacctacataagtatccaattcatctcttgcttttttcaac

SEQ ID NO: 35111 - DNA, 149 bp, Glycine max
  Clone ID: PAT_MRT3847_131707C.1
aggatcagatctactggatgacacgcacaactgtttggcgagaaaacagccctacctaatcttggttcaataagaggcggggaaggggcctatgagaaaatgcagcggttgacaaagcttgcaaccggaccgctgtacaagggcagata

SEQ ID NO: 35112 - DNA, 606 bp, Glycine max
  Clone ID: PAT_MRT3847_131708C.1
cggacgcgtgggttagttcctttcctttctctcaaggctaagaggcctagacatcaccacaaacaagtcaccaaagaaggaagagtgtcacagaatcccgcagatcttgtttgtggtgatgtctagaccttcctagacttgtcttttgtcggagttcactgtctccgtgttgcggtggcagccggagggatattttcaaactaagcatgtggatctcgcttcctagttatgctctagaagacttcatcaatgaacacaaagaggcagagtcaagatccaaagaagctcagggtgaagcagagcaacatgtcctttagctattaacaatatcaaggctataatcctcgtaagtaataacatctcctaaacactttcttgtaagaaaataatctcatctcctttctatacaacttacaaatatgtttaatactcgggttttttttcttcctcttcttaatatctgagttttgttgctatttattattattattatgaattttgagttttgtagcatacaagaagtatcactgtgaaccaagtagtaaaatgggtgctttcgttttcgccactttgggcattttattcatgttccagcgagagtggata

SEQ ID NO: 35113 - DNA, 329 bp, Glycine max
  Clone ID: PAT_MRT3847_131709C.1
ggggaaacaacttgagagaaatttcaagttttcaagctttagatgctaaaccaccgaaaaaaggtgtaatacttgtccaacacccaagaccattttttcgagatgtaaattcttaggaatcaaatccgtggccaaagcccagaaagaccagatttttttaggggtaaccatttcacaaaaaacaggggggtttttttttttccttttggaaatttggggggggggattataaaagttcttttttctaccaaagatcagagggcattttttggatcaaaatcatcatgggatttttcctcatcccactcattttccacgattcctaatgc

SEQ ID NO: 35114 - DNA, 414 bp, Glycine max
  Clone ID: PAT_MRT3847_13170C.1
gctaaaaagaactttgacaaagaaattaggcgtgttacaaaaaaaacgcccggtttttcctttagaaagaatggaatggatccctcccggtgtttttaaaccataacgttgggggggatcccaaattttaacctttcttccccaaaaggttacccgaaaaatgggccgccaaaaccccccaaaatggcccccattttgggggggaaaaaaaccgaatgggcgtccccttaaataccgggtaaaaaaaaccagggctggccccttaaaaaactttttttcttccaaaaaatttaaacaaaccgggctggggttttgcaccatggggccaaagggggggggaagttttctcaataaaaaccaaaaaaaagggctaaaggtttttttttaacacccaagactaaagggtatgggggt

SEQ ID NO: 35115 - DNA, 521 bp, Glycine max
  Clone ID: PAT_MRT3847_131710C.1
aaaaaaaaaaggcatttgcatataattaatgggccaccggtttccacatgaataatagagaaaagaaaaggccaaacccaaatttttggaaaaaaaaaaattattggtatttatcgatgggttttaaaggcattagcaggggcccctcaaggatgaccaatcatcactagggggcaaaaaaagcaacgggggtcttggcccacgatggggggattatcaaaaaatcagaatcacttggtccgacgggatatagggattccatcaccaaccgggagcatgcaaatctcgatccgggggtccacagggagggccttggtgagctcgagcacaaagcccctggagtatctaacggacttcctgggaggagcatcggggggggccaccacaaagccgttccataggggggtggcgaacccgatcactcccccaactttgacaagctttatcaacctcttgggggagttgagggagttgcccttgtctgcgcccacaaagaagaaggcatagctcccaggggtctt

SEQ ID NO: 35116 - DNA, 337 bp, Glycine max
  Clone ID: PAT_MRT3847_131711C.1
ctcgagccgattcggctcgagttgtacctgattattggcatttcatgccactgttaagactgtaccattttccactgtttgtgccatatgtgacatccaatgtattactccccatgtgtatgttgtatataactttatcattttgaaaacttgttgtattgttctctaatattgtgaattttatttttatactatgttaaactctgtttttacatctcagttggtcaatgtgaatgtgcaaaattgtcacaattaaaattgtctgcatttttatttttgagtcagttgtctgatggaagtgtgctataattgacacaataaaatagtcttctatcta

SEQ ID NO: 35117 - DNA, 374 bp, Glycine max
  Clone ID: PAT_MRT3847_131712C.1
gacccacgcgtccgcggacccgtttgccttctcctagttttcagtttttgaccaagccaaaaacaagaaaaaaagtatttttcaaattgctctcactaccatccaattcaatattcaatatcaacataatttgttatctacaagcttttttttatgctgatataaatcaatttcccatgctgataccaactgcaataaaagctaatcccattttaccccttcccaagcctcatctagatctatataacctccatctaaatttaccaagacttctttcttcacttccatgcaaataccaaaatgttcaaaggccatttttccaatactatcttccacaactggaaatccaacacaaacaaaacctatacattttc

SEQ ID NO: 35118 - DNA, 443 bp, Glycine max
  unsure (1)..(443): unsure at all n locations
  Clone ID: PAT_MRT3847_131713C.1
aaaaaaaaaaaaaaaaaaaaaaaaaaaaaaaaaaaaaaaaaaaaaaaaaaaaaaaaaaaaaaaaaaaaaaaaaaaaaaaaaaaaaaaaaaaaaaaaaaaaaaaaaaaaaaaaaggggggggccgttttaggggtcccaactttccttccccggccttgcaacgttttattttttttttggggccccctaatttaatttcctgggccgggtttttccaccgtggggctggggaaaccctgggggttccccacttttttcccttggcaccccttccccttttccccggtggggttattagcaaaggggccccccccgttcccctttcccaccattggccccccttaattgggaatggggcccccccttgtaggggccctttaaccccggggggtgggggggttccccccanngaacccgttactttggccagccccttagccccc

SEQ ID NO: 35119 - DNA, 863 bp, Glycine max
  Clone ID: PAT_MRT3847_131714C.1
ttaatgtggggggtagggctactagtaaaagcacgccgactaatcagccgactcctactgccactgtgaccgggggcaaccgcctgacgctactgcttctgatacttcttcggcttcctccgggagagcttaggtgggtagttgtaattgtgctgactgtgcacagccaacgcttcgggcctactctatcctcgcacactaaacaatcgcatcagccgcctgttcccgtgtagttgtctcacccgcttattatccgtacgtcggccaacaaattgcacaggccggcccgcaactgcaatcgccagccggtatctcatttagataaaacggttgttctgccggcgccgcctatgtggatcgaactgtccaaggtcctgtcaccgcctgggctgaaaaaatgcaatttgatggagctacgctattacatacacggacaacttaggtgtatccctggcaaccgcctggtacacagcaagcggaacaaatgaaggcgccacgtacatacgcatgtgcgccgcactagccgccacaagccccggaactttaagtatttgcatgagccgcgtcgccaatggagaaccatcaactcctcgtcggggcatccccacgcacccgggcgggtgcgtgttaataccgtcaagtcgcgccatgcagacatgtcttaatcacgtgtccaaaggcctgcacagcagcgggcgcaccacgagtggtagtttttctgaatgcgaattacggctgtgccaccagcacagacctcacacactggggacgttggggggggggggtggtggtgggtaaaaagaacaaaagaaaaaggatgagcataaccgggggcaaccatattagccctgatggaaggaagg

SEQ ID NO: 35120 - DNA, 272 bp, Glycine max
  Clone ID: PAT_MRT3847_131715C.1
gggcagttacagggaggagtgaagcaggataagaactttattcagcagagagagtgttgtgatagtaagatcctgggttaaggcatataaaaggtgagaaaaccctaatattggtctacataacatcacttggggatagacaacgctagaagggctttgcgttgagataatgatcgcaattgtgacttgtgacaactacaaatctagaacagccgttgtccagcatgcattttagtgaagtgtttccgatcactatcaacagtgaagggttt

SEQ ID NO: 35121 - DNA, 174 bp, Glycine max
  unsure (1)..(174): unsure at all n locations
  Clone ID: PAT_MRT3847_131716C.1
nttncatgnacgcgtacgtaagctcggaattcggctcgagagcgagcacaggcgcctggtgaggcaggancactcagcctgaggcattcgcagataagtttctatttaaaaagatttaaaaggaaactagaactctaaacttantagagtagcttactgagataataatanttt

SEQ ID NO: 35122 - DNA, 849 bp, Glycine max
  unsure (1)..(849): unsure at all n locations
  Clone ID: PAT_MRT3847_131717C.1
tcagctctggaaaggtttannnatgcaatccaataccaaattagtttgttgtatatggaaagtttatatcagtaaaaaaggacccaaaaaccccaatatactctttccnntctgttccttaccatcacaaatttataaagttttggtttcagtaggattttggttacattgagttccaatttgtttnngagcatcttacaattaagcattgatatgccacccatgagcttaccaaaggagggcctgatggatttgctagttttattgcttttaaagtcaagtaattcttactagatataactaattatcagtcatgattctcaggcaaatgaaatgctgcatcacaaggcaaacctgggtatctttcctatcacactggtcaaagtttagaaaagatcaaccaggatacagactgtgattttttcatgaaagcgaaagaagccaaagaatatggattcatagatggtgccatcatgaaccctctcaaagctctccagccattgccggctgcagtggaaggtaaagatcgggatagcatttgaacttgagactactgcttagtgttaaataacaatgatcttttgggttgtccagtctaacttcattttgttacacatgttgatttctgtgtaaccatgcacccatttgttgaggtagaaaggaagcccccctcaactcttcaaatatttattttaattctgttttaagccaactagtgggtaatggaatcaggtaactctccacttagtaacatgctgtttgtaaacgggcattgatgcataacttccaaagccatagttgatgtattcttcacaagagaaatgtcagcatcaaactttttaacaaaaa

SEQ ID NO: 35123 - DNA, 1081 bp, Glycine max
  Clone ID: PAT_MRT3847_131718C.1
gtacggcaaaattgcttgacaggatcagttgggattaatctcccacatagtttgtggttacaatgggatgatcaagtgatcttctctgtgcttgatgacctgcttgaaatttctcagacacactctcaaaaagacttccgcaacatagaaggaacccttgttcttgctttgaagctcttgtgtaaagttttcctccagttaatccaagacctatcacaattgccaggcttcaacaaattatggttggctgtactaagtcggttagaaatttatatgaaggtgaaagttaggggaaggagaagtgagaagcttcaggagcttgtgcctgagcttcttaagaacactttgcttgttatgaaagcaggccgtgtactagtccagagcaatactgtagatggaagtagtttatgggaactgacttggctgcatataaataattttgctccgtcgttgcaatctgaggtgtttcccgagcaagactcagagcatttgcagcacaaacagactgaaaaagttgaaggtttggggcctgaagaaagcaattctgtgtcttcaaatgaaacagcaggtaaaaatggtcctggtattggttaatcatagcagcagccccatggctaccggaattggtttttgtttgtctctttgaacccatgatctctgtgcttcattgattggttttcttttgttctgaggttgtctgggttctcttgaagtgattatgcagaacattacagatctcattcacatcttcattgggacgcttgatgttagtgtaagatttttggttgaagatatgttatggcttgagacacattagaatgagcccttgtagtgtggtccttagagaccacttcctctctccctgagccctcgcctgagctgtttagctgaaaaatttatcgagtttttcttacgaaactgtacagaacccgatattctcttcacttagctgcgagatgtaatttactcggtatggtgcaagcaacacaagttttgaaattgtcataaatacatatatttgaaacttccaaaaagtatgccttcattgatttatcaacttaggctattgtttaagagtcca

SEQ ID NO: 35124 - DNA, 799 bp, Glycine max
  Clone ID: PAT_MRT3847_131719C.1
gtgatgaaactcgcatttaaaaattcgcacacgttgggcgtgcaccgctaaacaaaacataaagctttgctaagaaagtttcttcctttttcaactctgctgtctgaatgcgaagacacggcacagtgatgaagtgaagtggtgcatcaacctcaatctcaggtttcttttgtctcagcaaaggttggatttcgaaggaattcttggttgatggttgatgctatatctcatcagtgtgttctataagaaattgggattttcccattgctttgtatgtggcaagtcattgcatttgagaactgttgaagatcttctccaacactgtagaaggttgacaagacattaattggtgggtatggttttctgtgcttgagggatttaaggtttggatgcagattgaagagggctaattgttaaaaccataacccccatcaaggtttttgctttgtgtgtttgtggaaatagcttgagctgctctgtctattttcatttggtgttttgttccatttgctgtgtttggtaggaggttgcttcattggaccttgtttgatcttcaacaatgtcagagaagatcatggttcactcaaggtttatattttgcatgatgataatttctctgttccttttgatcctgtcttccattttcctgctccagtttagcagtcattctttgatacctagatcagtcgttagaacttattcttgtcaataacgcgtcgctttacttaataaaaaaaatgaaaaaaaaaaaaaaaataaaaaaaaaaaaaaaaaaaaagggagtgaaacttttttaaag

SEQ ID NO: 35125 - DNA, 321 bp, Glycine max
  Clone ID: PAT_MRT3847_13171C.1
tcgggcccacatgcctcaacagcttctcacagaggtcctcccacgcattcaataaggaatgtgcggatgcaccctgcggaggagcgacacctcctgtggcttaatacgactgacctccacgatggtcatcttcaaggaaagcgtgttgtcacctgattactcttccaacatactcctgctctatttctttcaaacagtcgtgccccgaatgtacacattctcatgcgcttgattaagcgcagcatttcctgacagacgtagaagctgatgagaatggtacatacggccctagatgatataataaaccagctccttctagct

SEQ ID NO: 35126 - DNA, 2122 bp, Glycine max
  Clone ID: PAT_MRT3847_131720C.1
ctgtacaaagattttttttttgatatggggggtctttgttcaaagtctgtgaaaggtgacaaggtgtttgctaaatcagatggacattctgataaccataaatctgatggtaagaaccacaagtccaccaacatgcctagtgatttgacaagtgcaggggaacatggagtggacaagaaaaaaacaagctgctgctgctgcagggaatggttctgatgatttctatgatggaatcccacggtttactgattctttttcccacaagtctaggtcagtaaaatcaaggcatgctgtggcaaaggtctcagaggtgagtttacgcctgggcagagctggtattgacgttttggacactcttggaagcagtatgacaaatttaagtgctggtgggtttgtatctggagctgtgccccgaccgaacttcatttcaccttttccctccccctccccgatctataaatcattctctctctctctctctctctcttaatcttacaaagtcagttttctaattgaacgcgttataagaaagttagatagattatctgctacagaagtttggaacgtgtattcggatgaagaggtgcatttttataaagagtagagtttgttctgtgaagaactgagggaggttcaggtccatgatattttgaaatctctctgtagtagacactagaagaccatgggacgagcttcatcattacttataatttttttggttcttggttcttcctttgccacctataatgtggtaacgatgataaggcactacggatcttcagaaggtgtggctgtgcatgatggtgcattgttttttgaccctattactgagatgcctgatcatgtaaagaatcggaagacatctaaagtgccctttcatgtcgcgttaacggcaacggatgctccatataacaaatggcaatgccgcgtcatgtattattggtataaacaacaaaagaagttacctggttctgagatgggaggattcacgaggattctacattctggaaatcctgacaacttgatgaatgaaattcctactgttgaggttgatccccttccagcaggttttgatcggggatacattggtttgaataggccatgagcctttgttcagtggctggaaaagactaaaatagaggaagaatatgtgttaatggcagagcctgatcacatatttttacgtcctctgcccaatctggcctttggaggacatccggctgcttttccatttttttacattagacctgatcagaacgaaaagaccataaggaagttttatcctgaggagctggggccagttacaaatgttgatccaattggaaattctcctgtaattataagaaaggatttgatcgcaaagattgcccccacatggatgaatatttctttgaagatgaaagaggacccagagactgataaagcttttggatgggtgctagaaatgtatgcttatgctgttgcatctgctgtgcatggtgtgaggcacattctgcggaaagacttcatgttacagcccccatgggatcttgaaactaacaagaagtacattctccattacacttatggatgtgactacaatatgaagggtgaattgacttatggcaaaattggtgagtggagatttgataaaaggtcacatctacgaggacctccaccaaaaaacttgcccttgcccccaccaggggttcctgaaagtgtggtaacccttgtaaagatggtgaacgaggctagtgctaacattccaaattgggactcatcttccacctcatcatgatgatatcccaagtgcacatttcgaaaaggaaaaaaaaatagacatttgagtctttttttttgtcacgagtttagtcttagaatcatagatgaatgtagtaaactataccattttatatggcaatttaaacgcaggataaatattttatatatatttttttcttgttggtgatcttcttgaatggtatttgggctcgtaccacaatgccagatactttattcaataagtattggcttcgatattgcatatgcatatgttgacaattcttgtaaaaaaaaaaaaaaaaaaaaaaaaaaaaaaaaaaaaaaaaaaaggaatctcttttaacaaaaaatattaagcatt

SEQ ID NO: 35127 - DNA, 147 bp, Glycine max
  Clone ID: PAT_MRT3847_131721C.1
ggccgcccttttttagcaaacacagttgtatccctttttggcacaccaccagaaaggaggggggcatttagaggaccaaggcaacccagcgcacaaattctggaatcacagacacagcatcaacggggagggaaaaaaaatgaaagc

SEQ ID NO: 35128 - DNA, 486 bp, Glycine max
  Clone ID: PAT_MRT3847_131722C.1
ggaccctgaaacctgtgctctcaatttttattggaggcatcctaccatatggggcagagatcatcgagctcgttattatcctgacatgaataaggctgaaccagctctattacatctatggcatccttctaatagtgcccgtgaacctaatgatcacctgcgccgagattaccattgtgcagtgctactcccaaccgtacagtgaggataacaaggggcggtgggaaccttatctcagtgctggatgctgtgcgctgaacctgttcctctactgagaactttactggaataccagatcggagataacagagctggagtcgcgcacccggtacttcagtttcatgacactcgaaacatatgccttctatgtgtggacgggaacaaaaagcatctatgcacgcttatgcgttgatactggatctactgcgaccgagaagagtgaccgatttgaagcacacatacgtggactaatgcagcgcgaagcaa

SEQ ID NO: 35129 - DNA, 328 bp, Glycine max
  Clone ID: PAT_MRT3847_131723C.1
aagatttgttgaaactatatacaaattttacattgatcagatctaaacacaacctttgcaagttgcaacaacattcaaaggttgtgtttagatctgatcaatgtaaaatttgttgaaactatatacaaaaaataaaatggaacgaaaaactggttgtcgccctcttctgagtctcgtaaccctgtaattaattcacaaccttgacctgtagtcccaacacttttatttatgaaaaggctcatactaactttgcgcctgcatgtttctaactgtattctgaggcaatcaagtatcccgttctcatttttgacaccggtgtagccggacg

SEQ ID NO: 35130 - DNA, 408 bp, Glycine max
  Clone ID: PAT_MRT3847_131724C.1
gcaagtaatttatactatttgatttcgatttctaggttgccaattgccgtgctttacaatatttcaacatttctcacaccccttagactacagaaaaaaataaaataaaacaactttactcattgccttgcttctttctattcagactcagagtccatgttgcccattgctttcaaccctattggtctctttttggatatcttcttctccctaacttcatatcgttccagagtaagatcgcacagccatgttcctggactaacgagattgagggttcgttgtatgaatttggctctctttttgggcctctgtggaagctttgaacccttcaacagcacaaaatttttttccttctccttgttcgtcaagggaatcacgaactttggcggtcacaccggcggggccacg

SEQ ID NO: 35131 - DNA, 626 bp, Glycine max
  Clone ID: PAT_MRT3847_131725C.1
agagagaaaccaatttatatttgatttcgatttcttggaacgctggtatgcgttgccatgctttacaatatctcaacatttctcacacccttagactaaagaagaagaagaaaaaaaaaaccaactttactcattgcctcgcttctttctattcagagtcggagtccatgttgcccattgctttcaaccctcttggtctctttttggatatcttcttctcccttacttcatatcgttccagagtaagatcgcacagccatgtacctggactaacgagattgagggttcgttgtatgaatttggctctcttcttgggtctctggggaagctttgaacccttcaagagcagaaaatcttcttccttctccttgtttgtcaaggcaatcacgaactttggcggccacaccggcggagccgcgtcaccactgccggacggcgacccaccaccgcccttcttgctatcgtgcgcggtgtctgatgagaccacagacttgttattattgtcattaaggggggtgttttgggtccccctcttatcgtgcgcacccctgtccggtgaggcaatttccctaacactcccgttgctttggcctactctcatagcacttgaagtctccgaattcctg

SEQ ID NO: 35132 - DNA, 882 bp, Glycine max
  Clone ID: PAT_MRT3847_131726C.1
agtgaagctgctgctgatcttgactcagggagaaaatcaactaagaaaaggaagagaactgctgatgcatccaataaggaagacagggttgctgatgaggaaaagaaaggtcataaaaaggacaagacagatagaaaaaatgacggtcctgagatggataataaatcaactaagaaaaaggcaaaaaaggatgacaagcccttggacaagggatttgctcttgaggagaatgtttctaaggttgagaagaaactgaagaagaaacataagaatgaggaacaaagtgagcttgatgttatcgatgatgcagaagcttcatttgcggagctttttaaaatcaatgatgcagaaaatctgaatcttgttgatgaaatgagagcacgagacaaagtgcctaaggatgtgaaattggcaggtgacacagtgacctcatttgcgaaacgtaagaatgctaaaatgcagaatattgaatctctatcagctccagaagcagaagttggaatgggagggccatcaacatggggtgatgagtgatgatatctggacatatgctacagatgcatcaaaccttgtctgcaaggagttgaggaccaattttgagtttgactctgctgttgaatttcgcattgcatttgtcagatgtttgagtcgagctcctcagctattttctgcttctgaattccatggtatttttgctatgctttaagctggtggttatgttgttaatcggtgaattgtatgtcagattcaggaacttccgttcaaactttttttttacccttttttagtgagtttattgcaatcagttccaataactttcttcatcatttccattatgttttatgccccttaccccttttttacttgactaatgtgaaatgc

SEQ ID NO: 35133 - DNA, 581 bp, Glycine max
  Clone ID: PAT_MRT3847_131727C.1
cagagcgaaagtaatttatactatttgatttcgatttcttggttgccaattgccgtgctttacaatatctcaacatttctcacaccccttagactacagaaaaaaataaaataaaacaactttactcattgccttgcttctttctattcagactcagagtccatgttgcccattgctttcaaccctcttggtctttttttttctcctacctttttggatatcttcttctccctaacttcatatcgttccagagtaagatcgcacagccatgtacctggactaacgagattgagggttcgttgtatgaatttggctctctttttgggcctctgtggaagctttgaacccttcaacagcagaaaatcttcttccttctccttgttcgtcaaggcaatcacgaactttggcggccacaccggcggagccacgtcaccactgccggacggcgagccaccacccttcttgctttcgtgcgcggtgtctgatgagaccacagacttgttggtattattgccattaaggtggttgttatgggtccccttcttatcgtgcgcacccctgtccggtgaggcaattcccct

SEQ ID NO: 35134 - DNA, 1677 bp, Glycine max
  Clone ID: PAT_MRT3847_131728C.1
agagagaaaccaatttatatttgatttcgatttcttggaacgctggtatgcgttgccatgctttacaatatctcaacatttctcacacccttagactaaagaagaagaagaaaaaaaaaaccaactttactcattgcctcgcttctttctattcagagtcggagtccatgttgcccattgctttcaaccctcttggtctttttttttctcctacctttttggatatcttcttctcccttacttcatatcgttccagagtaagatcgcacagccatgtacctggactaacgagattgagggttcgttgtatgaatttggctctcttcttgggtctctggggaagctttgaacccttcaagagcagaaaatcttcttccttctccttgtttgtcaaggcaatcacgaactttggcggccacaccggcggagccgcgtcaccactgccggacggcgacccaccaccgcccttcttgctatcgtgcgcggtgtctgatgagaccacagacttgttattattgtcattaagggtggttgttttgggtccccctcttatcgtgcgcacccctgtccggtgaggcaattcccctaacactcccgttgctttggcctcctctcatagcacttgaagtctccgaattcctgagaattcgcggaggaggttgctgcggggaaggtgggcgttgacggagattcagatacccgttactctgattaatattattattattatgaaggctaatatgattgttattgttgttattagtgagggtagcagtagtgggtaaggatctactaatactaagatttgaagaagaatctttatcgtttctaaccactctccgatccacccgaaccgttgttgttgttgttgttgtcctctgaaccgggttgtttgaagaagaagggtcgtgtttgacctgcaccttcatgcaccttagtctcttcctgttaccccactgcagccccaaatccgacgtcgttgctgcttgtctcattccatcggagctacccctcagcaacaacgaccgggccccaccactactactatcccctccaactttgtctctttctctaacgctattgccttgatgagactctttatccatcctacctaaactaatccgattccgtcaaaaacccaagccttaagacgcgccacaaaagctcgctggtttcagttctgaagcttcgaaaaatgcaaatctatttctaaactccaactaataacgacatttcagagcttcgatctgcaaccatggccacaagtacaaactcaggcacaatctagcagatagtccagagttccgaaattcagagatttttccagagaaaaatgtatctgcaaaactagaaattatggagcgcctttaaataccgaagatgaacgaatgaaatctttagaagagaattaacaatgtgattctgacaaattctgtcaaatccttgtctgatacatacaccttattcaatgttcaaaaacgtagcagatcctcaacattcaccgttcagtaatcacaattcgcgtcgcagacgcagcttggcgtaacagaaaatggtggaaacgaagaaataaaaataaaaaagtcttcagaaaaataaattagaagatgtaagaagggtacagggtgtttcttcttcgtctttgctctccccttctgtcgtcttctcgcagccgta

SEQ ID NO: 35135 - DNA, 184 bp, Glycine max
  Clone ID: PAT_MRT3847_131729C.1
ctgttcttgctcattgttagaccgaacctaaatttggacccccgaaaagggttttgccttaaaaacaagggtccacattgttatcattttattcaactttacgaaaggaattaatcatgccgccaataaattgaaggaacatggcgatgctggaggggaccccctaactgcataaattaattac

SEQ ID NO: 35136 - DNA, 551 bp, Glycine max
  Clone ID: PAT_MRT3847_13172C.1
ccacgcgttcgcccacgcgtccgcccacgcgtccgatactaccagaaaaagaagaacccttctaaaaacctgcggcaaaaagaaccaacaatgtcgccgagcttcgtcttcgaccctcctagcgacgaagaaatcgaacactccgaacacgaagaagaagaagaagaagaatcagtaggagaaccagagtcaggatcagaatcagagtcagaaggagaaggaggagaagtagaagaagggcataaagaagcgcgggttccgaagaagaagaagaagaaaacacagtctccatgggacttcgccaaatacacggaatcagtggccgaggaacacgctcgcaggagcacaacctcggtcgacgagaaaatctcaaaagcactcaaacaacgttccacgcctctcgttgctgagctcgaccacagctccgagtccgaacctgatgaacaagaagattatagaccggaggaagaagatgaagaagagggtaatgatggtgacatcaaatccttttttgctccttctggtggaacttctttccatgccgattcctt

SEQ ID NO: 35137 - DNA, 946 bp, Glycine max
  Clone ID: PAT_MRT3847_131730C.1
agttccacaaactctgtttctttgtttctttatcgaagtttcaacttggtttccttctaatgggaacctctcttctccgctcccacgattgtcttcaaggccaccacgatgccttgtccccaactccatcttccatcagatcacaaagaaaccctaaccctagccccaacccttaccagactcgccggcggaggctccacgacggcgaccgctccggcatggtggtgaaaggccccagcgcgaacctcgtcatgggccatgtcaagatcctcaagagaggcgagacgctcagcgccgagacccgcggcggcgacgacgaaggtttcgatttggttttgggatccacgaaccggttgggtcccgatccgagttccgttccggtccctgggttcctcgctatgaggcggtgatcatggattcattggttgattttattgttggatttcggcgtttatctcacgcaagtgagagtcacgggaggaggagcggctgttgagagctttcttgatcgtttgatttgattgcacagtctcgacgagcgaatgatttgatttgtttgggtgcgagcgaatgaagaaaattttggaggcgaaagggaaaagctcgtgtggatcagggttcaacttttggtcccgtgaaagaggatttaggtcgctgtttgaagacaagaatatgatatcctactgtgtattcctgcagtgttcttttgtctgcgagtttgtgtgggtgctgtgttgggtctcctttcttgaatgtgttatattattttaatatactggtgtagttctgaaacttaatgcattaaaatttatagttttttgatcgacaaacaagatgttagtttttgttagttagtgagaaattggaacttgtgacctattttttcttttttttttctttctcaccaagtcaatctgcataataaaatttaaattacattagttct

SEQ ID NO: 35138 - DNA, 741 bp, Glycine max
  Clone ID: PAT_MRT3847_131731C.1
caattatcaattcggttttaatatatcctgggctagactgcatgttcttggatacgacatatatatttctcaagacagtagctgtgagtctgatgtctttgaattactggtaaagccagtgcgtttagtgagggataatgagttgttagaccaggaattcgtcaatattatgcatgcacttcaggttgtccatttctattgttggaaaggatcagctttactgaacaacatgtcaaatatagactccaaggtactaaaagtgacagaggtacagagagagaaaatcagtggtctgaattctgtacttttgaatgataatgattttgcatccaaagttttctgtaatatgccttcggaagaaaagggatgcatttgctttgactggtcagaagttctagctgcagttgctgcttgggaagattatgcgtcaaacttaagcaaacaaattcatttacagttgccttactggagaatgcatgagtctatatataatgtgcaattagagtagtatttgtgatcaacaattccaagaaaaagtaaccacctacaattgtgcttgggttaaaaatttggagaaaagcactgttgaaacaactaaaaagtagtttgtgaaggtttgctttgatagcattattcaatttaatgtgctttgggaaagttttaaggcaaagcttcttgggaagaaatgagaaatgtgactaacagatatctcgagatttatcataaatttaagtgttatgc

SEQ ID NO: 35139 - DNA, 374 bp, Glycine max
  Clone ID: PAT_MRT3847_131732C.1
ggccaaacagaaactaggaatatattaatgggtacgtagaacacagcaggaaagtgtatataattagactgattcttagattgcatttacaagtctcagaaattatggacatataaccggcagttaccctgtacttacaagtgtacgcatgaacatactattcctttacttaatatgtttcgatagaaggaagattgcaatgcatgatattgttgcaactacttagccacgagaaatcttttgttgactggccactttggcaagcatcccttccactggatataatccaaagaaatttacccattttttaccagcacctagcttaaacatcattctttccagcagaaacatagaacattgtatgaaattaagct

SEQ ID NO: 35140 - DNA, 125 bp, Glycine max
  Clone ID: PAT_MRT3847_131733C.1
gtcgtagctcggattcgctcggagtagtggtgattttgatatagattattgtgtggtggagaattgtttattatattgtacccaaactcaacggttcttatctttacgtggaaggaaaattgtta

SEQ ID NO: 35141 - DNA, 879 bp, Glycine max
  Clone ID: PAT_MRT3847_131734C.1
ttaaattaatctaacagttcaacttaaaatgaaattgtgaaaacccacagcaataactgaatgcatacacaacctatcatagggtgaccaaaaccaacggcttcaatgccccattttttttttctatgatatgatgaaacacttctttacatcctcaagtgtcttactccaacggttaagataacttaaattaatctaacagttcaaatttaactgcattgtcacatgtcataactcaaaatctgtgacctagaataacggaatgctacactacacgcagggtgtaatacaattttccaaataagatgagctagccaaatcagtaacttcttttctcttctatttcttttttgcttttcccaattacataaggaaaattaatatctttgcaaaaccgagaaaagtgatggcctagttccacaagcttcagccattgtgaaatattcctaggtccggacttatatggaactgtgaatctggtgcaatgctatcctcattaactcagtcaccttcaagttcggcaccaaactgctccagccgaatggcatcttcttccagatcccggactaaggcatggttaactgaaccatcatcttcactggcatgtatctgtctaccaccaaaccatcttccattcatcaattctatgcacttttgggcatccttcctatccttgaatcttaccaaaacaactccctgaggatgattctcacatatctacactgaatccacaggaccaagctttgtacactcctctttaacatcttcttctagttctaaatgcagattttcatcagccctcatttcagctggagcgaacatataacgaaggataacagttgctggaattgaaacttttgcatcatcgcgaccacccca

SEQ ID NO: 35142 - DNA, 289 bp, Glycine max
  Clone ID: PAT_MRT3847_131735C.1
gtttttcaaacgtcatcattgaccgatattcctatttgatgatggtggttgctgttgaagtggtagatggcttaaaactcaaattgagggggaccacttatgatcttactgacagcaactcaaacgatgtcccacaaggcagatgttcgcctcggacattccaatatgcaactagaaagctgcaccaatggccagaacgccttttttgtgactctggacatgccacaggttcgatgcctccatttaaatttttcttcctgctgatgataatgaaaatctgggtctgaac

SEQ ID NO: 35143 - DNA, 710 bp, Glycine max
  Clone ID: PAT_MRT3847_131736C.1
ataagtggccctttccctcatggtttctctgagctgaaaaacttgaccagcctctttctccaatccaacaacatttctggacaattaccattggatttttcggtttggaataaccttagtgttgtcaatttgtcaaacaattccttcaatgagaacatccccttttcaatttcaaaactgactcatctcacctcattagtccttgccaacaactccctttcgggtcagattcctgatctcgatattccaagcctgcgggagctgaatctggccaataataaccttagtggggttgtgcctaattcccttcttagatttcctagttcggcctttgccggtaacaatcttacatcagcacatgcactccctccagcttttcctatggagccaccagctgcctatccggcaaagaaatcaaaaggactcagtgaacctgcattgttgggtatcatcattggtgcttgtgtgctggggtttgtcttgattgcagttttcatgattgtctgctgctatcagaatgcaggtgttaatgtgcaagcagtgaaatcccagaaaaaacatgccactctgaaaacagaatcttctggaagtcaagacaaaaacaacaaaattgtcttctttgagggttgcaatcttgcatttgatctagaggatttgttgagagcttctgctgaaattcttggaaagggtacctttggcatgacatataa

SEQ ID NO: 35144 - DNA, 577 bp, Glycine max
  Clone ID: PAT_MRT3847_131737C.1
caatgattgacattcataagcattaaccaattcaatatttaagatataatacattaatcaataaaaatttgcaacaacattgttttggctaaatttcttgatcatagccagatgcctttttccatttttatggctttgcatgataatttctgaggcagtttgaactttacaaaatgcacagtaaaatttaaacttcttcctttttgtcaatgcatttgtttcacctgtttctttgctagtagctatttcattttcattatccaaaccacctaaaccttgactgttttgcacaacttgatcctcctttctaggttccagtatgcctatgtttgtggaggttatgccacgttgaagtttttgaccatctagtcttgcatccaaccctatctttttagttctcagggatgcttttgccttgtgcttctttccctcaagatgattattcaaccctttctcatttggggtagtaatttgacataatccacaactccactcccgcttaggtttcttctccacactaaatccagaatgatgattgtcatcaattgtaggaggtttccctgctttgcgttttgca

SEQ ID NO: 35145 - DNA, 2188 bp, Glycine max
  unsure (1)..(2188): unsure at all n locations
  Clone ID: PAT_MRT3847_131738C.1
gaggaacagtcaataccttcattcttctctctctctgaaacgcaacttcattagccaattaattggtgtcgcaaaatgtcggggaagaaaaaggggaagttgaaattgttaagcgatgcaatcacagataatcggagaacagttgctgaggtgaaaagtgaaaatttggagatgcaatcctgggctgatctccctcctgacctaattcaatcgatctattcccgattgattctgtctaattgattatgttctggcttcgtttgcaggcaatagattgcattctgttgtcatttctgtatgtgtggtaaatcacccacgcttgtgctatcctcaactagtgaaattccttcttctctttccacgagccaacaacaacatcattgatgcaatttctgttcccataaataatgcccgggagaaggagaaggaagttgaaatcgttgagtgatacaattaccgacagcagacgggcatcagtggaggtggaaaatgaatatttagagctgcaaacttggtctgatctccctactgaactcttggaattaatactatcccgtttaagtctagatgataatgttcgagcttcggttgtttgtaagagatggcattctgttgccacttctgtatgtgtggtaaaccaatcaccatggctaatgtattttccgaaatttggtgactggtatgaattctatgaccccgcgcaccgcaaaacctattccatcgagttgccagagttgaggggatctagagtttgttacaccaaagatggttggttactgctataccgacccagaactcaccgtgtgttcttcttcaatccctttactatggagattatcaagctgccaaggtttgagatgtcataccaaatagttgccttctcttgtgctccaacatcacctgactgtgttctgtttactgttaagcatgttagtcctactgttgtggccatcagcacatgttaccccggggcaacagaatggaccactcttagttaccaaaaccgcttgccctttgtcagtagcatctggaataagcttgtgttttgtaatggactcttctattgcttgagtctcacaggttggctaggggttgtttaacccatctgaacgcacttggagtgttctggcagtacctccacccaagtgcccagagaatttttttagccaaaaattggtggaagggaaaatttatgacagagcatgagggagatataatagtaatttatacatgttctagtgaaaatcccattatttttaagctagatcagatgttaatggaatgggaagagatgacaacactggatggagtaactctttttgctagtttcttgtcttctcatgcaaggattgatctccccggaataatgagaaatagtgtctacttctctaaagttcgtttttatggaaagcgctgcatatcattctctcttgatgactgtagatactatcctcgtaagcagtggcatgactggggagaacaagacccttttgaaaacatatggattgaaccaccaaaagatttctctgggttcacatgaagaattttagtgaaacaattcattagtgaagctcatttcgaagcatgccgaaggcagcgtctttactcaatagcaggctactattatgtgaagaatcacatctgttggggaaggcttagacttaacccctttgattatctagtctctcttctgatctagaattttttaagatttctcccaacacaattgtgatgtagtgcttatgcagaataattggagttcgtactagaattacctacagatttattgacacatttatttgggcatatgatctgtagatttatttgttattatgattgttattcgtctttaacttttagtcggatcatcaaaaaattcattttacccgtctttagcaaccggaagcttgttttataaaaaagcccccccatagtttattatatgtaggaatggacatctgtaaaagggaagcgaaaaagagttgcctccttggtcattttgtctttgcagatcctgaaatatttaagtttttttgcccctacacagcagggcttatgcagaacattagagactatactaataaagagatttattaattacctttgtttattgttactattgatattagtcttgtgtttagtattagtatccnttagcctttgattcaaaaaaaaaaaaaaaaagaac

SEQ ID NO: 35146 - DNA, 405 bp, Glycine max
  unsure (1)..(405): unsure at all n locations
  Clone ID: PAT_MRT3847_131739C.1
tagcggcggccccctnctttaactccaggtttttatttttaacccagaccttttctttggctcggggaacaacctcactgggaaaaataaagtttcccatcaaggggcaaaaaaaggattcgcacacaaatcttgatgggaaccagagaaaagggttgcaccagggatccttattaacgggggttaaacacaaaaaacctctcccccttccacttcaaagggaaaaaaaacatcaccacacccactaagccctcgggaaaaagaaaacaaagaactactcaattttaaaccacattcttcggacccgacctgaacactcggaacccctgccagaacacatacacctgttaaaggaatggttttctatgcaccaacttcccccgcgcccaggatggaacaatacct

SEQ ID NO: 35147 - DNA, 2381 bp, Glycine max
  Clone ID: PAT_MRT3847_13173C.1
attttagcaaatttgtactaccgaaacgtaaattaaaggaaaagaaaaaagaaaaaacaaaagcagagaagaacaaaaaaaaccagaagtttgttttactaaggtccaccatcccctcaaattcaagaaaccgaagctagagaactacgaggaagaggaggaagagcagcaacaactgtaagcacaaacagtcactttcaaacaccaacaactgtgtgtgtctaaactaagagtctgtaattggctggaagtttgatatgatgacaattttcaattcctatccttggaagcccttgataattcataaacatgatggaaaaccttagagtcagataacattgatctttccttgttttggtggatatatggctaatcattctttagttttagataacaacacatctgttagtactgttactgtagcagagcagcctttagtcattgggcaagagtttccagatgtggaaacctgtcgaagaacaatgaaagatattgccattgctatgcattttgatcttcggatagttaagtcagatcgcagtcgatttatagcaaaatgctccaaagaagggtgtccatggcgtgtccatgtagcaaagtgtcccggtgttccaacttttaccgtaagaactctgcatggagagcatacttgtgagggagttcagaaccttcatcatcagcaggcatcagtaggttgggttgcaagatctgttgaagcacgcattcgagataatccacaatacaaaccaagggaaatactgcaagatattcgtgatcagcatggagttgcagtttcttacatgcaagcttggcgggggaaggaacgtagcatggctgcacttcatggaacatttgaagagggttaccgtcttctccctgcttactgtgaacaaataaggaaaaccaaccctggtagcattgcgtctgttgttgccactggacaagaaaattgttttcaacgactgtttatttcttatcgtgcatcaatttatgggtttataaatgcttgtaggccacttttagaacttgacagagcacatcttaaaggaaaatacctaggtacattgctctgtgctgccgctgttgatgccgatgatgctttgtttcctttggctattgctgttgttgactcagaaagtgatgaaaactggatgtggttcatgtcagaattgcggaaacttctaggagtaaacacagacaacatgcctagactgacaatattgtctgaaaggcaaagaggcttggtggaggctgtagaaacacatttccctactgcttcacatggtttctgtctgcgttctgttagtgaaaattttcgtgatacatttaaaaatacaaagttggtaaacatcttttggaatgctgtttatgcgcttactgctgctgaatttgaaagcaagattactgagatgatggaaatttcacaagatgttatatcatggtttcaacaatttcctccctatctttgggccgtggcatactttgaaattcggctctagggccatttcacacttggggtaacagaattattgtataactgggcccttgaatgtcatgagctccctgtagtacagatgatggaacacatccgccagcagatggtatcgtggtttaatgatcggcaggatatgggcatgaggtggacatcaattcttgtaccatctgctgagaagcgaatcttggaagcaattgctgatgctcattgctatcaagtgctccgggcaaatgaagttgagtttgaaattgtgtcaactgagaggaccaatattgtggatatacggagtcgtgagtgctcctgtcgccgttggcagctgtatggcttaccttgtgcccatgctgctgctgcacttatttcttgtggacacaatgcccacatgtttgctgaaccatgcttcactgtacaaagttacagaatgacttattcacagatgataaatcctataccagataagagccagtggagagatctgggagaaggagcagaaggaggaggaggtgcaaggtttgatataataatttgcccaccaaagactcgccggccgcctggaaggcctaaaaagaaggttatacgagtggagaactttaagcgtcccaaaagagttgttcaatgtggtcgctgtcatatgttaggacattctcaaaagaaatgcacaatgcccatttgaaaaatttgtttacttgttgaaatatcttttgtttatgggacatatatgagatagaacgaatgttgtgtttgtattgtaatttaaatgtattctgaacaaaataagaatccattagtttttgccaaggttctcatcaaaaaatagcgggctgtctgcatggctgttttctcgtttcacttaataattagttaatgtcagaaaattgtcttgcaaaaa

SEQ ID NO: 35148 - DNA, 305 bp, Glycine max
  Clone ID: PAT_MRT3847_131740C.1
agggtggcaaaaaaccaacaaaggggggcacaagtgagtatgatcatcgataacaactatgcacagtgtaactaaaactgagtgaccgtattgtccacgttgctacgtttttgatccaatcgcattgacatgcctaaaattagtccgctctcctaaagaacaacgtctatggtgccaatactcccgatgtgaactgcacaatttagaagcttgctgtcaacgtacacaacatctttggcattgagaccattcctcaaaaatgcgtgcacaaaccaactgaatatatccatgcgtaacaatatata

SEQ ID NO: 35149 - DNA, 486 bp, Glycine max
  unsure (1)..(486): unsure at all n locations
  Clone ID: PAT_MRT3847_131741C.1
acgacaccgcagcaggagttggcatggttttcgtttcgtgcatccccaaaaccctaaaaccctccattccccttcccatgaaggacggccgaacgctgtcctcctatggctccgtttacattccgccgcaccagcgtctgcgctccctcgccaatttcaacaactctctctctcctgttcgcgccaaactccacgaaaaccctacacccgccgntgttactactctgcaaccatcgtttacggaacaacttcctgataaacagcgttcgcgcttcgtttcttcttatgacgacaccgtttccgaagaaggctccgatcgtgaatttcaacctccctcactaccgaatgcttcccctattgataacaccgatgagtggaagcggaaatttactatgctcttgagggacaagagtaagcaagagttggtctcgagggagaaaaaggataggcgtgattttgaccgaatagcagttctagcaagcagaa

SEQ ID NO: 35150 - DNA, 420 bp, Glycine max
  Clone ID: PAT_MRT3847_131742C.1
gcgatcacaggttgccgcaccgtaggactctggttacaaaagctatttggttctttttttcaagaatcttccaatctcttcctacttctcggtgtacgatttcttaagggaaagaaaatcactctctgtgctggccacagacttcgtgaatcattttcttttccactcttagtttatttgctgaacactctcctatttgatataggacttcgtgtcatattcaaactttttacggttacttttttaatcctcctgcttaatttcaagttcaagctggtgaaatcatggattagtgctcccactctcctattcgttataggactccctgggtagacttttactatttctgtgctttctttaactctacttctttcactggtcccgcattggccgtcacagtggctttatcgaaaaaccact

SEQ ID NO: 35151 - DNA, 310 bp, Glycine max
  Clone ID: PAT_MRT3847_131743C.1
ttttgggttgtttttttttttttttttaaagactctaacaaaagtaaaaactattatgagtgcttaaaagaacctaactccaaggcatgccacttgtggaaaaacgcgctcaattccttacaatgaaccttgtggcccggaggggaattccctccctccaaagggggacaaaggatcaaccacacatggaaaaaacatcccccccaaccgcgggaccaaagcgggcacaaaatggggcgagggaggccaacagaaaggggaagccggcacaaaaccaaaaggcgaccgcaccagcaagggccaaggcggg

SEQ ID NO: 35152 - DNA, 222 bp, Glycine max
  Clone ID: PAT_MRT3847_131744C.1
ccattaaactcccaataagtatctaccctattatcatggctgtggacaaacaaactacgtatgtcctctggggacagtgcactgaaatccttattctcattctcaaaccccccgttaacattgtattttctttcgaaatgattaaagaccccacccccattttggatccccgggtgatggcatatctagtcccactctcaaaggtttaaatgaacgagccct

SEQ ID NO: 35153 - DNA, 322 bp, Glycine max
  Clone ID: PAT_MRT3847_131745C.1
cgataaccctcagtattttatcatccagagcgagcgctacttagactcatctatactactgacgcataagtgttgttcctactaccaccatatgaaggaaaaccagaagaagaacctggagcacgtatcgacagatttacagccgcattgacgcccaaagccatccagacactctctgaggatttcagcgcgagagctataaagaagaatgtacgcattcatggacaccacaagaatgctaagcacatgtgtgctagagtgactggtgacaacttgggtatacgtgaacgatccgcagatctcatactacaaaatcgactac

SEQ ID NO: 35154 - DNA, 280 bp, Glycine max
  unsure (1)..(280): unsure at all n locations
  Clone ID: PAT_MRT3847_131746C.1
ctcatgcagatgtagcttttgcataaggcatatactcttcacacatcaaagtctggttacttggtgcttcaaaaatcacacaagttgtgtttcatgtactgccattttagatgcttgagttagatgcatgtgtatggtacactgatcgatgaatganatttacaagtcatctgagattactgttaggcgtatgacttctctgagcacgtatatacaagacgatgccaactttcataaatttccagttgtatcatttttctgggcacaagactaaggtaaa

SEQ ID NO: 35155 - DNA, 707 bp, Glycine max
  unsure (1)..(707): unsure at all n locations
  Clone ID: PAT_MRT3847_131747C.1
cggaattcccggctcgcccacgcgtccgaggaaatggaaaagaagaagagaaggtcctctctagctcctcttttatcgcgatcgtatttgttttgtttttctctctctgtcaaacagtttccctctccgagtcccagtttttctcggtgtgcccaaacacgccctttgtctgaagctcctttcagctgagatctaccctctctttctctcatggcttttgcttttgcactgaacaagaactgttaaaactactgcaaatgaaagcatttggagaggttaaagccagtgctgtatccaactctattttctattctgataagcgcatctcaacccaaaagcctcatgatgaacaacttgaccattgagactgaggattcttttgcaagcttgcttgagcttgcagctaataacgatgttgaaggtttcaagcgaatgattgagagggatccttcctgtgtagatgaggtaggactatggtacagtcgtcaaaagggatctaggcggatggtcaatgagctcagaaccccattgatggttgctgctacttatggtagcattgatattctggatctgattctctcactttctggctgtgatattaataaccctgtggcctttgacaagagcactgcccttcattgtgctgcttcgggtgggtctgaaaatgtngtggatgttgntatattgcttctaccagcgggggctga

SEQ ID NO: 35156 - DNA, 260 bp, Glycine max
  Clone ID: PAT_MRT3847_131748C.1
acgcgtccaaccgaggccaaaagacaaccgaagggggccattattgctgtcaacatccgcagctgctgttattcgcagcgcaaacaaccagtgagccatgggcgtccgaaagaacaagcgcagctccaaagggaaaaagggtggccagaagaaggcagctgatcgctttgccaagaaggattggtatgacactaaggccccctccctctttcaagtgaacgatgtgcgcagaacccgcgtcgctcgtacgcacggtagca

SEQ ID NO: 35157 - DNA, 371 bp, Glycine max
  Clone ID: PAT_MRT3847_131749C.1
cgaaggtgcttgatgatcacagttaaactactccgatgaatccatgtatgctacacttacaaaaactcgctgtcgaactcaagggcgacatctggcttagtatgttattgaagccagtgttagtttcatgcaaccacttgttgtgcagatcatgtcactatgagcgcatagctgctggacctgcatgtgctgttagatatgctgcgtttgatctaacagacattatgtttatgctttctgtggacaacgtgtggatgatatcattaagcgtggatgccacttgtttgcgctaggttgtgcatgcatttccttctgctgatggcatggatgatgcacctgaccccacagtgtttaactctacgaccactacg

SEQ ID NO: 35158 - DNA, 367 bp, Glycine max
  Clone ID: PAT_MRT3847_13174C.1
acatatgattgggtatctattaatttccaaggaaaaaaactcttcacacttgccaaagactcatcaaatgacagatggaggggccaatggaggaacaaaccctagcagtaccacacacataagaaaaaaatatacatgggccacctcatgagccccatcgcttgagccccacgttccccattcgaacaggcctggcccccatgtagggccacccagagtgacaaaaatactatcatccgacttttggactcccaagccaaaccacttatacgcttatggcaattaagaacccaggctaagggaccgtccctatagatgacccgcggtgagcgatgcaaagtcccagagcttcccgcggactctgaat

SEQ ID NO: 35159 - DNA, 614 bp, Glycine max
  Clone ID: PAT_MRT3847_131750C.1
acgagggttgatgcttgagagagagcttttgggcagagagattatgaatgttatagcatgtgaaggttctgagaggattgagaggcctgagacatacaaacagtggtatgttaggaatacgagggctggtttcaagcagctcccgctaaatgaggaattaatggccaaattcaggactaagttaaaggaatggtaccacagagattttgtcttcgatgaagataacaagtggatgcttcaaggttggaagggccgcattttgtatgcttccacttgttgggtgccagcataatgagatgctactggacttggcttataactaatattagactaaaggttctggtatcctgtgtttggctacctacttgcttaactttcgggctgtgataaaagattgtaccaagttttgcacgaagtcacttgcaacttctgtgaaactcatgatttcccctcagcatctctagaattttctggtagctaagatgctttcttattttaagtaccattaccaagttgatatggcctattcacataacctgataatgtgttggtcctgaaagcttttccccgtgattgtttgcatgcttgctgagtaatctgttggatgtggctcg

SEQ ID NO: 35160 - DNA, 286 bp, Glycine max
  unsure (1)..(286): unsure at all n locations
  Clone ID: PAT_MRT3847_131751C.1
aagtatttcgctagaaaagatactgataattataaaacaacagagaaagataggggcgtgctgcaacaactatgttggctgatgggtgtccatatttgtatgcaatagaggagaaaggttacaaccatggcttatccaccactcagatgcatgtcatggatgccatatgtgatgcccatatgtgtgcatatgggctcaatcctggtatttcaaggactaggctttttggcaccattacaatacctctgnttctgagctaccttttcctgatgagggtgcagagctg

SEQ ID NO: 35161 - DNA, 633 bp, Glycine max
  Clone ID: PAT_MRT3847_131752C.1
accaatttcagcacaacttgaaatcctagtacttttctatctattaactttttctttgttcacaaaaagcactcacaaaaatggcaaattctcgcattgctaggttcttcatggaggtggcaccaccacagtatgttactgtgatgaggcacagaacatcaaagatgttggacactattactgaagatgagagggagattagcaccagtgattctgtcatgtcaccccctaaaaaaagcaaatcagcagtagcagttgcagcttcatctgcttctgcttctgttaccaatgttaagggaaggtgcttcctcaaggaagtgcatagatccctctcaattttgaatcagtgaaggcagaacatgaggcagggcaatgaaacaacattcaaccttggtgggttttttttaagagtcatgtaaagctgcaagctagtatcttttttttcatgtattgcccctcgtgtttaggtaattattgatatcctttcaatgggtttgatgaacatgaatagttgggacttgggagtttgggagtgtaaagagactcatggattgggaattcttgcacttaatttgaattttgctgtacaggctcatatttttctatcaaataaactcaaaaaactgccttgtt

SEQ ID NO: 35162 - DNA, 704 bp, Glycine max
  unsure (1)..(704): unsure at all n locations
  Clone ID: PAT_MRT3847_131753C.1
ctgctaagaactgggcaggtttgagtatatccccacttctttcctcagtattttgttcattttttgtttctgtcccatggtgttgtccctgctgtctcaaaaccaaacaaaaaccatgatcaatctctcaaagaaccttcctccccctgttccatggaatgcctcatacccaccatgttcatggatgggagtggattgtgaccctaccaattcttctatagtagggatatctttaattcggtattcactgtctgcttctgactttctgccacttgtttgcaaaattcaaactttggagcattttgatgtctccaacaaccgtctgagctcagtcccagatggtttcatcaccgagtgtggaaagattaaggggttgaaaaagctgaatttcagtggaaacatgttagggggtgatttaccatcttttcatggttttgatgcattggaatcccttgatatgtccttcaataatttggaagggagtattggtattcagttagatggattggttagcctcaaaagtttgaatcttacttccaataacttcggtgggtctattcctaccaaactaggaaattccacggttttggagcatcttgtgctttctgtcaatcagtttggtggaaaaatccctgatgaattattgagttatgaaaacttgaccgaggttgattntagggcaaatcttctcttcaggtccattc

SEQ ID NO: 35163 - DNA, 175 bp, Glycine max
  Clone ID: PAT_MRT3847_131754C.1
gggggagacaatattagaattttagaggatccttataaaatatcaatataatcatcaggaacacattatgttagattatcaagaagagttttaggaatgtctggatccataatgtctaatcaaacaaatgcagcagaatctgaatcccgggtgatttttgatctatgtactcttc

SEQ ID NO: 35164 - DNA, 150 bp, Glycine max
  Clone ID: PAT_MRT3847_131755C.1
catccttttcggaaaaagcgagacgtcttcatcattactacatcgtcttgtctttccatggcacgaaagaacggtagcggtcccttcatatatccttaaagaaccatttccatgtcgcaacccaggttccgagaatgttcaaatttgggg

SEQ ID NO: 35165 - DNA, 348 bp, Glycine max
  Clone ID: PAT_MRT3847_131756C.1
cccaaggtccatgtcacgcgtgatggcattggcggtgtggaagcttaaagatcagccatacttagcctaattataatttgtgtggtaaattttaaatgtgtaggtggtaatccaaactttcgtatagaggtggtttctcgtctcatttattattaaaggagttgtagttaaataacctataagggttagcgtttgaattttattttttgatcattgttacgttggtaaaggttactttagtaaccaagttagtcgcgtatcccaaagcatcgtatcgtgatagcattcatacgagaattgatgttcatattcatcgtcgaagtcgtccaattccggtccatccctgtg

SEQ ID NO: 35166 - DNA, 283 bp, Glycine max
  unsure (1)..(283): unsure at all n locations
  Clone ID: PAT_MRT3847_131757C.1
gggaatgaaaggcccggcccgcccaangcgtccgccaaggcgtccggtggaaactggttctttttttttggttctgggttggggttggttttttttttaacctgaaaaggtttggttgcgggggtaactggggttgcggaagttcctgcaggtgcggaaccggttgcgggggttgcaggatgtccccagacttgggctccactgagtaaaccaccaccgggaccttggtcatgggaggggcacctgttaaggttcaatttgggggggctgaaatgggtgtgcc

SEQ ID NO: 35167 - DNA, 2364 bp, Glycine max
  Clone ID: PAT_MRT3847_131758C.1
cacgcgtccggggcacggagtggaggacgcgtgactctgtctagaggaacttcacgtatttgtaagcttcttccagaagcatcgcttggtccgttttcttgtcccacggcatcagcttctggagacaccgtgttttctggcttagcttctgacgacgttggcgagccaggttgctctgcgggatcaccggaggtcattacgactccacgcgctgccacttctgctccggcgagtagaggggagggaggcggaggtgtatctcattaagggtatttttgactttcagaaagaaatgacaggtgcaagatacactataggtagtgtaggattcaaaacctcaagtttgaaggatccaaatccacccactataaaggttacttctcacccacccaattacattaattttataactaactaccaaaagattcattatgctcataataattatttttataatccataatttttgtccaaaatcacaattattctgacaagagattccaaagtttattgttaattttttttctttagattccttatattagactagtcaacctcagattaaaaattaaactcctaacaccacgagcatgattcctagtattagttaaatggcctggtacaacacattctttatagatggatgtgtgccatcccacctgctatttggtgttagataacaactcatggtctcacactagcttttccttatgtttatttttattatattacttttacttcaaggtgcaaccaagtgaagccaccctcctatgaaatgccttcaaacgaaaaagctaagcagtcagtttggcagtaccaatcataataggctcaaatagttgcaacattttccttaacaaaaatgtggtacccttaaagcatctaagtttagtttatattacattaatttcacaatccctccacttcattctggtgcctccaacttgtcattcaattccaccctgaagattgtgcttcaggtggttcaaagaagatgggctcactagaaagatcaaagaagaaagtccttctatggaagaaggccatgctccatttttctctatgttttgtgatgggggttttcacaggcttggctccaacaggtaaatcttctctcttttccaccacagttggtgtctcaaataggacagaatttgcaccacaacctagtgaaatgttacacctcacaacaaatgtcaatagaatttggatagctccaatgccagataccatgcccgtgaagcctagaatccttgaaaatgaaaagaaaaaaacaacaaaaagttgcatgcaaaaaaacagccccagttgaagcctagaagactcataatcattgtaacaccaacaagcacaaaactaccccaccaagcagtgtttttgagaaggttggcaaatactataaagctggttcctcaaccattgctgtggattgttgtggaagctaaaaccaattccaaagaactgccagagatactaaggaaaactggcatcatgtataggcatgtggttttcaaggaaaatttcacggaattagaagctgaactcaatcaccagaggaatcttgcgcttaagcacattgagcaccacaggctcaatggcattgtacactttgctggcctttccaatgtttatgatctccaattcttccatcagcttagagatattgaggtctttggaacatggccaacagctttgttagctgcacacaggaagaaagtgaaaatcgaaggacctgtatgtgattcatcacaagtcattggttggcatcttaagaatatgaacaatgaaactgatactatcactcccccaattcatatttcaagttttgcttttaatagctccatcctttgggactctgagagatggggtcgcacttcctctgttcaagacacttctcagaattcgatcaagttcgtgaaacaagtagttctagaggatgaggctaaattaaagggaattccaccagaggattgctccaaaatcttgctctggcgtttcaattttcgtgccagaactcattaatttctagattttagtccaaggcaaaggggaaagacataaaataacgagtgatgaagcaatatagaaattggcagtacagaaattactttcctactactatatagaatttattcattttttttttctctttttcaaatttatcctatgtttaattgtttatagttttattggttcttcctgttttcaaatttttgttagcttatgtaagtgagagggtcttctgctaagaagcaaaaacatttaaagcataaatgaactttttcgaaaaaaaaaagggcgggaacttcccgaggtgtagggcattttttttttttaatttggagaacctaaattgttgtaaaa

SEQ ID NO: 35168 - DNA, 860 bp, Glycine max
  Clone ID: PAT_MRT3847_131759C.1
tcgcccacaccttcggtgtgagagaacacacacaaaggactagtgcttattctacattttctactcctatgtactgggtggtagtttttaacataaacaattttgagggctagtggatttcatcttttggtataccaaacatgggtggtaataacaatcatgcattatattttcacccctccaaggtggttttttgtaactaacatgtccccttcttaattatggattcatttagggtctttggaacatggccaaccgcattgttagctgcacacaggaagaaagtgaaaatcgaaggacctgtatgtgattcatcacaagtcattggttggcatcttaggaatatgaacaatgaaactgatacaatcactcccccaattcatatttcaagttttgcttttaatagctccatcctttgggaccccgagagatggggtcgcacttcctctgttcaagacacttctcagaattcaatcaagttcgtgaagcaagtagttctagaagatgaggctaaattaaagggaattccaccagaagattgctccaaaatcttgctatggcgtttcaattttcgtgcccgaaccatcacaaatcactaatttctagattctggcagtacaaaaactactttcctactactatatagaatttattcatttttttttctcttttgcaaatttatcctatgtttatagttttattgattcttcctgttttcaaatttttgttagcttatgtaagtgagagggtcttctgctaagaagcaaaaacatttaaagcataaatgaactttttcgaaaaagcttcccgagtgtatggcattttttttttttaatttggagaaacaaattgttgtaaaa

SEQ ID NO: 35169 - DNA, 224 bp, Glycine max
  Clone ID: PAT_MRT3847_13175C.1
gcttatcattaaatccaaaatgtgaaactgataataaaaatacaaagaagtattatgattgcagcctgtggtcttctctaaaacagttgagtacactactccctctttaattctcaataacaatacttctttgtatttttattatcagtttcacattttggatttaataataagcttatcattctgctaaattgatataaagtcattgtctacttaatgatcct

SEQ ID NO: 35170 - DNA, 314 bp, Glycine max
  Clone ID: PAT_MRT3847_131760C.1
gccccccccaatcctccttttctgtaacaacgcaccccccacgagagcttttttaaacggttttgggggctccacaaccggatgacggttgttaaaacggaccccaccccccgtgtcccgtataaaacaagaaaggccctaccataaggggaccgcctccgtaaaaatttgaaaaacaaacaagcatgataaaacacctcctggctgccatttggttcaaaactgaatccccccccagagggaaccaaaagcccatcgaccctccataaaagggccaaggagaaacgcgggggggaaaacttgcaccaacaccc

SEQ ID NO: 35171 - DNA, 502 bp, Glycine max
  Clone ID: PAT_MRT3847_131761C.1
ccacgcgtccggtttcaattacctttctcaacttctatccacatatctctctctattattttaactcagcctatgtagagaaagagaaggagatcatggagcttggtttgagcttaggagactcttcaaggcctttgcttggtttcatggaaaagcctcgtgaagcctccaaccaacttggtttaggcttcaacacaacgttatcaattggtccaatcattactacacataaagatcatcaacaagatgaagatgaagaataccaagaagaagaagaagaagaaacaaagccaaagaacaacaacactcacagaatacaaggtcctgatggcctttcttccaatcccaacaacaacaacaatacagttctgcatcaacttgatcttctccctcaactcgctctcccatggcaccctccttctgaaaacggaagtttatcatctgagttgggaggctcttctcggggcttggacgtgaacgcgcagccgccggcggtggagac

SEQ ID NO: 35172 - DNA, 522 bp, Glycine max
  Clone ID: PAT_MRT3847_131762C.1
ggtctttgaggaaacaaggaatgaaggagaagtatgtgagtccaatcattgctttctatgcaaacaaatgggtgctctctaaaaagacacgccaatttttggagagttcctgtgacaaggttggtgaaggtggcatgaatagcaaagcttcagtgattctacaaggtgttgttgatcttcttccagtgggtgataaggctaggaaagtgattccagtgggtttttattttgccttgctttctagatctcttgagttggggttgaggattgaaagtaaggcaaagttacaagaccaaattacttcacttttgcacttttctcaagtggaggattttcttcttccagaaagtggagcagagtcaatgtcctctagcatggagtttgtaactatggaaagcataatttcagcttatgtagcatctagctcacgtgtaagccataccccagaagctagccgttacagggttgcggaattgtgggatgcatatttattcaatgtagctgcagatccagatatgggac

SEQ ID NO: 35173 - DNA, 234 bp, Glycine max
  Clone ID: PAT_MRT3847_131763C.1
ccgcaagagcgggcgcgcactacccgttcgaaccacacttatgttgaatattttttcaacaaaccgaaagacaatgcgagggcaaaaatagaggggcagaatgcctaacgaaaaggctcaaaacaacattgtggtggttggtcatgtggaccctgaggaggcaaccaccattaacgagctgaagaagcctgtccggacaaaagaatcgtcaaagcaagccatatgagggcaagc

SEQ ID NO: 35174 - DNA, 449 bp, Glycine max
  unsure (1)..(449): unsure at all n locations
  Clone ID: PAT_MRT3847_131764C.1
cgcagaaaaaacacatatgcaaaattaaaaagagacaaaaaatactaggaagagcgggtgtaaatgaggaaacctttgcttgataagaagcttaagccttctttcccttgtgaggaagcaaaaaaaaccaagggaaaaaaagcttgaccctcttgctgagtatgcgaatgctatttgaaaatggtcctgcccggaaaaacgggaaaaaaaaagtttggagagagtgttataataacaaaaaaaaaagagggaggggtnacaaaaaaaaaatttaaaactgtgtaggggaaggggcgcgccccaatatcgggtttacggggtcgaaattttttaattttgtcttttaatttaaaaaacttgaaaaaagtggaaaggcgggggatttacaaaattggggaggtgaaaacctttcccttttttgcttttttggcgttgtgccaaatttgcct

SEQ ID NO: 35175 - DNA, 584 bp, Glycine max
  Clone ID: PAT_MRT3847_131765C.1
aagcatctccttctcaaactagtagtattattcttccattcataatgggtgttttcacattcgaggatgaaatcaactcccctgtggctcctgctactctttacaaggccctagttacagatgccgacaacgtcatcccaaaggctcttgattccttcaagagtgttgaaaacgttgagggaaatggtggcccaggaaccatcaagaagatcactttcgttgaggatggagaaaccaagtttgtgctgcactgtcaaatacgaaacaaaaggagatgctgagcccaaccaagacgaactcaaaactggaaaagccaaggctgatgctctcttcaaggccattgaggcttaccttttggcccatcccgattacaactaatcctcttcaacttacttgtcatcactttcttgcttggagacttatccaatcactctgttctcaacttaagttgccttccaatgtatccagtctttcctttcttctttccttttcccatataattgtgagacttatgatatatctgtatctcacttcatcaataataaattataataaagatgagcaatcattacaacttttgtttc

SEQ ID NO: 35176 - DNA, 697 bp, Glycine max
  Clone ID: PAT_MRT3847_131766C.1
caattaaactcatcactcgtgaacacataatagatttagtcaactaagtgacaagagaatacattgactaaaattacagatgttagctagactaagaaaattatgatatacatagttacatagtataatatagcataggcacagattgcattctgttatacattaactgtatgtaaataaaatttgattatccttaatttctttactaattattaagaccctatcatatagatagagaagtagtgtcgtagtgattgcattgaaagctaccaaaggtgcatccttgcattacatcattggaaaatgggagatcatgttcctccctgtactacatgataagcttgtgccacttggttcgttgccacagcgcctcatggtccaccatgtgagataggccacggtgggcatttcatcattttgcaaaatgcaaacacactaccgaatctcgattcttattcgtaaaacctcaaccataaccattcagcgcatctaatctaaattcgatctcaattcatagtgttcctttgaatgtaagtcggtaaattcattttaaaatgatgtaatttatgtatggatatttttatcataataagattaaaatttaataaaaaaacttggatttaatgcagaaattagtaaaagttcttctaatccaaaattttccctacacacatcaaattaaatatatctaaaatta

SEQ ID NO: 35177 - DNA, 1057 bp, Glycine max
  unsure (1)..(1057): unsure at all n locations
  Clone ID: PAT_MRT3847_131767C.1
gtgagtcagcagattcacactatggtatggggcatacataggagcagagtgacaccagaggtagtgcttggctgcttgattataaatagagggcactcctctgctaaagaagcacacagcagcaagcatctccttctcaaactagtagtattattcttccattccgttctacatataatcattcataatgggtgttttcacattcgaggatgaaatcaactcccctgtggctcctgctactctttacaaggccctagttacagatgccgacaacgtcatcccaaaggctcttgattccttcaagagtgttgaaaacgttgagggaaatggtggcccaggaaccatcaagaagatcactttccttgaggatggagaaaccaagtttgtgctgcacaaaatagaaagcattgatgaggcgaacttgggatacagctacagcgtggttgggggtgctgcattgccagacacggcggagaagatcacattcgactccaaattggttgctggtcccaatggagggtctgctgggaagctcactgtcaaatacgaaacaaaaggagatgctgagcccaaccaagacgaactcaaaactggaaaagccaaggctgatgctctcttcaaggccattgaggcttaccttttggcccatcccgattacaactaatcctcttcaacttacttgtcatcactttcttgcttggagacttatccaatcactctgttctcaacttaagttgccttccaatgtatccagtctttcctttcttctttccttttcccatataattgtgagacttatgatatatctgtatctcacttcatcaataataaattataataaagatgagcaatcattacaaaaaaaaaaaaaaaaaaaaaaaaaaaaaaaaaaaaaaaaaaaaaaaaaaaaaaaaaaaaaaaaaaaangggggaaacaatataaaaaaacaaaattaannnggggggccccccaaaaaaaaaccaattttatgggggcccccatctaaaaaaaaaagtctttttttgggcccccaaaaaaaaataaaacccccggcgt

SEQ ID NO: 35178 - DNA, 503 bp, Glycine max
  Clone ID: PAT_MRT3847_131768C.1
acgagctcaaactagtagtattattcttccattcataatgggtgttttcacattcgaggatgaaatcaactcccctgtggctcctgctactctttacaaggccctagttacagatgccgacaacgtcatcccaaaggctcttgattccttcaagagtgttgaaaacgttgagggaaatggtggcccaggaaccatcaagaagatcactttccttgaggatggagaaaccaagtttgtgctgcacaaaatagaaagcattgatgaagctcactgtcaaatacgaaacaaaaggagatgctgagcccaaccaagacgaactcaaaactggaaaagccaaggctgatgctctcttcaaggccattgaggcttaccttttggcccatcccgattacaactaatcctcttcaacttacttgtcatcactttcttgcttggagacttatccaatcactctgttctcaacttaagttgccttccaatgtatccagtctttcctttcttct

SEQ ID NO: 35179 - DNA, 676 bp, Glycine max
  Clone ID: PAT_MRT3847_131769C.1
ggcacgagcttctcaaactagtagtattattcttccattccgttctacatataatcattcataatgggtgttttcacattcgaggatgaaatcaactcccctgtggctcctgctactctttacaaggccctagttacagatgccgacaacgtcatcccaaaggctcttgattccttcaagagtgttgaaaacgttgagggaaatggtggcccaggaaccatcaagaagatcactttccttgaggatggagaaaccaagtttgtgctgcacaaaatagaaagcattgccagacacggcggagggtctgctgggaagctcactgtcaaatacgaaacaaaaggagatgctgagcccaaccaagacgaactcaaaactggaaaagccaaggctgatgctctcttcaaggccattgaggcttaccttttggcccatcccgattacaactaatcctcttcaacttacttgttatcactttcttgctttttcttgcttggagacttatccaatcactctgtgctcaacttaagttgccttacaatgtatccagtctttcctttcttctttccttttcccatataatcgtgagacttatgatatatctgtgtctcacttcatcaataataaattataataaagaagagcaatcattaaaaaaaaaaaaaaaaaaaaaaaaaaa

SEQ ID NO: 35180 - DNA, 214 bp, Glycine max
  Clone ID: PAT_MRT3847_13176C.1
cggctcgagatccgttcaataggtgatccattcccacggcaggtgatcagtgccatgttgtccactcgaactgtaatgacccaacagggtggaatctccctgagcccttctcgtcgctcggcgccaggcacatggggtcagtgtccacatcatcttcaacgatctgtaccatatacatccgcacacttgcctcggcaccgtctccgactgtctc

SEQ ID NO: 35181 - DNA, 561 bp, Glycine max
  unsure (1)..(561): unsure at all n locations
  Clone ID: PAT_MRT3847_131770C.1
cacgaacagatttaagatctcacaatactgccgttcatgatgcctgaacttgagactaagttcatgtataaaacgatagggtttatcagtaaaatttaacaaggatagacaaaattatagatcttgactgtgcaactaacaagacaatgccattgattcttacttgtaagaacagatgaaaaactgattttcataggagttgaatgtgaaccatctatgctatgtaagttttgattgaggaaatgaagtatgaaatttcatattnnaaaaaaaaaaaaaaaaaaaaaaaaaaannnnnnaaaaaaaaaaaaaaaaaaaaaaaaaaaaaaaaaaaaaaaaaaaaaaaaaaaaaaaaaaaaaaaaaaaaaaaccaaaaaaaaaaaaaaaaaaaccccgggggggccccttttaaagaacccaattttcctcccgggggctgggaaggtaaaattttttttttggggcccccaaatttaatttccggggccggttttttacacccttgggagggaaaaaccccgggtttccccaacttaattgccttgggaaaactcccccttt

SEQ ID NO: 35182 - DNA, 747 bp, Glycine max
  Clone ID: PAT_MRT3847_131771C.1
cccacgcgtccgcccacgcgtcggcccacgcgtccgcacaaactagaagtattattattcttccatttccattaaaaagaaaatatcataaatgggtattttcacattcgaggacgaaatcacctcccctgtggctcctgctactctttacaaagctctagttacagatgccgacaacatcatcccaaaggctcttgattccttcaagagtgttgaaaacgttgagggaaatggtggccctggaacaatcaagaagataactttcgttgaggatggagaaaccaagtttgtactgcacaagatagaagcagttgatgaggcaaacttgggatatagctacagcgtagtgggtggtgctgcgttgccagacacagcggagaagatcacattccactccaaattggctgctggtcccaatggaggctctgctggcaagctcactgtcgaataccaaaccaaaggagatgctcagcccaaccaagaccaactcaaaactggaaaagccaaggctgatgctctcttcaaggccattgaggcttaccttttggccaatcccgattacaactaatccaattcgatcaacttcatgattatcatcactatctctcttgctttttctgagacttcatatatctgtatctcacttcatcaataaatcaacaaattataataaaggaaattagccatcattagaccttttctttctcttgtgttcattgaatgaaagataatagtccatactcacgt

SEQ ID NO: 35183 - DNA, 2816 bp, Glycine max
  Clone ID: PAT_MRT3847_131772C.1
aacacttctttatagaaaaagaagtgacttctactttggtaatggactccttgtatagtggattgaaggctcttgaaggccagaataagtgtaaaaaaggtagggtgaaattgttggatgctgaagaaataccagcaccaattgttcatgctgagaaagatatgtttgtactggtggatgatgttttacttcttcttgaaagggccgctatagaaccactgcctccgaaagatgagaagggtcctcaaaatcgcacaaaggatggaaactctggggaggacttcagtaaagattctattgagcgcgatgaaaggcgtctcacagaattaggtcgcaggactttggaaatatttgtccttgcccatatattcagcaataaaattgaggtttcctaccaggaagctgttgctctaaagagacaagaagagctcattcgtgaagaagaagcagcatggctggctgaatgtgagcagaaagcaaaacgtggaaatgagagggaaaagaagtcaaagaagaaacaggccaaacagaaacggaacaatcggaaaggaaaggataaaggtagagaggagagacctattgtgtctgtaaatgacaagcagcaacacaatgctgctgatgagaaaaatgattctaacatggaggaggctcaagctgtgtctgaaaagcttgatcccatggaagatgtttctgacgtgtccgactctgtagatggagttgctgaaacgcttcagcttgattcagaagacagagatgctagtcctgttaattgggatactgatgcatcagaagttaatcctccaactgaggctagatacaatggcataggtagtgtttcaaccatacaaaatggaacgtctgagaaaaggagcagttcagtgatagatgatagttcttcaacatgttctactgattctttgccgtcagtagtcatgaatgatccccacaagggaaactgcttttcaaattataaagtccaaaagtcacctagcagaggtaagaaccaaggcaaaacatcatctaatgtgggtagattgacgattgaaatagatagtctgccatctggttctgcagcagatgctggggattttaatgatgagtctggaaatggtaagattggcaaatctgagtccgaggttgctgtaatctccttacaagatcggttgaagtgggctgagaagcatgttgtcagaaaggaagaggaggttctttcacttaataaactgggcatcaaagacctggttgagacaaagagacctgttgacaacgaaagcctacagaaagagaagatatcaactgtgccatcctcgcctattagtcctcccagaaacttgtctgttcaaatgaagttagaacacaagactagtgctactgtagatcctgttcatgtcaggaaaacatcttcaagtggctcccaacagactgataaagatccatcttcaccttttacttctgcatcaccggttccagctgtgtccaaaactgagattcaaaagccttcaactgcaagactatctgaaagatctgtggcacaagtgcctatgatgtcaagaccttcaagtgctcctttagttcctggtcccaggccaactgctcctgttgttgtttctatggttcaaacagctcctctacttgcacgctcagtgagtgcaactggccggttgggtcctgatccctcaccagctactcatagtcatgttcctcaatcctacagaaatgcaatgatggggaaccctgtggcctcaactgctgctagtctggcccattccagctcctcaagttcaggagtgatcccatcacctggctattctcaaccatcttccttcgtgtcatcaatgtttttatcccagagctctgacaaaatggacacaaatacttcccagtctggtgttccttttggtatgattacacgggatgttttacagaacggacctaattggattgatagttctcaaagggaatcgagcagaagcatgcactatgatcaaccctctgggcttaatgatgttcaaaatcatgacttgtacaggccagtacacagtagatccatgggcaatatgtcaaccgagttcccagcctgcacatctgggcgtcagaaccaaggggagttggtggatgagttcccacacattgatatcattaatgacctgcttgatgaagaacatggtattgggaaggcatccagggcaagttcagtattccactccctcaatgatggaccacagttgctaaatcgtcagttcacttttcctggagacttgggtaccgatgatgatttgggatcttccaccagttcttgtaggcttgagagatcacgtagttaccatgatgccgggtttcaacaagggtatagcacatctggttggcattatgattcactgcaggattatgttcctcaggcgagtacattatcatatggaaatggcaaggtagatgggatgattccaaaccaatggcaggttgctggttctgatctatcttatctaggcatgagaaacactgagaatagttactcgtactatcaagattactcaaatatggcatgtggtgtcaatggttatactgtattcaggccttcaaatggtccgtagagggaaaatgacaaaggttgcccacaaattagtggtcatcaacaaatgtaataatgtatttgaggaaattgttgggtctctttagattggagtgaggttgtatccccttgataggaaaacattttgtaaagagtgtttccgattaatttggttccagtttttcataaagttatacatgttctagccttttgggattaaaaaaaaaaaaagggcggcaaacaaaaa

SEQ ID NO: 35184 - DNA, 815 bp, Glycine max
  Clone ID: PAT_MRT3847_131773C.1
acgagcaagcatctccttctcaaactagtagtattattcttccattccgttctacatataatcattcataatgggtgttttcacattcgaggatgaaatcaactcccctgtggctcctgctactctttacaaggccctagttacagatgccgacaacgtcatcccaaaggctcttgattccttcaagagtgttgaaaacgttgagggaaatggtggcccaggaaccatcaagaagatcactttccttgaggatggagaaaccaagtttgtgctgcacaaaatagaaagcattgatgaggcgaacttgggatacagctacagcgtggttgggggtgctgcattgccagacacggcggagaagatcacattcgactccaaattggttgctggtcccaatggagggtctgctgggaagctcactgtcaaatacgaaacaaaaggagatgctgagcccaaccaagacgaactcaaaactggaaaagccaaggctgatgctctcttcaaggccattgaggcttaccttttggcccatcccgattacaactaatcctcttcaacttacttgttatcactttcttgctttttcttgcttggagacttatccaatcactctgtgctcaacttaagttgccttacaatgtatccagtctttcctttcttctttccttttcccatataatcgtgagacttatgatatatctgtgtctcacttcatcaataataaattataataaagaagagcaatcattacaacttttgtttctcttatgtttacaacagtgagtttgcattttttttccatctcatgtatcata

SEQ ID NO: 35185 - DNA, 608 bp, Glycine max
  Clone ID: PAT_MRT3847_131775C.1
gcagggtagatggaataattccaaaccaaggcagggttgctgatctatcttatctaggcatgagaaacactgagaatagttactcgtactatcaagattactcaaatatggcatgtggtgtcaatggttaaactgtattcaggcctacaaatggtccgtagagggaaaagatgccaaaggttgcccacaaattagtggtcatcaacaaatgtaataatctatttgaggaaattgttgggtctctttagattggatattggttcggtccccttgataggaaaacattttgtaaagagtgtttccgattaatttgaccacagttagtcataaagttaaaaaaaaaaaaatgttgcctttaggtatgacaaccccacagaattatagttatggatcctcccccgattactcaaataaagcatgtggtgtcaatggttatactgttttcaggccatcaagtggtccttaaagggttacgaagcgtgtcctcaaatgagaggtccccaacaaatgtaatgcatttgaggaaattgttgggtctttttaaattggagtaaggttgtatgtaatctctgataaaaaatacattttgtaaaaagtgtttttgagtt

SEQ ID NO: 35186 - DNA, 495 bp, Glycine max
  Clone ID: PAT_MRT3847_131776C.1
cggccgcgcctcgcttctctatttgtttagcgtcaatactacgttaagaaactcttgattgccactagtatatgggaggggaacacacttattagggctcttatccataattatcgtgggcatcctactttgaactagccttatctacgtcaggaacatatattgaacacactacctggccttacactgtcgtaaataaactccatagcgcaagttgtggttggtttactaccaactatataagcaaccgcaactgaatcgaaacataaaaccttagaacgcctgtatgaaaggataactgcgtaaaagcacagtttactatatattgaacttatatagctgcacagctggaattgccatagattaatcctctgtcttcccatcagaatggaccctatatcactgattcaactgccatgagctcgaacactgtgacctttgatggacccgaagtatcgtttaaagggctgcaccagcgatagctaacacaactga

SEQ ID NO: 35187 - DNA, 257 bp, Glycine max
  Clone ID: PAT_MRT3847_131777C.1
ctctgctgcagcagacgacgcaggtgcagattcgcttctttatccaagtcttgcagcagatgtccaagaatgtgcccatgtccggagttctgtcccctgcctcttttggagagaaggatcccatgacacagaagctgagcgatgccatgagcaagctcagcacgtgtgaaaaccgtcattccatgggtctcggtcgtcctccgccatccccgggtgctggaaaacgcaactcgggcttggagacatcccagatcaac

SEQ ID NO: 35188 - DNA, 328 bp, Glycine max
  Clone ID: PAT_MRT3847_131778C.1
gctcactactcactggccgcccttctctcttttttttttttttttttgtgagaaagcatttgatcggctagggtcaaactactgggggtatcaagactattgaaaaaagtaagatacatggatgacataacacatgcttctcagacctcaggcgttgaagagataggaacaactactggcctaaaatctaacaatgtgcttgtgtaaggggaatggtggtcaaataaatgactgtgcaaaatccacaccccatcatttgtataactaggaattggcccaaagcaaggccaaaactttagacagatgccatggccgtttcgaacctaga

SEQ ID NO: 35189 - DNA, 284 bp, Glycine max
  Clone ID: PAT_MRT3847_131779C.1
ggaagctttcgtctcgtgggtgcgaaaggtaaccgaagcggctcaggaaggcagctgtcactgagcccctggaacagagcgagagtatcgtagtgggcagcagtcagtgacaggtgtaacctctgtggatgacagcaacagttactggaggatacgggggaagagtgccacagtgtgtgagaggggaacccccatcaagtgtggccagcccatccggctgacacatgtcaacactggccgaaacctccatagtcaccacttcacttcacctctttctggaaacc

SEQ ID NO: 35190 - DNA, 232 bp, Glycine max
  Clone ID: PAT_MRT3847_13177C.1
atcatgccgtatatgcggcaagggggcgtcaggggagtcctgaacatagataggggctatatactctccaggggatagacgaaatcaatggaaaaccaactccaaatatagaatcctcacggtaatgcgacacaggaactagaacatggccagccccctcgggaaaagacaactccccacaatgggaagccacgagtcctaacattgaagcaagacccgcactactggccca

SEQ ID NO: 35191 - DNA, 291 bp, Glycine max
  Clone ID: PAT_MRT3847_131780C.1
aaatgccgggggtttttgcaaaagccaaagaccttaaacaaaaaccgcccgaaagcttacaaaccaatcccaaccaaggggatctaccaactctaaaaaaaaaaagggaaagaaaatttgtttggcaaactgggccccaaaaaaccttacatacaaattaacgcggggtaaatttaagggccccaaacaaccctttatcccatgggtaaaaaaaaagggaaggggagggggattttgaaacctggggggcccaaaaagaaaagcggaaaaatcttatgtcggattttgacc

SEQ ID NO: 35192 - DNA, 402 bp, Glycine max
  unsure (1)..(402): unsure at all n locations
  Clone ID: PAT_MRT3847_131781C.1
tcggctcgagtnntgtgttagcaggaaggatcgaacttgcaactttttcttcttcttaaccactcaatcaactttatatctccctcttttcgttgatcccaccttttccgctaaagcttcgattatttgcttttattttttttagcttgtttgtagtttgtttatatcgttgcgttagagaattaggaatcttcgattttctctgtttgctgttaattataatggttctgtcgtgtgtatgtgggtgaagtttcgtgagaattttacttccttttttctgtcgtggtagtttttgttttgcagtgaaactgaagcagtgcagtcaatggttgttactaatctattttcctgtgttgtgatgttttcagatagttgttaacagagtgttttgggagcttttga

SEQ ID NO: 35193 - DNA, 251 bp, Glycine max
  Clone ID: PAT_MRT3847_131782C.1
aaactgcttaccggttataaaattctgccacgataaaaaaagcctatcataattttggcgaccaattctggtttccaaaacaatacagttcacacccaaaaaacatcacctgctaatcctatacttgataacctccagctctaacacattgaccattgcaaccgttaaatttcaaccactgaaatccgagcaaattctttacaggaaactaattaacctggccaaaaaaacccaaccctttgccaccaaca

SEQ ID NO: 35194 - DNA, 238 bp, Glycine max
  Clone ID: PAT_MRT3847_131783C.1
ggtatcttctcccagcgagttcatcctccccttcgataacaccaacacatcaaacatcacaacaaaggacactaccaggatctccctcaacaagttcctctccccgacctccatcttcttcaaggactttgaagaggatgatgaggcccacaccgtcaacctctccagacctctggctcaatcagcacccgccatcacccaatcctccctcaaagccagcttcgatgccttcttccaa

SEQ ID NO: 35195 - DNA, 453 bp, Glycine max
  Clone ID: PAT_MRT3847_131784C.1
cgagcgacccgtacgtatacgcatgggcagacccgttgctgccagatgaactggctaatacgcctgatgagagggtggactgagaagctgcaggctgttgtagaccttgcattgggtactacatcctctgcaccagatccttttcacgaaggcttaacctgtgttgacgcaagtaactaattcagcttgtcagatactcttgtacagctgataaataccgttcacacattctgcaaacatttcactttcaggaaagatcttctctgattacaaggttgggcacatttaatgatcttgaaggtactcagagaaattctggctacaatgttctggaagagcctgttagcatcactggcctcgaaacatgttcacttagttacaaagttcactggccactgtctatagtgttatcacgtaaagcccttacaaagtaccaattactttttcgatttc

SEQ ID NO: 35196 - DNA, 623 bp, Glycine max
  Clone ID: PAT_MRT3847_131785C.1
aacccaaaaccagatgctacacatctttaccttgcttggtatatcatctaccgagggacagaacacggtaacattaggcagctatatataggcactgacacttctccctttcaattcagctaacaagataagtacactaggacacatgcaaacccgacctgcattgatcttgcgacccaagcgtcgccctgtaattattgaactggatgtacgctttcaggttggagaggctcactccatacgcctcacactatatttgcattaaaaaactggtgttaatggatcaataagtaatggaataacggctgatataagctttaacaaatgaaatttgttgcggcataggcactgagcataaaaatggaaagtggctatggaactacgctgggaaattggaataggtggaggctttttaacagatgtatatgtatttggtataagtgccatcgttggaggaatacgtaaaggcctttccactcatggaaatggcaccggataaggctcgaacgttgggatcagaattgtcttagcggggggaactgggtcctgaacaggctcaatagttggactaagaagaggcttttgtagagtacgaataggctcagcttatgcttaattgctgg

SEQ ID NO: 35197 - DNA, 441 bp, Glycine max
  unsure (1)..(441): unsure at all n locations
  Clone ID: PAT_MRT3847_131786C.1
gaagactcctaatttaaatttgctctgttatataagggacaaggtncatgctaatctctggaaatggctcttaaaacttgaggtgacagcacaatctgattacaggatgccatcgaataagaacacaataaaagtagataggttcttccaatggcacggttcagagcatgttcacgcagaatacttaactgagttgctgcgatgagagatggtcggaatatagcaaacagaaacagatgctcaccaaagggtactatgaagcattttgtgttctcactagtggacagcaggagatnagaattatatggtgagagcaagttcacaagcaatcgacgatctttctcatgatgccttgatagctcttctgaaaacgaaaatctagagctagtgcttgaatgatataatttaacaaaaatggtttgcagatgttacattacatta

SEQ ID NO: 35198 - DNA, 489 bp, Glycine max
  Clone ID: PAT_MRT3847_131787C.1
gccggccttctgattttttttttcaaatcttagattctctcatttttcattcttccattttcagtgcttaaactgaaattgtacaaatttgatttttttattaagattgaaactttgtgccaatttgaatggtgctctttaaattaggaaattcatctcaaatgttctgcatcgttggttatgttattggtactctctatagtgggtggacgtaatttggaggaacatacccattggaaactaaaatggattttatagaaaaacccatgttagaacactcatgaaaatctcacaagttaaaccctatgtaagagaagaggcattgaagctaggcacttgatttgatagcaaatgtgagagaagagtgctaaactttttgaatgtttctagattttctattgctattatctgattatggtttagtttttgactataacaaagatgaacttttaaagctcttggaattcaccacctattagaagcaagttg

SEQ ID NO: 35199 - DNA, 344 bp, Glycine max
  Clone ID: PAT_MRT3847_131788C.1
gtatgctctgcctatctgaaaatttccacacctcttttaattgtcgtaatgatgtgtgaagtgtgtgttattttaaaaaaaaaaaaaaaaaaaaaaaaaaaaaaaaaaaaaaaaaaaaaaaaaaaaaaaaaaaaaaaaaaaaaaaaaaaaaaaaaaaaaaaaaaaaaaaaaaaaaaaaaaaaaaaaaaaaaaaaaggggcgccccccccctaataacctcttcaccccggaaataaattccgacccggaccctgaaggcgacccaattttcctaataagaaggcgattaaaaccttggcgaaaaaatggcaaaaactttttcctgggaaaaattgttatccctt

SEQ ID NO: 35200 - DNA, 1044 bp, Glycine max
  Clone ID: PAT_MRT3847_131789C.1
tcgtgctgccgctcgacccgggtggctcgtcctctctcctcaaatatccttgttaggtgagggtgaaagaagaatctgagaaacttgttacgcaatcagcatcactctcaaagttcaaaggggaatgaatgctttttctcacaacaacaaccttgatcgtttcattactgtttccccttaaccccaaatagatataaaacacaacaagaatctcgtttcggggatacaatgattgggcgcagagacagagagggacccttgatgaggaacaacagcactaactctcttcgcaaatcacgggtcctaacctcagttgcaattggtgtccttattggatgcggcttcgctttcttgttccccaatggcttcttcgtttccgactctgttgcccctaatcgccatattcctctcgctggatccaagacccagaaaaattcagctggatgtgaatcctcggatcgggtcaacatgttgaaatcggagtttgtggcggtatcagagaaaaatgctgagctgaaaaaacaggtgagagaattgactgaaaggcttcagcttgcggagcaagggaaagaccaggctcaaaagcagttccttacattaggaaaacagcctaaagctggaccttttggtactgtaaagggattaagaaccaaccctactgttgttcctgatcaatctgtgaatccaagattggcaaagatattagagaaagttgcagttaaacaagagcttatagtttgtcttgcaaacaccaatgtgaaggagatgctggaggtctggttcaccaatatcaagagagttggcataaccaattatctagttgctgctttagacgatgagactgcaaagttttgtgaatcaaatcaagtcccagtgtataaaagagatccagatgatggtgttgatatcattggaagaacagggagcaaccatgctgtctctggtcttaaatttcgtattctaagagaatttttgcagttgggatatagcgttcttctatcagatgttgatattgtacatttgcagaatccttttgatcatcta

SEQ ID NO: 35201 - DNA, 290 bp, Glycine max
  Clone ID: PAT_MRT3847_13178C.1
gcgaagcgagcccactgcgaaaaatgtttgcggtggcgtgcatcggcggcggcatacagggcgggggggctctgaagctgagtctgttagccccctacggtcggctcttaggagggcgccacgcggggggctgcttgatgtgggtgtgggggcccatgtgggagctgggggggcaggccattggggactactacagggaccactgaacgtgtgggtgggggcgaaggcgcgggtggtgctgggaggcggctgagccgggggggtgggcgggggggtggtgggggtggggg

SEQ ID NO: 35202 - DNA, 403 bp, Glycine max
  Clone ID: PAT_MRT3847_131790C.1
ctgttcttcaagatgagaattgattttactgggaaagctgtatatactgcaatatgggttgctgctgtgtcattgttcatggagttgctgggtttctctacacagaagtggttgactgctggtggtttgggcacagtattgatttcccttgcaggtcgcgagatatttacaaacttcctttcgagtataatgattcatgcaactcggccatttgttgtgaatgagcggattcaaacaaagattaaaggatatgaggttactggtaaagttgagcatgtaggctggtggtcaccaacaatagttagaggttctgattgtgaagcagttcatattcctaatcacaatttgagtgtaaatgttgtgaggaatcttagtaagaaatctcattggcgcatcaagactc

SEQ ID NO: 35203 - DNA, 1843 bp, Glycine max
  Clone ID: PAT_MRT3847_131791C.1
cttatcttattgcatgttttgtctaaatcaattgaatagtatcaattgcttactttctattccgtgatgttttcagaggacagattggaagaaaagtagttcacgttatattttgacatcttattttcaacctttgctgttgtggactggggtaatgctcatctgcagggatttggatccactagtcctaccatcagaaaccagtcaagctattaagcaacggcggctgagttttgtacgatcgttgtcaaccgtgcttacatttgcttactgttcttcaagcttaattcgacaagcacaaaatatttgtatggggacaaatgactccagtgatgaaagaaatatgagaattgattttactgggaaagctgtatatactgcaatatggattgctgctgtgtcattgttcatgagttgctgggtttctccacacataagtagttgactgctggtggtttgggcacagtatcgatttcccttgcaggtcgcgagatatttacaaacttcctttcgagtataatgattcatgcaactcgaccatttgttgtgaatgagcggattcaaacaaaaattaaaggatatgaggttactggtaaagttgaggtttgtatctatcacctaacttactgaaaaggttgtttaggaggaacagaaaacataatgttattcagtcatgtaagctggtggtcaccaacaatagtgagagtttctgattgtgaagcagttcatattcctaatcacaatttgagtgtaaatgttgtgaggaatcttagtaagaaatctcattggcgcatcaagactcaccttgctatcagtcacttggatgttaacaagattaatagtattatagctgatatgcgcaaggttttggcaaaaaatcctcaatagagcagaaaaaattgcacagaagggtttttctagagaatattgatccagaaaatcaggctcttatgatattagtatcctgctttgttaaaactagacattctgaagagtacctccgtgtacccacgcgtccgctcttggatcttctcagagttatcagtcatcatcgagctcggctagccacacccatccgcacagttcagaagatgtgcagtgatactgatttagatgttgatccatttgatgacaccattcccactcgttccagatcaaagaataaccgtcctttcccactgataaatccaccttataaagttaagccttcaactactacaaatgaggacaaagatactaagattgatgaaaccttgccatctgacttcaaagtagaacgtgacaaatttgctgcgacatcgagttcagtccagaagacctccaaatcccaaaagctcaaaaaggaaagagtaggaagttcagaaaagggaacaacatccaaaaatttgtcaaaatccaacgagtttggttctggagagactacttcaccatcaaaactagatgaagagaaatctgttatgtcatcatcatcagctagtcactccttggaagagaatattgttcttgatgctgccctgctgggctcaaagagaactcttgcaattgatgaagaattgattcaatctatccctgcagaaccacaggaagttgcagtccatcaggatgggagtgaacctcctatttccaaggataagaaggatggtgagatgtcttcatttcctactcctaaacaaaaggattaggctgacgatcagagtagatgttgatgtttaaatagagtagatggttttgttgaagttacaaaaatgatctagctgtcttttttaagctgggcattgtgcattgtattatccatttgtatattagtgggaatgaattctcatgtaattacaagattaagttc

SEQ ID NO: 35204 - DNA, 243 bp, Glycine max
  Clone ID: PAT_MRT3847_131792C.1
acagttaccattttccacgttaaaaaaactcttgaaaccaatttcactgccactcaccttcttgtacaatcgtggaaagtgaaacccgatcctggcgataccctttaaatcatcctatttttctaaacccattgtttctaccttttgtatctctcattatttctaacacacaatcttacatattcctcctcactcaatatttcaaaatttccccaacttaatgaacatcaaatcttccttttc

SEQ ID NO: 35205 - DNA, 982 bp, Glycine max
  unsure (1)..(982): unsure at all n locations
  Clone ID: PAT_MRT3847_131793C.1
ggctcgagtgagaattgattttactgggaaagctgtatatactgcaatatggattgctgctgtgtcattgttcatgagttgctgggtttctccacacataagtagttgactgctggtggtttgggcacagtatcgatttcccttgcaggtcgcgaggtacagtatatgttctttgatagtgtctatgagaatgattaagtcatctttgtcatttgatttttttattcattgtccagtatattcgatttctcaaattttgtaagagtaactcttcaaggcatagccatagcgatagccattatcaatcaggtagactcttgtttgctgtcattctcacttcatttttgtgatgtattcagatatttacaaacttcctttcgagtataatgattcatgcaactcgcctatttgnnnaaaatgcgggtttccaaccaaattttggtggatatgaggctgctgaaaaagttgaggttcgtatctatcacctaacttactgaaaaggttgttaggaggaacagaaaacataatgttattcagtgtaagtgatttttaatataagtgatattttccccaagtatatatctttaaaaattttcattgtaatcaaattttatattttgtatagcatgtaagctggtggtcaccaacaatagtgagagtttctgattgtgaagcagttcatattcctaatcacaatttgagtgtaaatgttgtgaggaatcttagtaagaaatctcattggggcatcaagactcaccttgctatcagtcacttggatgttaacaagattaatagtattatagcttatatgcgcaaggttttggccaaaaatcctcaagtagagcagaaaaaattgcacataagggtttttctagagaatattgatccagaaaatcaggctcttatggttgatgatatatcttttctgttcatcggtttatataatatttacaagtttataaattccaatatcttgttatct

SEQ ID NO: 35206 - DNA, 177 bp, Glycine max
  Clone ID: PAT_MRT3847_131794C.1
gggccaaacaaaccttgggggcccaccaaggcctgggaaaaaccttggatttaaggaaacccttgaaaaaatgccattcttaaaaaaatggaattagtggaattggtcggggaaggggaactttccggggaccatgtcacaaaaaaaaaaaaaattgggaaaaaggccaacccccta

SEQ ID NO: 35207 - DNA, 3745 bp, Glycine max
  Clone ID: PAT_MRT3847_131795C.1
ggctcgagctggtatgctccaatcggaggagagatctcaattgagataaaactaaaagaggacgacgcaaagcttggctttgccattagtcgtacagaagagggttttattttcatccaaacagttattgaggataaccaagaaaatgtaccagccacacgttcaggactcagcaatctgtataaagcagcaaaagatacttcaaagttgttggtagtatctaggctttcaaatcagagagtcctcccatggatggtctcttcaacaggagccattaggtgttatgacactgtttcattgagccagaaactctccttgcatagacacaccaaagttcctattctccttcatgtcttcctttgggatagaacattggcttcaagtttagaaagtacaagattgagttcattatctccttcagtgttgccattaccattatcacaagaagttcaattggcacgcgttcctcacctacgaattcggctcgaggctctttttcttttcttttttttttgatgcattgtttcatgtctttaatgttatgtctattccttgattattgctttagtaacttgattgttggagatgttaatgttggacccttcaatctaaaaggctaatattctaagcattatatatttccatcaattgaattgaggcttcctagttccttccgattagagaaagcttcggcttgatgcttttcaatctacaatttttcaaatgtttagagtgtgttttctctgatgattttttttatacgaactaagaaattaccttacattcacaacacagtattaacagcccatgttttggattggattggatactcttgatcacatggcagcgtcatcagcatgccttgcaaggaatggtttatctacacgtaattgcattgccgcgcttctctttcgttccacgctgctataccaaaccgaaacacgtctcttgcaccgaatagcttcttctactatctaacgtctcttcttttcttttacttctttcatactctctctcagattctttgttttgaggttctcttctttatacggatggcagcaccattggcatgtcttgttgggagtggtttatctatacagagtaataaattaactcttggcaaggacgtcaatggaagatatctcttctcatatcataggctttcagcacagagtaaggagtcaaagacaatatgcataaaggcatccttggatcaaaggaagcatgaagggagaagaggatttctgaaattgttgaatgtgggagttggcttacctgtattattaggaggtgggaaagcgtatgctgatgaacaaggaccttcctcatccagaatgtcttattccatatttcttgagtatttggtataaggtctcgatttacaaaattggatcatttattatagtggaaccatcaatcattagagattaacatcatgctcagcttggcgagtaggtaaagatttatcgtgataaggtggttgcacaaaccttagcaaggacttcaatggaatgagttacctatactcctcttggatgttgtcattattgaacaacaatcaggttctcaaatggattaactatttaggaatctttcgtagcatatgcttgaagtaggaagaaggtgctttctctcaaggctatttccaggagggatgggaggtcccggtgggggatttcctcttgcttttggtcaatctaaagccaagtttcaaatggagcccaatactggagtgacatttgatgatgttgctggagtggatgaagccaagcaggattttatggaggtggtggaatttcttaagaagcctgagaggttcactgctgttggggctcgcataccaaaaggtgttcttcttgttggtcctcctggaactgggaagacacttttagcaaaggctattgcaggtgaagcaggtgtcccatttttctcaatctcaggttctgagtttgtagagatgtttgttggtgttggtgcttctcgagtccgcgatttattcaggaaggccaaagagaatgccccatgcattgtttttgttgatgaaattgatgctgttggaaggcaaagaggtactggaattggtggagggaatgatgaaagagaacagaccctcaatcaacttttgacagaaatggatggatttgagggtaataccggtatcattgtcattgcagctactaacagggttgacattcttgattctgcattgttaaggccgggacgatttgataggcaggtcacggttgatgttccagatatacgaggaaggactgaaattttaaaggttcatggtagcaataaaaagtttgaagctgatgtttcacttgaggtaattgctatgagaacacctggttttagtggagcagatctggcaaacctgctgaacgaagctgctatattagctggtcgtcgtggaaagacagcaatttcttccaaagagattgatgattccattgataggattgtggctggaatggaaggaaccgtaatgacagatggaaagagcaaaagcttagtggcatatcatgaagttgggcatgctatttgcggaactttgactcctggtcatgatcctgtacaaaaagtaaccttagttcctcgtgggcaagctcggggtcttacttggttcattcctgctgatgacccaactcttatctctaaacaacaactctttgcaagaattgttggtggacttgggggcagagcagcagaggaagttatttttggtgagcctgaggttacaactggagcagctggtgatttgcagcaaataaccagtttggccaagcagatggtaaccacatttggaatgtctgatattggtccttggtcactcatggactcatcagctcaaagtgatgttatcatgagaatgatggcaagaaactcaatgtcagaaaagcttgctgaagacattgatgctgctgtcaagagactctcagatgaagcatatgaaatagcattgagccaaataaggagcaaccgtgaggcaattgacaaaattgtggaagttctattggagaaggagacaatgtctggagatgaattccgagctctcctgtccgagtttgttgaaattcctgctgaaaatcgggtccctccttcaactccctcaccagttgttgtttgaatagcctatatgccactgcaatgtagtgtagctctccacatactgaatttttctaaaattgtaaaatatttgtaatatacccttgactcttaattttagtaatgacaaaagatcctagcttgcttctttatttcttttttcttgtgttggcaacggaaaatgtaagtttcttcacaattagtacataatgtaaccttagtgaatagtaatgatattaactcattgtatcattgtaactggtgagatgtaatgtttagtttgactataaatgtaatgtttacacaagttccctcattttaggctccacagtaaagaatggcaacttaacaatcttgttggatatccatgccacaaaatggtggtaaaaataagcttgggtaccatgatgattgatgatatttcaagtaattaggtttattcaagtaaataattgaacgattatcgtcaaagtcaaaagtgtggtgtagcgatgattttttctaccccttccataatcttgtgtgattaggtgtaatcagtaactaattgaatgattatcatcaaattaaagtcaaaaagtgttgtgtagctgcggttattttttgccccccccttctgtcgtcttctcgcagccgt

SEQ ID NO: 35208 - DNA, 199 bp, Glycine max
  unsure (1)..(199): unsure at all n locations
  Clone ID: PAT_MRT3847_131796C.1
gtttccagctctncattacgggcctctgtnagttctacagagtgcctgtnacccccaacaggggtcaattaggcccccaattaaccaggctttcatcnaagaagtnttgcaaccccnaggcagggcntaggggcnaannaccancagnnggctnaggntggcgggnantgggnaagcagacggnntgnngctaacccna

SEQ ID NO: 35209 - DNA, 2748 bp, Glycine max
  Clone ID: PAT_MRT3847_131797C.1
gttggcacttatttgaagcccagaacatcctagtacctctgtgttctctgcggagggtgtctctgttgtcccaggtaacatcatcttgaatggcagtaataatggctttgaatggttattattacaacaatataaagttgggaaatcaacgaagagcaccacacaatctcagttttccaggatcaatttcagttcataaattgccaaagaatagaaggtcaaaatcttacaagtcagggaatgataaatttcctaggttcctggtagaaatgcgacagacagaattaccttcatcaaaatatggtacaaatagttgcaccgtgcaaatgtttcaaacaaatgagatagtagaaaagaaagacaatgtcagagaataaagtggaaatggcgacaggttcatagcaagctgttaatttagttagcttgattattttcagtcatgtgaaggttctggacgtccactaagagatcgaaaacgactaaaggacttacgtcaaactattttctatcaagaaattgattatataaatgaaggaaagaaggctgcgagattccgccgagattttagaaacataaagtgggttcggatacctctggtatattgggattatactgctttaaaggtgttgaccatggagtatgtaccagggactaaaaatgggcaaagaggaaaagcagaaggcggaaaactgcctcatggttaagggagtgtgtattgcagcttggtccaactttcattaaacttggacagttatcatcaacaaggtcagatctatttccacgtgaatttgtagaggagctcgcaaaattacaggacatggttcctgccttctctcctaagaaagcaagaaaattcatcgagagtgaattgggagctcccattaacatattatttgaagagtttgaagatcggccaattgctgctgctagtctcggtcaggttcatcgtgctattctgcataatggagaaaaagtagtcatcaaagttcaaaggcctggtctgaagaagcttttcgacattgatttgaaaaacttaaagttgattgcagagtattttcagagaagtgaaacttttggtggtccacttagagattggattggaatatatgaagaatgtacaactattttgtatcaagaaattgattatataaatgaaggaaagaatgctgacaggttccgccgagattttcgaaacataaagtgggttcgagtacctctggtatattgggattatactgcatcaaaggtgttgacaatggagtatgcaccaggtatcaaaataaactatgtggatacattagcttcacgtggttatgatcgattacgaatctcatctcacactatggaggcgtacctgattcagatattgagaacgggtttctttcatgctgatcctcatcctggaaatcttgctgttgatgttgacgaagcaattatttattatgactttggcatgatgggggagatcaaatctttcacccgagagagactgcttgaactgttctatgctgtttatgagaaggatgccaaaaaggttatgcaatgccttatagatctgggagcactccaacctactggggacctgtcatcagtgaggagatctatacaatttttcttggacaatcttctaagccagacaccagatcaacaacagactttatctgcaattggggaggatttatttgcaatagcacaagaccagccattccgttttccatctaccttcacctttgttattagagcattttctacacttgaaggcctaggttacatactcaatccagatttctcctttgtgaagattgccgcaccttatgcacaggaacttttagacataaggcaaaagcgaccgactgggccacaactcgtggaggagataaggaaacaagcagatgatgcaagaaccaattcaatatcgatgccttacagagttcaaagaatagaggaatttgtcaagcaacttgaggcaggagacctgaaactccgagtccgagtacttgagtctgaaagagctgctcgaaaagcaacaatattacaaatggctaccatgtattcagtattggggggaaccttgctaaaccttggtgtcactttgagtagccaaggcaatcaagcttttgcaaatggatcattcattggtgcaggcattttaggggctctatttttaaggtctatgcaacgggtgaagaaacttgacaagtttgagaacatgatataattcgttcccaccaaattcaactccttcgggcttcaagcatatgcatgatatatatatatatatatatatatatattcttgatctctttttccattcatatttttctcataagcataagatatacgagtacgagttgtacagaaacatgattggagggtaatgaagctgcaagaaactgttccttcatgataaagtgaatatcattgttttgtaaggagaaaagaaattttcatcaaccattggtacaatagttagccaaataacttttagttttcacattttcattctaattatggcttcctcaatcctccaagttaaattaagtatacgccctagaggcaaattgtatattgatcttactagtttgcatcgtaccatgtcgtttattgtatatacaagacattccattcattgtgttatttatttagtttacgaccaaatctaatgtggactattctagtatgtggtttagggtggacctctttttaatagccatttgatatattattaaaataatgaatggttttgat

SEQ ID NO: 35210 - DNA, 479 bp, Glycine max
  Clone ID: PAT_MRT3847_131798C.1
gggttttggttttttttttttttttttttttttttttttttttttttttttttttaaaaaccattataaatccacttttggaaacattttcccccaatttaaccctttaaggggaaacaaaaaagtcttttgaacaataaaaatattgttcttaaaactggttttcctcccgggggaaaaaataaaaggccctcctcacgggaaatcctttaaaaacaccccccttttttcaccccccccccctcgggaaatggtttaaaaaacctcattccctaaggcccccggggggaaaaccttggaaggcaaaaaacccctcccctaaacagggtttaaacagaaattttgggctttcaggtttaaacaaaaaaacatacctttttggacgttctcttggggggcgggcatgggtctaacagaaatttgggccccaggtacacgggggttacgccttacaccgcccatccaaggggtggaaaaag

SEQ ID NO: 35211 - DNA, 252 bp, Glycine max
  Clone ID: PAT_MRT3847_131799C.1
tcatttcttctttaataccaaaccgctttaatcttcttttttggagatgcttttaataaacaaaccccccaaaaacaaaccatacccacccccaaaaaaacccaaacttgttacaaatccccccatcttaacaaacaaatacaacccatccactctacatctaaatatttttaaaacccatcctactctccccccctctgatatcttttctatcccaccagtccaaccaaaatctactatcttttcccaaac

SEQ ID NO: 35212 - DNA, 377 bp, Glycine max
  Clone ID: PAT_MRT3847_13179C.1
acccgaattccggacgtgtccctgcacgcgttccaccttcacttactctctgtcctattacagcttgctgtaatcatcgtcataacttcactctgagtcaaatatacatctattcacaaaatcacacaatatcccagccaagaacatataatctaaaggccagcatacctactgaaaccgctaactggccttaattctgtcgttcttacatacgcttcgcccacctgacgaccatcacaaaccatctacgctcaattcataggtcaccacacccgacaagactataaacataccaggcgtttgcctctggaagctccctagtacgctctcctgcaccgaccctaccgcttaccgcatacctgtcccgctattatcct

SEQ ID NO: 35213 - DNA, 201 bp, Glycine max
  unsure (1)..(201): unsure at all n locations
  Clone ID: PAT_MRT3847_1317C.1
nnccacctcaagngaaggggcaagaaaacangccccagaggagaaggagcccagcgcaaaagaaagacacaagcccacgggaaaaacnccaacccgngagaaggggcnagagaaccacanccggagaacacaggnaaagcacggggaaaacaaaaaacacacagggcaagncacgccaagggaggagggacgcgggaccca

SEQ ID NO: 35214 - DNA, 550 bp, Glycine max
  Clone ID: PAT_MRT3847_131800C.1
gagagagaatataatttatttaattatatatgttattagttttacaacccctgcaaacgcagctggttgaaaactacatgatcatgcagcgagggcgcagtgctttacaactgttaaaatacaacgatattcataaacaaaagaaaaaagacaagaaaccaatccctatcatagaaaattataatgatttaacattttttttataaaagacaaaacgccgaaactttgcttccaattcttctctttcgtgcatcgcgaagcgcttcttcttccttttctatcgctttcttttattcgttgcacatattcttcagatccatagacacgagacaattttctaaggcctcttcaattggattttgaaatggatagaaccactttagatacaaattgcggagatcagatccatttgtaacactataaagcctatctacaacaggaattccaaaggctttccaattcagagtctgcttcccatagacatactgcttctccatccggtgggttatgaagacaaccaaaggggcattcacattacatttcaaaaatc

SEQ ID NO: 35215 - DNA, 3022 bp, Glycine max
  unsure (1)..(3022): unsure at all n locations
  Clone ID: PAT_MRT3847_131801C.1
ccccaactccctactactacaaatctcctcctcctccttcacccactccttactattgcagtatgtctatgggaagcagactctgaattggaaagcctttggacttcctgttgtagataggctttatagtgttacaaatggatctgatctccgcaatttgtatctaaagtggttctatccatttcaaacaccaggagaggagggcttagtaaattgtgtcttttttatttttttttttttagctcaaaacaattatataaaaaacaaaaatattcttagttccacaacttgagtttgataattaactttgctaaatgtcacaaaaaattttaagttcttcaaacagtaaaatcatccccacgtcatcatagcctgatgcaagaatccaaaccgggtggggcaggtggaaaactaatctttcaccgatacttgatgaagccaatttccttggcattgcttcggaagcactgcctgcaacacataagcccatatttcctgatcaatccatgaggattcccacacacacggcaagtgcgagaaccaggtccgtagttcttagggtgagaattccacacattggagtgccccatgcttctgaattgcagatattaaaacgcaagaatccggtaaccctagcctcaagtcgcacagacttaaattttggtcattatttttataaggtttcaatttagtctttaattattaaacggtcttaagacacatagagactgcaaacaactgaaacttcattaaaatattaaattacaaggtcctatttgacattgaaggaacatttgttaaatgatagacaaaccaaatgattatggtttttcttgcataggtacaaataaaatatttgttaagagttacaataaatttaagagattggaagaggagctccattccactccccaaggcactccataagaggatcaataattttcccttggcacattgcaactgaataatttgtcaaacatcatcacccggtgacctcaccttttgacaagttaggatagcagtcactaattccttaaaaaacaaaaatattattagttccacaaattgagttttgataattaacttctactaaatgtcacactaacttcctctacgttcttcacacagtaaaatcatcccagcctaatgcaagaatccaaacctcatggggcacttccactctaccctcttaacactccccacccagtttatcactctcctccaccacctcctaccaacaagccttacatctatgcgtcacctccccctccttaccactattagctagcatagctctatggatatgaagaatatgtgcaacgaataaaagaaagcgatagaaaaggaagaagaagcgcttcgcgatgcacgaaagagaagaattggaagcaaagtttcggcgttttgtcttttataaaaaaaatgttaaatcattataattttctatgatagggattggtttcttgtctttttttctttagtaaaagaaaatcggtgtattttaacagttgtaaagcacttgcgcccttgctgcatgatcatggtagttttcaaccaactggcgttgcaagggggtgtaaaactaataacatatataattaaataagttatattctctctcaatttgttacccaatttatgtaaatcataataatggtgttcgtatctatgaattcgaacggctgcaaaacaggaaagaacagtaaaccacattcccaattaacaaataactcgcacactagaattctaatccgatcttggaccgtcaaaaatatgttttctgagaatatctaaattgtaacagtctaaaactagccaaacaaaattgctatagttttaaaataaaatgcatacattaaaacagagaagcacgtattacatattggtatgattatgaaaaaagagtgaaaataaaggtgccatataccaatataataagacatacattttataatgcatacaccactcttttcatattactcagaatcaaattacatttaaccaaaatcaatgatgaaaaagcaactacttttaaaattaatttcattcaaaatcaaatttttaaacacccacccaagcacacactcaaccttcaacaaagtaacgtaatgaagagaaaatcaatggttaaaagaatatcttattatgacatcaggatagaagagtcacctctttaaaattattaacgaagaacaaaagtaatattgcaatagtgatggtacgaaacttattcaaaaccaaataatgaggaaaatacttgttatcagaaaaaacacagattcaaagtactcatatgggggataaaattaaatgcttcaaattaaaagcaaaaaccttaataataatcgcataatcaaattgagaaggaacaaagagggaaaaggatcaactcatcctgaatcaccatttggcgaagatgagtaacataccaagtgcgagaaccaggtccgtagttcttagggtgagaattccacacattggagtgccccatgcttctgaattgcagatattaaaacgcaagaatccggtaaccctagcctcaaggacctttttgacattaaaggaacatttgttaaaggattgacaaaccaaatgattatggttgcacttgcataggtacaaagaaaatatttgtaaaagttatagtaaaatcaacagattggaagaggagctccattccactccccaaggcactccagaagaggatcaataattttgccctggcacattgctgtgaataatttgtcaaactcttcacctggtgacctgaccttctctccagttagcaacccagtccctaattcctctctcacaaacttgtacagtgggtaagatctgcattcttggatcttgttcggaattgcagctttgccactctcataagcaacccttgcactttcaacctcttttggcaagagatttttcaactcctccttaaagtttgctatcttttgaaagatggatgngatcatatccttcacattctgtgcatttacccaggcatgaactacaagcacttgcc

SEQ ID NO: 35216 - DNA, 142 bp, Glycine max
  Clone ID: PAT_MRT3847_131802C.1
cccacgcgttcgtccacgcgtacgtccacgcgttcgcacaaactagaagtggcattatttttacatttccactaaacagaaaatatcattaatgggtattttcacatcctaggactaaattacctaccctgttgctcctgct

SEQ ID NO: 35217 - DNA, 643 bp, Glycine max
  Clone ID: PAT_MRT3847_131803C.1
atggcatgaacatttttgaccttgatgcttggaggaagaccgatatgagctgaacagaccatcattgggttgagcagaatataaaatcagacttcagtttgtggcagctaggaactttaccccccggattaatagcattccatggtcatgtccacactattgatcctttctggcacatgttgggattgggatatcaggaaaatacaagttttgctgatgctgagactgctggtgtcatccatttcaatggcagggcaaaaccatggctagaaatagcttttccccatctaaagccattgtggaccaagtacattgacttttcagattacttcataaagagttgtcacattagggcattgtaattttgatcatgaaaaaaagtggccattgttttttagtggaaggaatggtatttgcatagaggaagatgaaaatgataggacttcttcaaaagcatatacccatccaccactacaaggaagtgacaacacaacaatgatatgactactttgtgcagcctttgttttgattttcctttgtaaactcttcagctgaaattatttttctcttcaatccatattgtaagtatgacggtgtaacatccaatttttttaaaataaattaaaaagaatttttttatttt

SEQ ID NO: 35218 - DNA, 344 bp, Glycine max
  Clone ID: PAT_MRT3847_131804C.1
ggctcgagatgaaacactgtgtttactcttgggtgacgctggaacgaacagagatcattgactgcgtgttattgtgcatgcgatgcacgacgacaatgacggtggggtgttactctcctctgaccccattgtcattattcttagaagagtatagcagaccttgctgttataaacacattgcataatatgtttaatttagctgttgaatccgttagaagacagagagcgagtcgtgtgcctctatttttgcagatcaatttgctgtggtctctcgtgatctcgggttactagtgaatatgaatggtgattctttgactgagagagtcttgattttgctaccgatt

SEQ ID NO: 35219 - DNA, 502 bp, Glycine max
  Clone ID: PAT_MRT3847_131805C.1
tccacgcgtccgctccccaattccacactccactaaccagtgaaagacaacaaaacaataaagacaagagaaccccttcacgcattgtctacaacgctgccatgaacaactccttccttcaatccaagcattgaattccactcccacaccgaatactttttctcaacgcttttacttttttcagagtgttcacacccgcaaccgcaagctttggaattttcaggggacttcatttcagttctgcttgaattgcaaaacccaccacaggttttgctttttttccatggattcttgaatgtggttttcgtatggtagggttccctccttcctttccaccgcttccccacttttctccgtaaatttgtgctggatttagtggaaaaaaggcctcttacccttatgcttctgatatcatcaatcttatcttatgcattgtacaagtgtgtagtgctgatatcttaaagcctgaaagctttgatcgaacttgcgtgtctattacctt

SEQ ID NO: 35220 - DNA, 1287 bp, Glycine max
  Clone ID: PAT_MRT3847_131806C.1
tccgctcgagacggctgcgagaagacgacagaaggggacgttccaataatgccccatttttctctctcccctctctcctgtgcaccttctcctctcccacctcgccgccgaatctttctcgctcctccccgaaccgccgcatcttccgccaccgacgccgcttcctcttctacttcctcttccgcttcgaatttcgctcccaaagtcgtcgtcaccagagagcgcggcaagaacgccaagcttatcgccgctctggctaaacatgaaatcaattgtttggagcttcctctcattgagcacattcaaggacctgatttaggcaggcttccttctgtattaggtgacaatgcatttgattgggttgggataacgtctccagacgcaggtgctttctgtcaaaataggtgttgttggggctggcactgcaagcattttcaaggaagctttgcagtcttccaaccgatcccttgatattgcctttgtgccatcaaaagcaacaggaaaggttttggctactgagcttcctaagattggaagtaaatgcacggttctctatcctgcttctgcaaaggtaaatgcaccgttctctatcctgcttctgcaaaggctagcaatgagattgaggaaggactttcaaaccgtggatttgaggttactaggatgaatacatatacaacggtgccagttcaacatgttgaccatacggttctaaagatagcacttgctgcccctgttgttacagtagcttcaccatcttctattcgtgcctggaagaatcttctttcagattctgagtggaacaattctgttgcatgcattggtgagacaactgctacaatggcaagaagtttaggtttcacaaatgtgtactatccagcacaaccaggcatcgaaggctgggtagaaagcattcttgaagcattaggttcctatgatgaattattgaggtaggtctcagctctttgtagcaacctggagatgttttcaactgtttctctcatgctgcaagattaatataatgatttggcatcgtggatggatatactctctgttcagtagtagtatttttaaagatacatttagcttcaataaagtaaggagagtgtagtgtatattaggaaataaagtgcacttatcgtcattgattaaaatataaatatttttgtaattaatttcaaagtttgttatacatgcacttgttttttatcacaaattctaaccattatttttttaattaatgcctataaaaaaaggctttcatgagaaaggggtaaaaagtttccatgt

SEQ ID NO: 35221 - DNA, 941 bp, Glycine max
  unsure (1)..(941): unsure at all n locations
  Clone ID: PAT_MRT3847_131807C.1
ggaaatggtcaggcaagataataggcggcaactgagtgctaaggtagagcaactagatgaagaggtggctcagggtcaacaggcactggcgtggtggacaanaacaagaaactgctatgcttcaggtcttgatgcgggtggagcaagagcaaaaggtgactgaggatgctcgtaggtttgctgagcaagatgcatccacacaaagatatgctgcgcaagtccttcaggaaaagtatgaagaagcaactgctgcacttgctgaaatggagaagagggcagttatggcagaatctatgctggaggctacattgcagtaccaatctggccaagttaaagtgctacaatctccacgatcttcacagtcagattctccggtatcgagaaacaatcaagagccggatatccctgctaggaggataagtttgctttctcgtccatttggacttggatggcgagatcgaaacaaggggaaacccactaatgaagagccagctgagggaaatcccagcgttgaggaacaaaatacgatcagtgaacaagacgtcaatggccttaaagtacaggatgagagtagaaaagaagtcagtgcctagattttctttatatcctactcaagacaatttgacgagcaagaagttagtttcttcttccttgtctgtaatttttgtttagggtgaacatataatttcatattcattaattgtttgttctttattatgtaatagaataatagtaattggaaagtaagtgaacggtcgaggtcaactgtaatacatctctcgtttatttatagtaagttttgtttagggtgaacatataatttcatattcattaattgtttgttctttatgatgtaatagaataatagtaattggaaagtaagtgaacggtcgaggtcaattgtaatacatctctctcgtttattccatggttttagaata

SEQ ID NO: 35222 - DNA, 622 bp, Glycine max
  Clone ID: PAT_MRT3847_131808C.1
gatatgctgcgcaagtccttcaggaaaagtatgaagaagcacctgctgcacttgctgaaatggagaagagagcagttatggcagaatctatgctggaggctacattgcagtaccaatgtggccaagttaaagttctacaatctccacgatcttcacagttagattctccagtatcgagaaacaatcaagagcctgatatccctgctaggaggataagtttgctttctcgtccatttggacttggatggcgtgatcgaaacaaggggaaacccactaatgaagagccagctgagggaaagcccagcgttgaggaacaaaatacgatcagtgaacaagacgtcaatggccttaaagtacaggaggagagtagaaaagaagtcagtgcctagattttctttatatccttctcaagacaatttgacgaggaaaaagttggttccttcttccttgtctgtaagttttgtttagggtgaacatataatttcatattcattaattgtttgttctttatgatgtaatagaataatagtaattggaaagtaagtgaacggtcgaggtcaattgtaatacatctctctcgtttattccatggttttagaataaactttatgatggcgacgaa

SEQ ID NO: 35223 - DNA, 729 bp, Glycine max
  Clone ID: PAT_MRT3847_131809C.1
gttcgagctctccggcatcccccctgccccccgtggtgttccccagatcgaggtcaccttcgaccttgacgccaacggaatcatgaacgtctccgctctcgagaagggcaccggcaagaccaacaagatcgtcatcaccaacgacaagggccgtctttccaaggaggagatcgagcgcatgctcgctgacgccgagaagtacaaggaggaggacgaggccgaggctggccgcatccaggccaagaacggcctcgagtcctacgcctactccctcaagaacacagtctccgaccccaaggttgaggagaagctgtcctctgaggacaaggagagcctgacctccgccatcgacaagactgttgcgtggatcgacgagaaccaaaccgccaccaaggaagaatacgaatccgagcacaagaccctcgaagggtgttgccaacccgatcatgactaagatctactctcagaagggcggtgctcccggcggcatgcccggtgccggtggtcctccccaggacccgcaggacggtcccactgttgaggaggtcgactaagcgtctcgcttcacgactctcaacttgcatcgacaacacggcgttccgactagatttgggatttttcttctgctcaaaattcatgatgctatgacttggaggaaaaaaaagcatccttctgtaatgtagccaacctcgcttgaggttttcgagaaatgaacgttttctaatcatc

SEQ ID NO: 35224 - DNA, 142 bp, Glycine max
  Clone ID: PAT_MRT3847_13180C.1
ttgataatttcccaaaaggaggaagctagaaatgcaaacactttttaacagaaaatccgtccattacacaggccccgcatcaaaacgagaatttcaccttaaagccgtaggaatgtgaaactataactgagggaaaaaggat

SEQ ID NO: 35225 - DNA, 180 bp, Glycine max
  Clone ID: PAT_MRT3847_131810C.1
tatagagaccgaaaggctcgctgggttccctccgacaattaatcaagcagagggtttccaaggggttactggcatttacttggtggtcaatcagaagcttcaagaagaagcactgcttgcaaaatgccttggtagaagaatttgttatcaatgtggaagaaaatttaatattgccttcat

SEQ ID NO: 35226 - DNA, 792 bp, Glycine max
  Clone ID: PAT_MRT3847_131811C.1
cgctttctctctcgaaactgcatagcgtcagcgtagttgcaaattccaggttttcttcctttagcctagcttttactcattatctctctttctctctctctcagaggttctagaaagatccactccgaaatggacggtgcgccacaatccgccggtgccggaggtccggcgccgttccttctcaagacctacgacatggtggacgatgcctccaccaacgacatcgtttcttggagctccaccaacaacagcttcgtcgtgtggaaccctcccgagttcgctcgcctccttctcccgacctatttcaagcacaacaacttttccagcttcatccgccagctcaatacctacgtaagtttttcgattcctttgtttcgccttcggattcatggcgcgcttccttcgttttaattggattctaattcgttcttctgatttatgtcttccgtttaattgtttgcatgtattgattgtgcctttgcaataaaatgttgatcgccggatttgactaattttttgtaatcgttgttgttggatattggcactgagaatgttagcaatcatagtaggctgcaagcgatggttgttgtacactaatacttgacctatcttaaaatagtggttggtatctattagttccttcgtgtaagcaggtttggatgggtttttgtcactattcactaaccctaggcccctccaaaaggcatattcaatcacaaattcctttgaaaaatcctgtctccttaatactggagttgttattatcacatctttcaacttcatgaaagccat

SEQ ID NO: 35227 - DNA, 331 bp, Glycine max
  Clone ID: PAT_MRT3847_131812C.1
cggccggccttcttttctttttgttttgaccaagaaacccagtatacatgacgtttgaaccttacacgtcaccataaattccgggtggagagaccaaagaaggggatgacaagcgtaatgtacagactcccctagaggctagcggctataaagagggaccgggattggttggaagctcaaagctactgatctgttcgctagtcgagacacaattctactttcgcaggactaatttcaccaattcatttctaatttgacacacgccaccttaagtatcgtggaataagaagatgtacaaaggggcgtgatgtgtaattccaaacaccatagt

SEQ ID NO: 35228 - DNA, 371 bp, Glycine max
  Clone ID: PAT_MRT3847_131813C.1
aaaattcaaaatttcttttttttttattagtgccaaaaaatctttctgttctatattatttaaaccaaaaacaatttttttttttaacctcttaaaaaaaatttaaaaaagaactttattaaattttttttatttaccagttttccatatgagtgatactctttaagtaacaacaagtggggttccctggtttaaaaacccccattcccactttaaaaagttccatatataggggcacatgcacgggttattccttttttaccttgactaggggtaaaacacatttttaacctccccagcttaaaatttttttccacttagccgggcctacacgatttcttgtgaagaaaattgcgttgaaaccttttttt

SEQ ID NO: 35229 - DNA, 250 bp, Glycine max
  Clone ID: PAT_MRT3847_131814C.1
gccacgcgtccggattattcattaacgccgatgaaaaaaaataaaaatcaaaaatacactcttcacaacttcacgtgcgctcacgcgccggccaccctcgacgacaacggggcttcggttaatgaatttaagggcgtgttggagatgctgaacaatgagaccgttgtggaggaattaccggacgcgcttcccgagttcggacgtagccctatggtgaggcagttgatcagggtaacggattttccgttcc

SEQ ID NO: 35230 - DNA, 1370 bp, Glycine max
  Clone ID: PAT_MRT3847_131815C.1
ctacgcctgcgagaagacgacgaagggggatctgactcatgtcaacttcatcgtcctcctcgtacgcatgcgctctgcaaccttaacctaagtacactggtgaggtgagttccttgggtacacgcgggaatggctgctgcatctggcatgccagaggaggagacagcgatgtttcccgacaaaagtgtccatcccaggttggatgtctacgtgtgggacatggatgagacccttgtactgctcaactccttgctgaaatcatcatacgctgaggggtctgaaggatgtgcagaagggggtggaaatcgggaggacatgggaaaatctcattctacaaatatgtgatgattatttcttctatgaacaaattgaaaattacaataagccttttcttgatgctctggcccaatatgatgatgggagggacctatctgattatgacttcaaccaagatgaattaggttccccacatgaggatgatgccaacaatagaaaacttgcatataggcatcgagtcattgcccaaaaatacttacagggtttacgtaatattttagatcatgagacaataaaactctgggatgaattgtatgataaaactgatgaatacactgacaggtggctttcatcagcacggacgtttttgaaggagtgttcgggtgaagataaagatgcagtttcctctgttgcttttgctaacactagctcaaactcaactaattcaaatcatgtaaatgttttagtgacatctggatcgatagttccctcccttgtgaaatgcatgctctttcatctggacagcttaataacgcatggaaatgtttatagctcatgggaagtggggaaaattcaatgtttccgatggatcaaggagcgtttcaaccatcccaatgttcgattttgtgcaattggagatggatgggaagagtgtgaggcagcagaaatcatgagatggccatttgttaagatcgatccacggccaggaaaacttcacaggttccctggtctcacattgacaacagttagccactacttttctgtggtgtatggaaggccgggcaacgagaatgatgaagaatgatgctagatcttcatgtcatctacacttttctgggatacttatctgtaccaataatataaaacgaatgcagtaacatagccagcaatttttttgccaagtgtatgcattgcttccatgagatggctatcaatctcaggtgccaattgcttttgatgaaattagatggagctatttctctatgacatgcgtgatcataactttatgttgtagaaatgagtgtagatcatttaccggttctaatgtacataacataagatgtttaaaattctaaaaaaaaaagaaaatataa

SEQ ID NO: 35231 - DNA, 147 bp, Glycine max
  Clone ID: PAT_MRT3847_131816C.1
ggcgggaaatttttaaaatggcctttttggtccagttggttttttaagcctatttttcctaaagatttttgtaccaaggtccccacatttattattcccggctttctcactggcagggttaatggattacccttgaatgggcaaaaa

SEQ ID NO: 35232 - DNA, 357 bp, Glycine max
  Clone ID: PAT_MRT3847_131817C.1
accagatcgttttactcgtttccacgatcggtatcagtgcttcaggtaatatccatgtatcttctttatagtgttcatggttttcgtttgtcagagctatttcatctttgtattatagacataaaaacttatttgtgttaatacattatagtgtccatctgagtaataagttatgtaagtagtaataacctagcaagctatgctaataactacaagaaaatgtgacttttaccttatgactgagtatgacgtgttaaccaattgaattaacaagtcacttatattaaaaaataattaatattgttatataaaattttaaaatttttaatatatatttaatatatagtttttttattg

SEQ ID NO: 35233 - DNA, 409 bp, Glycine max
  Clone ID: PAT_MRT3847_131818C.1
acgcacaggtgctagctgtggacagatcaagggtgcccacagatgggtcactatgctgataaatgtgcggacaatacatgtgatgagacacagaaatacttcctgcactccgcagattgcaacaattttgctcgctggagatactgggtttatatgacattggctggaaaaagagccactggacaggctaaagctgctttgataggaagtccgggagatactcatgaattaagaatcttcaaggggattgttagaccaggatctactcattgcgatgaggttgatgcacagcttgaggttgcggctattgaaaaagacaagtttctttcttattacaccgtagtaaacccaacttttgccaaagaggcagcagccaatatcatcgtgcataagggacaggttacaacag

SEQ ID NO: 35234 - DNA, 370 bp, Glycine max
  Clone ID: PAT_MRT3847_131819C.1
ggctcgagcttttgcagaattcaaagcagtggagaacaaacgaatggtgacgaatgaagaacagaggcacagtcccagagaccagaagatcctcccattagcagattacaatggccaaagcttgggaacgcttttcagcccaaggctcagatctggggctgctgtggctggttgggatgaagaggcactgatgttggccagccgtcatgcttgaagacacgccgtattgagatcccaagcaccagaagcgctacgtttggcactccagaaacccactaaagtcatcaaggagacgtacagctctgaggagtacacacgcaccaatccgtgtaggtcttgaacctgatgcagaagaaactacgagaaaaga

SEQ ID NO: 35235 - DNA, 595 bp, Glycine max
  Clone ID: PAT_MRT3847_13181C.1
gatgcagcagaatattgatatattatatatgctgtgcatagtaatttgaaggaataaccattcccaatgatatctaaaatctagattacagtattatggatacggaagacactaaaattacgctgaaccatctttaagttatttaacttttcaactccaaacacagctcatgcacctacaggttcagtggctttcttcagccatgcattttcaacttcatccaaatatggcgccagaatattcctacatgtggcgtgataggagttcagccaatttatctcctcgggacttagaaggttcaggtcaatcaacttcgtccggacggtccctccgatgtggggaattccggacccgtgacagaacatgtacttgtgcgcttcctcatcgggttcccagctgatgtgaaagaagctgaatcagataactcagtatcagattcacaaggatagaacttccgtgaaaaattcaaaccatgaactttcgtgagcttgaacagatgaggcttaacttgcttccttctgtactagtaatatctgtgctcaatgaagattcacagctttccattgaaaaagaaggctcaagaacagagattgga

SEQ ID NO: 35236 - DNA, 472 bp, Glycine max
  unsure (1)..(472): unsure at all n locations
  Clone ID: PAT_MRT3847_131820C.1
caggtggatcctcttacacaccaagtgaagctatgtgattttggaagtgcaaaagttctagtaggtcttattttgctttggtatgcttagttttatgtccatcttttttcacacaccattgtcttttgtatcgacaaagtattaacttagaatgtcaaccaataacctatcaatgaccataaagttttgacagtttagatgaagcaggtctaatttttactttgttttggtttttcagtttcttgtgtcgatgtcttgttctgctcaacagcaagctgtggagctctctgttttttcctttttttcaagatttctatcataccagtgtgtgtgtgtgtgtgtgtatacatatattgcaatctttgcttttttggaggtttttatcatgttctgcatgcatccaacttgtgttttagtgtggngggtgtgggactactactcatcttacaatatccaatanattgatttcact

SEQ ID NO: 35237 - DNA, 575 bp, Glycine max
  Clone ID: PAT_MRT3847_131821C.1
tgccgcctccggtcccgaatcccgggttccacccacgcgcccgccttccgtcagcttatgtctcataggctaacgattcctcactcttcttccatattctggggcctgcactctcatctcctgcactccagtgagatgaaccctatctccaattggtcccattagttacctctttgctgcatctcatatataaccattctttctcattcacacagcgtcatgggcgtctaaggatctgttgaaggacgcatcccttccatcatctcatgatgctacacacacccacttaatctcatcaatgtccgcacgcagctccagggtgaaaacactttgcccaaaccgattcaaaatctgcgacccacactcgcctttcaaaccgggtcgaccctacacgtgccagctgcaggtacgcccccccgagtgggccccatctaagttggggaacgcctagtccagcaagagggactccccgccttgttctcccgcgtctccgtcaccgtgctccaccatactctctacttcaccacccgcatgggcctctaccacgtgctcaagaccacccggaccgactcctt

SEQ ID NO: 35238 - DNA, 313 bp, Glycine max
  unsure (1)..(313): unsure at all n locations
  Clone ID: PAT_MRT3847_131822C.1
ttgataaaagccagcgagcaagcnagaccaaaacggcagaaacagcagagacctacgcaggacaccaccgcgcancaaaaaaaanggaagcggccaaaaagcagcaagaacccccaaaagaagaaagagacaccacagaagaacgagaaagcacacaagaccccaccaaagaagccgaaaaagaggccgaagcagaacaagacgacggaaggcgccacagaaaaaaagaaagggagangcggccgagacaagcaaccccccacaaggaagaaggcaacccagaagaaaacaacanctgtgaggacaagcaacc

SEQ ID NO: 35239 - DNA, 201 bp, Glycine max
  Clone ID: PAT_MRT3847_131823C.1
gacagctgcaccattacaaccacactaaaatggcttcatttgaatccttccaaatgctgcttcttgcaacctcatacacctcatgactcacagccttgttatgttactgacactctattttacaagctaccactgtacatcactcgagtgtatattccaccaatgtacaaaccattcgattattgtctaaaaggattcatt

SEQ ID NO: 35240 - DNA, 279 bp, Glycine max
  unsure (1)..(279): unsure at all n locations
  Clone ID: PAT_MRT3847_131824C.1
atncaaaacctctcattctatcttttcactttttaaccaacaatctcaatggccgcccattcctgactattcaccccacccctctcccatctcaaacccaactaccgttctaccgcaccatgtaaacaatactccaccctttccttcttcacctcgaaacccctcaatatctcactaacaatcttaccaacatccacctaccaaaccacatacacaccacttgccttcaccccaccttaactttacccaaacaccccttcccctatctttttattcatc

SEQ ID NO: 35241 - DNA, 455 bp, Glycine max
  Clone ID: PAT_MRT3847_131825C.1
gtgcagcacactgctctattttggatagcaataactaattgttattattaatttaatataagagtgtgactagtaaggtctaatagtaaggactaaggagtgtgtagtttcataaaagagaaaaggaaaggagggaaggagcgtagaataaagcaaaagcgaaggtctttctcatacacggatccccatggaatccgggaaggatgcctagcattgcttgctggaacacattctttttgtttagtataaaggaacttgctttgttccctttagaaatctgtccaacgaaacaccccttatatacattacatacaagccaacacactcacatataatagagggagagagagaaagaaagagagtttacagatgatgcagtttcttgcaggacctcgatagatttgtttacattgtttgttagatttggcccagtcagacaaaattatttatttagc

SEQ ID NO: 35242 - DNA, 194 bp, Glycine max
  Clone ID: PAT_MRT3847_131826C.1
ggcacaactttgttcacatacctacacgcaataagatgaaaatcaaagtgcttgttttgtttattcctacacttttgctggcacagggggggcatgcctcatactaccagaacttccctctccacataaaaactggctttggtgggcaatacagcaattacgtggcatgttccaatttcatgcttgtcgtccaa

SEQ ID NO: 35243 - DNA, 174 bp, Glycine max
  Clone ID: PAT_MRT3847_131827C.1
ctcggaatgctgctcgagtcagagttttggaagtggtagggggtcttcttctaatgtcatcatccaatgctcctcttcttcttctgcttcgtttgaggatgacgtgtgtgttagcttcctctgtgatgagacacgctacagctgcaccgctttgctttgtgggaaggcgctgga

SEQ ID NO: 35244 - DNA, 1695 bp, Glycine max
  Clone ID: PAT_MRT3847_131828C.1
ggagaatcccaaccgattttgccgaccaaaaaaagaagataccactctatctctctctctcacgtaaacaaaagttacaaaaaaccaaacaccccttctcccaattcccattcccaccagaatcctccattactccgagacccagcacatgctagctccttcttttctcatttctttatttgcaaaatccacacaccctaaattcctttcccttcgaagaatcccttacatcaccgtaacccaataagaagtacctcatttcgctatctcgatccaaaacaccagaaaaaaaataatgcttacgtgcatagcacgtccgaagaaactcgtcggcgactcggcagcgagcgaggatccgagttcgcggggagtgaagtcgctgacgggtcagctgaaggagatggcgctgaaggcgtcgggggcgtacaagcagtgcggcgggccgtgcgcgacggcgccgccgagtcgagtgagtcgcggcggcggaaccgagttggactcggagtcgtcaagggcagcaatgtcttacttacaaagcttaagggagctggaggcacggctttatgggatatcgagcggggaggggacgccgagctcgagcgggaggagggtggtgctgctgcttgaagactacgaagagccgaaggagtgggtggcgcaggttgagcccggcgttttgatcaccttcgtgtcgcttccccgtggcgggaaccatctcaaacggatactattcagccgtgagatatttaacaaatggcaagctcaaatatggtgggcagagaactatgacaaggtgatggaactttacaatgtgcaaaggcttaatcgtcaagctttccctcttccaactccgcctagatctgaagacgagagttcaaagcgtgaatcagtactagatttcccagtgacacccccgcggctcgggcgctctccaccctggcactcattccgtccaggaggaggagggatgggaatggggtactcatcctcagattcatttggccatcactcaatgcaatcatcccggcattactatgaccccaatggtgttaactcaaccccaaaagcttcttccaccattagtgctgctgccaagacagatatctcatcatcaatggatgttgatgcttccataagaagtagctcttctagagaagctgatcgctctggggatctgtcaatcagcaatgccagtgaccttgactctgaatgggttgagcaggatgagcctgtggtttacatcaccatcagagctctccttggatgtcaaaaggtgctcagacgaatcaggttcagtcgagaaaagtttggtgagatgcatgctagactgtggtgggaagagaaccgtgccagaatacatgaacaatacttgtgagctagattcctagatttatcaaaggggtggctgcagatggttcacaaaatgtggaggtggtgtttcttattaatttgcttagtttatatttttgctatataaagtctcttccatagaggatcagatgttagaactagtgctactttgcacctctaccttgggctatatataccctctagttattctcttgaatctagggagtaaatgtagcttctgttagtcagagtagctattgttttgtcgaagcttataagtaatgggtgtaaattatatagctgttgaatttggacgcagagaatgaatcatcttcattttcttgt

SEQ ID NO: 35245 - DNA, 348 bp, Glycine max
  Clone ID: PAT_MRT3847_131829C.1
gctcgagtggaaacagctagaacattcaatttgatttacaccaaggaaattcttccatggacacacatgatggaggttccggaacttcatggatttggaccagctgccaatcgtttattggaggcctataaaatgcttttgaagtttttgggcaacctacggaatcttagggactcacatgcagcacttgccttcggttcttctgagacatccgacgggccttcatctgtcacacgaataatctctgaatgtgaatctgcattgacagtcttaaatcgtgatcttggaattctctctgcttccattgctcgtgaacaggtagagaagatgatacattgacgaaacatg

SEQ ID NO: 35246 - DNA, 411 bp, Glycine max
  unsure (1)..(411): unsure at all n locations
  Clone ID: PAT_MRT3847_13182C.1
gcttcatgaggctaagccttcctcactcatctctctacctctcaccctaaaatcatcttcccttcctttccgttctgcgtcactagtgcgacaaagtcttcccttccttcaccagtgcgtcgaaggtcaatgcctcccttccatcaatgctgcaacaaagttttctcagtcgaaggtcatacttaaagttattatgttcctttcgtggtaaactggttatggncatttcatgtctgcttactttaatttcctaagattattgatccgaaaagaataattatacctatttgcggatgtgatggttgaatttaagaattgaaccagatccaaaaatgagatttgatttggaaataccagtgtagaaataatggttatgcatctctgggggaaananaaaaanaanaaaaaaaa

SEQ ID NO: 35247 - DNA, 713 bp, Glycine max
  Clone ID: PAT_MRT3847_131830C.1
ggttctttgcttgcttggttaatgttatttgcatatatgtgtcgccccctgagacatgttgaaagatttctgcattcccaatgcatggacgtgcaccaacagttgaatgtctttatttccaccttgaaaatcaatagccctagaaagaaagtcaacaaattggttcaatgctatctaagagtacaatcaaagaatcaatttttacagcttggatggattctaataaaatgtaccatcatggacgggatcttactcaataggatatgctgccaactcgcacagaaatttccctttaatgtcatacccaataggatatattgtcaacccatacggaaataagctcatatacaatgaacttgcttatgacaaggacattttggccgcttaatttagcagatgttatcactcactgacagatgagcatgcttctatttttaataagattatgcatatgattgcaactcaatcaggcggagtttattttctctatggatatggtggcactggcaagacctttgtctggaaaactttatcatctaccatacactctaatagcggcattgttttaacaatggcttcaagtgggattctttcgatgttgttacccggggtagaacaacacattctagaacaagtgggattgcttcaatactgctacccaagcattctacaaatataatatactacgttttttactttactgttacctacac

SEQ ID NO: 35248 - DNA, 915 bp, Glycine max
  Clone ID: PAT_MRT3847_131831C.1
gtttatgctgcaaaatggccactctcagggcagaccaaaattacattgacccctggtagtggaatacctgttggacctgtgatcaatgccggggaaatttatcaagttctacctcttggtggtcgaactcatactagagatgtaattgcaatggaagatttggcaagaagcattcagaatcctcctgctgattggcatggtgatccttgcctacctaagggaaattcttggactggagttacatgctccaatggtttccatgcacgagtcacgacactgaatttgacaaatgctggagtgtcagggtcacttcctctaactcttggccgtctaagtgcactagagcatttgtggcttggggaaaacaaactctctggcactatcccagatttgagtggactgaaggagttagaaacattgcatttggagaagaacaactttgaaggaccacttcctccgtcaacaaagaaactcccaaaactgcgtataattgagtcagattttgagaataagtcaccaaacactaatttaaagcaaagcgaagtgaaagtagaacaaatggctctagagattcatccgtgagaatgagcacaagccattgcaaattcgacaggttttgtacgtgactgaagaggctttaatacaatcatagtgtctaatgggacgagaagtaattaattggcaccatataccaatcccattatttctgtatcacgtgggaattatgattgcaagctattgctgcaaaaattagacgcatatgtgtaattatatggtgatatatattgagtaaatatttgatagaatatgattgggtaaacagacttaggttcttgaactagcccgtggggctcacagtccgcgcgggtaacagatcaatttttttaaacgatccatggttatgtcatatttttt

SEQ ID NO: 35249 - DNA, 1554 bp, Glycine max
  Clone ID: PAT_MRT3847_131832C.1
aacaatcacaacattcaagcgctgcatgaccaatctcctgacttcaggaactggttgagtgcaattatctcgtaccagcaatcatgcatggacggcttcaacaacgagaccaacggtgagcaggaaattaaggaacaactgcacacaggaagtttggaccaaatggggaagctcactggcatagtcctagacattgtcaccaacttatccaaaatccttcagagttttgacctcaagttggatttgaacccggcttctcgtcgtcttctcgagcttgatgctgaagggtaccctacgtggttctctgctgcagatcgcaggctacttgctaagatgaaccaaggaggtgcacccccacccaatgcagtggttgccctagatggtagtggtcaatttaaatccgttaagcaagctattgactcctaccctaagaatttcaaaggcagattcattatttatgttaaagctgggatttataacgagtatatcactatccctaagaagtcagagaatattttgatttatggagatggccctacaaaatccattattactggtaacaaaaactttatagatggcgtcaagacaatgcatactgccacctttgccaatactgcacctggctcgagcgcaaagtcaatcgcattcgagaacaccgctggcgcgaagaagcaccaggcagtggcattcagaaaccagggagacatgtcggccatgttcgactgcgccatgcacggttaccaagacacattgtacgtccacgcgaaccgtcaattctaccgcaactgcgaaatctccggcaccatagacttcatcttcggagcatctgcaaccttaattcagaactcaagagtcatagtaaggaagccagaagcaaaccaattcaacacagtgaccgcagatggaaccaagcagaagaacatggccacaggaattgtgctccagaactgcgagatcttgccggagcaggctctgttcccttcaaggttccaaacgaaatcgtacttggggaggccgtggaaggagttcgcgagaacagtggttatggaatcgaacattggcgacttcattcagccagaggggtggaccccttgggatgggaacctgtatcttgatacgttgtactatgctgagtatgctaacgttggacctggttctaacgttcaaggaagggtaaagtggaggggttaccatcccaatattaataagaacgaagctgcacaattcactgctggccaattcctcagaggtggaccttctggaaatgccgatgattggttgaaggctactggcgttccttataccattggtttcaccaaaccttgaattatctatcatcatgcatgatactgctgtagggttaatcttgggaacaagtttttttttttgtgcaaattaatgtgtctatagttatatatacgtagaataaattaattagctttgttttcagcacacttgttgtgattctacctccaagctagggtggaatcatatcatatcttgtacaaacatgagaaaactgtacagctaatatatgtggactttttataaaaa

SEQ ID NO: 35250 - DNA, 495 bp, Glycine max
  Clone ID: PAT_MRT3847_131833C.1
gggaacctgatcttgatacgttgtactatgctgagtatgctaacgttggacctggttctaacgttcaaggaagggtaaagtggaggggttaccatcccaatattggctcgagcgaagctgcacaattcactgctgcccaattcctcagaggtggacctgctggagatgctgatggttggttgaaggctactggcgttccttatactattggtttcaccaaatagggcatcatactgcagcctaatcttgggaagattttttttgttattttgtgtgcaaattaatgtgtctatgtagaataaataaattagctttgttttcagcacagttgttgtgattcttcttccaagctagggtggaatcatatcatatcttgtacaaattaaacatgagaaaactgtacagctaatacatgtgaaatttttatattgttttttgaaaaatgacctcataagtgtattatggggaatcaatatatggatattcatgcatctt

SEQ ID NO: 35251 - DNA, 269 bp, Glycine max
  Clone ID: PAT_MRT3847_131834C.1
ttggtttggactggatcgcacgatggctgaccgtgtaaggggaaccaaaagctgtggtgcctctatgctaagaatgatggaatgactaccaaacacgttgtgagcaagatggtaaaggtgagaaatagactctgtggggtggacacaaacattgtgcgtgaaaggacacaccacgctgaggcttgttgttgaagactggcaattttgaagaaagacgtttggagagatgaaagtggaatccgttctggatttacgctcacagttatttg

SEQ ID NO: 35252 - DNA, 266 bp, Glycine max
  unsure (1)..(266): unsure at all n locations
  Clone ID: PAT_MRT3847_131835C.1
gggggttgcggcctgctcccctcttgcttcttggggggggatcctccctgggcctccccctcgtgttgtccgcttggtggttctggctgggcctcgcttccctttcgtgccgagttgcctctgcccttggtcccntttgtggtttcgatggtggcgggagggggcacttttgcctgccttgccttgcagtggcgtttgactggggagggtccgtgtttgataatgtggcatttcgtccccggtccccgtgcgcctttccggcgctg

SEQ ID NO: 35253 - DNA, 304 bp, Glycine max
  Clone ID: PAT_MRT3847_131836C.1
ccctttttgtcgaaagaatgcctctttctatacggggaggagttggtgcaaagaatgctattctcatgaatatgccaaatgctgtgcttacaacgtggagataattgtgtagaaatctcgtatatgaagtctctaagatgacttctaagtacactaaatgcacagtctctttcaccatatctacgggcacgatggctgataacaccatcgatactgccatcttgacctgtagcttgataccgaggggggtagcaaaaggcaaaggttgtggcgaaaattttgcgataagcttagagatcagctt

SEQ ID NO: 35254 - DNA, 317 bp, Glycine max
  Clone ID: PAT_MRT3847_131837C.1
tttggcttactccgcgaccggccagacacaggggggggggcaaattcacaacacttgcggaaagctacacaacctatgctcatgaaagctcatgcttttacgaagtgcagcagggcgaccaacaggatggtcaggacccatatggaatatccgctcaatgaagacattaatgatgaataccgcaattatattggcgcaaaaggcactccagcgtctcatcgccagaaagatgcgcacttggagaaaatggcattatggcaaaaagcaataaagtgtggaatgggacactgtaggtctcggaaacgaaagcaaccatg

SEQ ID NO: 35255 - DNA, 192 bp, Glycine max
  Clone ID: PAT_MRT3847_131838C.1
gccctcggaacgcgaccccggtgcttgtatgatacttgcagagcttgctgagaaggctggcttccctccgggcgtcatcaacattgtacatggtgcggctaaaacggttgatttcatcatcgacgaacctcgcatcaaggcgattagcttcgtcggtagcaacaaggctggagagtacatctactcgcgcgc

SEQ ID NO: 35256 - DNA, 279 bp, Glycine max
  Clone ID: PAT_MRT3847_131839C.1
cggttgttcctgcgttcgttttttttttttttttttagcttaatcctttcactgggagcccggaaaactttcaaattaagggtcccggtatatttgggtttttttagccggaggaaggatattggggcaccccacctaatgacccccctaaagaaaacagagaaaaagacctccgtccaagggtaaaaaaaaaaatttttttttaaaaaaaatatgtttggctttgtttcctataacacctattattccaactaaaatgccccaaaggatgtggggaaa

SEQ ID NO: 35257 - DNA, 274 bp, Glycine max
  Clone ID: PAT_MRT3847_13183C.1
ataatcaactgtcaacaatcttccactataccttttaaacgtgcatcaaaaaataattttagtaatgttatacataaaaaggcttgaaagatatcaaatcctgaatagactacaacctctaaagcggatgaaatgtactcctatggatcagatcattacttcactgtaatattcaatgaaattattacaaaccataataaatctaacaaaaatacaaaatcaatttccatattatacattctaaacaaatatataaacttccattatacaaaac

SEQ ID NO: 35258 - DNA, 356 bp, Glycine max
  Clone ID: PAT_MRT3847_131840C.1
gatttggtgagaatgtcagcgagttgaacaaatgtagaaaatgaggcaaggtgataacttgatggtcttacgactcccagactgagtgacaatcaacctctatgtgcttcgttcttttatggtaaacaggatttgtggcaatttgaatggcacttgtattgtcaacatgcagtggagttggttttgcttgtgaaaaaccaagctttgaaaggagaccgtgtagccaaataatcttagagcatgtagcagacatggtatggtattctgttttagtggatgatttggagaccgagtcttgtttcttgcatttccaagagattggagcttcccctaagaacatacaccagcctatagtg

SEQ ID NO: 35259 - DNA, 261 bp, Glycine max
  Clone ID: PAT_MRT3847_131841C.1
gatggttttgcgctgttgttggggctcattctgcggaacctccgagctctgcaccgaataacgaatccatggggaagacatatggaatgggatctgctcgcaagctcaagtcccaccgcatgaggcataagtgggctgacatgtcatacaataaatcacatcttgtaaatgaatggaagaaaccttttgctggttcatcccattccaagggaattgtccttgaaaagataggttttgaggcttaacagcccaactctgcca

SEQ ID NO: 35260 - DNA, 374 bp, Glycine max
  unsure (1)..(374): unsure at all n locations
  Clone ID: PAT_MRT3847_131842C.1
cccggtcgaccacgcgtccgggtctgtttaaattacatctgccacatctgttgtcatccattatagatacctccaggattgtcaagatttttttaacatatgcctaagctcctaaggacacanattatcactttctgagctggacagaaatcattagagcggatttgtgtagcgtgcaaaataatatctttttcatgtctattaatgttactatacagtattcatttttcacttgatttaaccgctcttctgtttttagatattatttatattgtgtttcataatgtattttatgtcttattctatcatctttatccattttgggggggggggggggggggggggggttaatcttttttcttctttttttatta

SEQ ID NO: 35261 - DNA, 264 bp, Glycine max
  Clone ID: PAT_MRT3847_131843C.1
aaaatcgaactttgtatgatttatatcaagtgccgcgcatggggagtctggggattgttaaatctaaaataccaagcgctgtggtatgaataatgtaaacgtttcatggaacaagaggtagaaccagggcttttcaaaatagaccgccagctgcgtcgtattaaatagtttctatttgatcctcccaaatgccactcaggtcagcttgggggggggccttgatcaaacggttgtggctgattagactgattttgtgttgaactg

SEQ ID NO: 35262 - DNA, 551 bp, Glycine max
  Clone ID: PAT_MRT3847_131844C.1
cacacgctaaaccaagcttggaggttgagccaacttatagagatcaacttgtgggagaaggcttgcacggctgcacttctattgaagcctgaatcgtgctaatctgtcactgtgttaagcaaccacatatttagccatcgttatccaccctccataactatcgatcgcccacctgtcccaaagcccccttcctgaactcggcgagctggcccaaatacactattaattacgtggcgtatgcggaagagtaaatgaagattaatgtgcatcttgggaagccaccaaagaccccatgctgcaacctaattcagggtcttgctggtcttgacgctctagagagcctatgtactgctctcaaggctgctgtgttgggcatcaactctagtgttccagagaacttgagcttgctcgtaaactactgaggaaagggcggtcccaacggagtcgtctgctatttaatcagactctcataacgtgcacctttctactgctgtatttcgtcattcataggccattccgcgtatgcccgtcctatgagcccggcacgcgcc

SEQ ID NO: 35263 - DNA, 1468 bp, Glycine max
  Clone ID: PAT_MRT3847_131845C.1
atttctctctatctttctctctctcctcatttacctagctcgaatctcatctccaaaggcaacaaacaagagcaaaaagaagagaagaaaaaagaaaaccccttcatttcagcaacaaaactaatgcaacttgtactacaaaaatatttatactaacccactccttaccttgccgtctccaacaccctctcatatatatgtttttgcttattattcaacatcatcaacaaatcacacacacacacaaacacaaagtgatatatatctccggagagaagaagaaacaaagagattcatttttagttactattatttttattataaattaaataataataataacaatgccttcttctcttcagttggataggttcaatcctatcaccgacgccgtcaccaccgccaccgtcgccatcgccaacggcgttaactgcccgaagcagcctcaagcgccgccgtccactgcggcgcgtcgcctaatggtgccctctctctcttctggcaggggaatcgcggcctccgacacggtggcgctccaccacgcgaacgtggttgggctcaaccagtgctgctccgtggtgacgcagcacatcaacgcccccgtcgcagccgtgtgggcggtggtgcggcggttcgacaacccacaggggtacaagaacttcgtgaagagctgccacgtcatcaccggccacggcattcgcgtgggcgccgtccgcgaggtgcgggtggtgtcggggctccccgccgagatgagcacggagcggctggagatcctcgatgacgagcgccatgtcatcagtttcagcgtcgtcggcggcgaccaccgcctcaggaactaccggtcggtgacgacgctccacgccaacgggaacgggacacttgtcatcgagtcatacgtcgttgacgcaccacagggtaacactaaggaggaaacatgcgtgttcgtcgacacgatcgtacgttgtaacttgcagtcgctggctcagattgctgagaacagaaccaaaaactgtgaaaacactgcacaacactgttaactgttaagtgtttaacgatatcattatttcttctctatttctttttctttcttcttctttttttaaagttaaaatgggttgtgtcttccggtttttttgtttcaaattcgggtgtcatggacttagattcaagcccgtgtttggaattgatatgcatggatgtgtatagatcaatagggtttttcggacggcaatggttgaatctatgtgatatgtatatatgatatatgttaatgttaatgttcatataaatgatccaatgatgtagttctattttcttttttcattctacctagcaagctcttgatcgtggattgatggtgttctatttacccagaacttcgcatccgaggtggactttgattcttcttgttttgacttttgtgtatgttttccttcattcgcaacaccccgtaaataaaattatggat

SEQ ID NO: 35264 - DNA, 262 bp, Glycine max
  unsure (1)..(262): unsure at all n locations
  Clone ID: PAT_MRT3847_131846C.1
ttggnggnaccattctgcgnagtgntctattggcaaattttttgacagngggcaatttnngagcaagtgttgatttgcagcgcactcatcgtattaaaggaatgattaanatggtggccacagttggtattcctgagaatacaggtntanccattggcctgtgccnatgaataattctttnagggggcgcnccagntcctganatttanaccatcngnnccccaanaccnggaatnnngaanaccgggctgncnnnaaaaac

SEQ ID NO: 35265 - DNA, 125 bp, Glycine max
  unsure (1)..(125): unsure at all n locations
  Clone ID: PAT_MRT3847_131847C.1
gtcaagcgangncgtttgggtcctcttccacctcgncttnttctncnaatgccttccctccgtctgggccaactncggngatcctnnttcccgggtcaaatcgnccgtgactcaacgtananctg

SEQ ID NO: 35266 - DNA, 620 bp, Glycine max
  Clone ID: PAT_MRT3847_131848C.1
ttttgggttttttttttttttttttttttttttttttttttttttttttgggaagccaaaagacccccctttggtttattaaaattaaaaacaggtttagcaagaaaacagtagctggtttttgcctaccaaagatcctcaaaagaaacaaacaattcccactaaggggctggcctggcccaaaattaatcaaacaaccaaaacccattattaatgaattgggggcaccaactccagtcccacttttgggggcgaacttggtccactcggtatgaaaagccccggggggaacaaccctttaataagtgtgccccccaaacaagtccctttgggcctgaacaaggtttgccgggagccttgccctccgatgggtgtcaaaggaagcaggacttgcccacattcggggagtactaatcccagttgaaaccggcaaccccaaaaccctttttcacggaggctggctttgaaccatttccctggagaactccgggtccactatcaagctagccaaataaggggtcctctgataggcctttttgtttttggccaaaaacaccccccttatgaggcaccctcccttacaaatcctagccaattcccccaaattaaaaggcccccct

SEQ ID NO: 35267 - DNA, 185 bp, Glycine max
  Clone ID: PAT_MRT3847_131849C.1
aaggttttccttaactaatcccgagagaaatataacacttaacactctcttcacgacctgtgcacttcgataagggtcctacgaagcaaaccgttcgtacgttcaccggtctcaaagccccacctaagcagctcaccaccaagaccaatcgtgacttcgctctccactaccggaagactgaagaa

SEQ ID NO: 35268 - DNA, 199 bp, Glycine max
  Clone ID: PAT_MRT3847_13184C.1
tgcttaccccgcggaaatgattactgatggaatgcgataattttatgggcactctccgggacccaaagacatttgttatcctaccactctgtggaaagcgagacttaaccccccagatgcttatcctcccaactctgctcacttggcttctatcaacgagctctatcaccccaatgttgacgacatggacccatctatc

SEQ ID NO: 35269 - DNA, 331 bp, Glycine max
  Clone ID: PAT_MRT3847_131850C.1
aaaaaaaaaaaacctggttttttttaaaattttggggaggccttttagggtttttcaaattttggtttttcctaaaatttggatcccttgttttccccccttttggggttaaaaattaattccggacgggttttcccctagggggcctgggggtttttttggcctcgttttttggggcccttctcccccagggcggggttttattttttaagggcttcttttccccaaattttgttaaagggggggtcccggttttccttgcccaatttattttttccggtttggaagaggggggccccccttttttaatttgggctttgccccttcgttt

SEQ ID NO: 35270 - DNA, 299 bp, Glycine max
  Clone ID: PAT_MRT3847_131851C.1
ggctcgaggatcatggccactgtttctaggctaggggctaaacttctatctattctgctggatttgtgtgaagcatatatcattccttacctcgatgtagatgcccgctccttacgacctttctacgcgcctatgctcgtcgctctaaatgctatcgacttgacgtagaacgcctttggaggacatcctgggcatctcactgcatgacagcaagttgccaatgggagtgtgacaggctatcgcaccgacgagagtgtgacatcttctctgaggattcaagcttgtcagcttacatcata

SEQ ID NO: 35271 - DNA, 580 bp, Glycine max
  Clone ID: PAT_MRT3847_131852C.1
ggcccacccccaaaaaaaacccatatcaggggggattcccacaaaatctctgatcattaaaggaaaatagcccctataatcaagggaccccccatgagacagcccaagattaccccccaggacgggttattataacaaaaaacaatcgggaattcgcccaaaaaactaacaccctggaagcaaaagcggaggttttcgtggcccaaaaacacatggggttgggggcccggttctaaaggaaacggctaacgggcccaaaattggggggccatcctttgcaaagggatttttttatttagtcccttcagggacaaaagagccaacaagatctacttcgggggactcggggggctgtttgaaatcaagttgacggacggggggagcttaaatgggcggaccaacttgttcaaaattgagcccctcaagttttaaaggaggtttgggggggacaaaagggctttcaaggggcgggaattggggcttgtttttctcgaggaaaagggaggggggtgcaaaaccaaaatagcagaattctatttggggctatccccggacccctaatcctactttttccaaagga

SEQ ID NO: 35272 - DNA, 278 bp, Glycine max
  Clone ID: PAT_MRT3847_131853C.1
gtggcttcttttgaattttgggcaccaaccccccatggcaatgctttttggacaaaagtaaggtggtgggggaaccgaaaaagagttgatgttgaaaaaaaaattgtaattgccgaccagacccccctataaagaccctgggcaacctgagatacaaattggcgggggcagcccccagggagggatcacccttggtccccccgaaaaatgagtccctccccctgggggggaggctcaaccccgggaccccttctgctggcagaaactcgtgcatccct

SEQ ID NO: 35273 - DNA, 397 bp, Glycine max
  Clone ID: PAT_MRT3847_131854C.1
tagataaactaagtccttagacttagaataattatctgatagttacatgtgaacgagggagtgtctacatgaaacggcacatgtttgcaggactcattattatgtgggaagtggaggaaagccacatagggcaattaacatatcatctattattgcatatattaggaagctaaaaagagaaaatgcaagttccaaaaccaaactaagatttgtccctgatgcataatcatatcatcacggctctggcatgacgttgatagatatggccttccaaatatgggctaatgaaagtggagcgtcaccacacctcagaagctctctgaagattgggacagccataagcagttttcaataacaccccagcccgtgaaagcaaaatactttgttgttcctgcaa

SEQ ID NO: 35274 - DNA, 378 bp, Glycine max
  Clone ID: PAT_MRT3847_131855C.1
tggggacaagctgactctacatacttggggaacactgccggttgttccacaaatcacacattaataaataggctcccattttgagcgtgatttactcgggggctggggcattaagtgtgatgcagagtttcaatatccttgccatatgccttgagggccttctccatactcaagccacgttcatgttgtgacaatttttttaatggagccacgcgtagattctcgggaagttccttacaggacaaatagtaactttctcccctctgaacaacaatggttatgtcaaggatagaattaccaaaaggtcggacactggtgtttgcaacaaataaaagaatactttgaatctcatccagaaactttaccaaaaatcccctt

SEQ ID NO: 35275 - DNA, 752 bp, Glycine max
  Clone ID: PAT_MRT3847_131856C.1
cccacgcgtccgctcagctgtgtctgtttgcaatatataactctcacctttctaccattgctgtgcacctctttctccttttgtcaaattcttctgttcaacaggtctttgccaatggatactaagtcggctgtagaattaatggagtcttccgcagaggttcatttttctggatttcacatggatggttttgagcaaagaaaggctagcatagaacaaccaacaacctcagaaactgacatgtataaacaaccttttgtcataggtgttgctgggggtgcagcatctggcaagacaacagtttgtgatatgattattcagcagcttcatgatcaacgagttgtacttgttaatcaggattctttttacaataacttgacggaggaggaacttacaagagtacaagattacaactttgaccatcctgatgcttttgatactgagcaattgctacgcgttatggacaagttgaagcatggcgaagctgtagatattccaaagtatgattttaagagttacaagagtgatgacatgttaagaagggtgaacccttcagatgttataattttagaaggcatccttgttttccatgatccacgtgttcggggagttgatgaatatgaagatatttgttgacacagatgctgatgttcgtttggcaagaggattaggcgtgacactactgaaaagggtcgggatattggagcagtcctggatcagtattcaaatttgtgaagccagcttttgatgac

SEQ ID NO: 35276 - DNA, 406 bp, Glycine max
  unsure (1)..(406): unsure at all n locations
  Clone ID: PAT_MRT3847_131857C.1
ggaataagcctcgaatgcatctcgagggcagtgatacggcttcaacaactaaataatttctactcacactgactctttctattattactggattcnggggaacacatcatcttgcaaggcgtattntnctatctaaanctcttnaaataattctcacatctaaaccaatcacatcctaagaaagaacgaaattacgacttattgatactattgtgtcttctcaggagttactaaatccatctaaattttctgcacttgaaaatggagagaggttcaaaccttggattcattcactttataacacctacaaaattagttctctgtatcaatcacgttaactgttaaaaactccctttcaacaagtaaataagactcatacacatttgcctcatcaactggcttttgt

SEQ ID NO: 35277 - DNA, 601 bp, Glycine max
  Clone ID: PAT_MRT3847_131858C.1
ccacgcgtccggtgtgctcagctgtgtctgtttgcaataaataactctcacctttctaccattgctctgcacctctttctccttttgtcaaattcttctgttcaacaggtgtgtgctttggaatcagcatttggctatttggtctttgccaatggatgctaagtcggctgtagaattaatggagtcttcctcagaggttcatttttctggatttcacatggatggttttgagcaaagaaaggctagcatagaacaaccaacaacctcagaaactgacatgtataaacaaccttttgtcataggtgttgctgggggtgcagcatctggcaagacaacagtttgtgatatgattattcagcagcttcatgatcaacgagttgtacttgttaatcaggattctttttacaataacttgacggaggaggaacttacaagagtacaagattacaactttgaccatcctgatgcttttgatactaagcaattactacatgttatggacaagttgaagcatggcgaagcagtagatattccaaagtatgattttaagagttacaagagtgatgatgttttaagaagggtgaacccttcagatgttata

SEQ ID NO: 35278 - DNA, 334 bp, Glycine max
  Clone ID: PAT_MRT3847_131859C.1
tttattgtttatataatttattcttattttttttgttgtgaggagacatcaaggtctggaatttatacccttccacccactaatgattaggggaacagatttctccaatttatctcaggtggtcctaggtggacttatgaagtgatataaatagttattgccaaactagcttatgtgccatcctacataatgggtaatccacagaaactttgcctacaactataaactgtgagagggaaaaaatctttaggggatagtacaagaggaataccccgtttacaagaatgatgctattttaaggcctcatctggtgattacacaaattagcaggggc

SEQ ID NO: 35279 - DNA, 287 bp, Glycine max
  Clone ID: PAT_MRT3847_13185C.1
ttatgaggccacaaatgacatgtgaaaggaaattattggtccggctgccctagctaacaaatgacaaggactgtccaacgagaaactccaaatagtctgaattcaaacattgtttggacaggaattgcgtggagatcgtgttaacaacttaagcgttatcctgcttttttggggaatgggatttaaatcgcgactcaatgcttgagctttgatatgggcatgggagagaacccttttattgcttttgtagaggatatggatgaagacaggaagggacacatacagat

SEQ ID NO: 35280 - DNA, 334 bp, Glycine max
  Clone ID: PAT_MRT3847_131860C.1
gattcaaagctttgatgaaagacacacccatagggggttgagtttcctttgatggaccaaaaccttttttttttttcggacatttttcatttgggggaagaaaatatcaacctttaatcttaaaaaacaagatcttagtgagtgagcgatcattttttgtggtgcgattatcttcgactttattccagcgggtcccgccggccgggcgcaccgcgtgaccgccgacatcctgtggccgaatttgatgaagcggttctcgaagtcgctgctggacgatgatttcgaggcaaggttcaaagaattcgaggatgactcggaaatcgaggatgttcta

SEQ ID NO: 35281 - DNA, 1555 bp, Glycine max
  Clone ID: PAT_MRT3847_131861C.1
gagagaactagtctcgagttttcttttctttttttcttgtgtgtgcatgcagggattattttatttaaaaacaatttattttctgcttttgttcataagcatgatttaatgttagattgtaccattctcaaaattgctaagcttttctccatagttccaagtatgatggcacctacaactggtggcctggtgaactccattgtgggtttaatgcagagacaggttcaaggcaaatggagtggaaccacctaaaaggtcaggaaatttatggctctgtaagacaacatcagatggctcttctgaattcatagatcttgatatcttagtgagcaaactttcttgcaatgatatcgaggaacttcgatgtgcagtaggggagctccgacttcttgccaagcaaaatagtcaaaatcgaatgctgattgctgaagtgggtgctataccccaccttgttgatctcctctatgcacctgatgctggcacccaagagcatgtagttactgctctcctgaacttgtctatcaatgtggataataaagagcgcatcatggcttcagaggctgtgccaggcatccttcatgtgctagaaaatggtagtatggaagctcaggaaaatgcagcagccacctttttcagcctctctggggtggatgagaacagagtggcaattggtgcgtctggagcaatcccagcattagttactctattttgtgagggaagtcaaagagggaaggtggatgccgcaaaagcactattcaatctgtgtttatcccaagggaacaaaggacgagcaattagggctggtattgtccctaagttgatagaaatgctaacagaacctgatggggatatgagggatgaggcattgacaataatggctgtagtggctaaccattctgatggacaagcagcaattggatctatgaatgttgtatccactttggtggaattagtcagtaacggatctcctgggaacaaagagaatgcaacttcagtgttgcttctcctatgtaatggagaccctttttatttgtccattgtcagttcacttgggttggtcaatcctctcttggacctggcaggaaatggttcagaaagggccaagcggaaagcttcccagcttctagagttgataggaaaccattgagactatacttggaaaactgccagctagattttaggtgcatctgttgctattttatgttacagcagatggcaaagatagtgattgtagatgtgatttatacaataggttactataatataggatccccaatatttccttttcattttttagtttaaaggaaatttccattttactctaccaatcaatcatttagttgaattgaatcacttgtgctgtagagcttgtaggaagggttaaggtggctgttaaacacatagtagaaatacagatatttgtaatcagaagaaaaaattgtaaacttcttcatcccaaactcctactgacttaatggcattttgtttttttgaaatgaaatgtcttcaacaaaagtttaaaaaaaaaaaaaaaaaactcgagactagttctctc

SEQ ID NO: 35282 - DNA, 544 bp, Glycine max
  Clone ID: PAT_MRT3847_131862C.1
tgttgtggaggataaaaccacgcagggaaatgttgtagtagaaggatctggtctcgttgaagaaaatgttgaggatcccagtaagccaatctcacaaaatgcaaagcttagtgagtgggaagccagaaggtatggagcaatggctgcaaggattttaaaagatgtaaaaatatcctgattttgagagttgttggtctgggggatatattgtcatagcaaatacatcatgatagtcatatgcatatgcttcaagtatgttcggttcggtttaatttaccgaaactagaaattgttttttgttacattctgaaaagtaacaccccccacaaaaaatactaaacatgcactttcacctttacatgacccacttttctttatgacttgctggattccaatctctgtttaagtgtaggtgtatcaatgctgaagcattgaccttaagtttgcccgaactagaaaacatttgcatgatgcttggatgctgcaccatgtaatatggttattcttattatgcatgatacaagagatcttcagaacatttgtc

SEQ ID NO: 35283 - DNA, 701 bp, Glycine max
  Clone ID: PAT_MRT3847_131863C.1
aaaaacagaatgatataaaagtcgaaataaacttgtattaatagtttgggcatctctccccttctaatcattctctaggttgcacgttgcatttgacaatactctacctagtcattgatccatgtgtgagtgatcaggggtgcatggaccaaagctgggggaaagtggttggttgaaagggaaaaaaaaagtaaacttttgtgggaacttgaaactcctaccatgaaaaaatttgatgacttcttcttttcctctcttctcccttcttccttccttttttaataaacagagcctaaaagcctttttggtcccaccctccaaactgaggcacagacatcatagcaggtctttgctgcacaaggacaacaaattagttagtacttagtatcttcattcatattaatatatgtttggattgaagttaaaaatgttaggcacatttcaatgttaattcaacggataaaaataaaataaaaacaaaaataaggatctagtttttttcataaaattatttttatctcaaaaatatttttttacttgattttcaaacatgcttgctcattcttcgacttgaaaaatgctggtttaaagggagaatttagaacttccatcccgaacatatattggttaatacaccatgactaacgcacattaacaatttcaaaatatggattataaataatcattacgatttcattaaa

SEQ ID NO: 35284 - DNA, 419 bp, Glycine max
  Clone ID: PAT_MRT3847_131864C.1
ttgcggtgtgccgtcccttgttctttccgttgccttccaaaattccatcgtttgaagatgagctcaggccagagtactacagcgtatcctccaccgtcatctgcacctgctcaaccacctattggttatcccaccaaagaatctccacagtaccctcagaaatcagtggtggaaaccaagtccaagggtgatgggttctggaaaggatgttgtgctgcattgtgttgctgctgtgtcttggatgcatgtttctaaaggctgagagattgcatatacagaatgttttccttcccctttctattttatattattgtttttcgaataaattatgtatcgtttgaatgaataaggcaatactttattacttatttttcagtgttattcattatattttaggtagatccgtaatgtaattatat

SEQ ID NO: 35285 - DNA, 772 bp, Glycine max
  unsure (1)..(772): unsure at all n locations
  Clone ID: PAT_MRT3847_131865C.1
cttgcattgcctgcagtatatcatatacagtaaaaagaattcccatctagaaacaatttatcatattatgctaatctcaagtcatcatttttacgtattggtagtattgataattaagtcttcaattatgaaagtatacaaacaggtatttcatgaattgaacggataattttaagttttaacttttaagtattagagatatatacaaaaaatatacattaaaaaaacatcaagagaatgttagttttactgattaaaatataaaattcaaacatttaaattttttagttttttttttttaaaatacaaagatatagtttagttaatagaagactatttaactagtgatttgaaaattcccttatgcctaatgttaattgaataaatttaatcattgattaaataaaacaaggaaaataaaagtctcctttgaatgaataattaactgacaagaaaataatattggttgtgtttgatatataaacccagaaaacttgtaatgagggttatcctactctcaagaaggaagattatagtttgtcatataggggtgattgcatgttactcaaacacttcagcgaaggaaaagacaggataacgatcaaaccagatgtaagtttcttatgtaattactccgaattctctccactgccatcttagcaacaagttaacaagtaataaaattttatgaggcattttaacttangagaggttctaaattactggatccttgtgaatcctatttaatataaaggctgtccaatagcacata

SEQ ID NO: 35286 - DNA, 475 bp, Glycine max
  unsure (1)..(475): unsure at all n locations
  Clone ID: PAT_MRT3847_131866C.1
tcccgggtcgacccagcgttttgttttaanatcttgagaaaaataatttacagaaatacgtgaaaaaatttatanttgaaataattaaagataaaagtcacttagtttgcatataaaacgacattttcagcacaaatgttacaaatgtgtcatttacaaaacaacagtaacaaaagaaaaaaaaacaaacaaacaggctgatctaatcactttgcagcttgtatttataatgacctctcatatttgagtataactaattttaaaagaatattcaaaagtgatccagcaatgcatatacattttcaccccttttggtttcaccttgaattccatcataatcaaaagaagttatagactaaatattttaaaataaggtcaagagctacaaaaatttaaaataaaaatagacgttaacaaaattttaattccttgaatgagtttatctgactttattaaagttattcgaaattcataa

SEQ ID NO: 35287 - DNA, 168 bp, Glycine max
  Clone ID: PAT_MRT3847_131867C.1
gaagctgactgagaaagtctgagacttttagagcaactgggtggtctgggcgcaaaccactctttagttggggagatagtctgtattctgcaccttgcaagatgtctcacgcagttatcaacgaatatgaagtgcacattgttattggcgcaccgctctgtgatctta

SEQ ID NO: 35288 - DNA, 1964 bp, Glycine max
  Clone ID: PAT_MRT3847_131868C.1
gtagggactggacccgctggggtacggtgcgttgcaggcagtgtcatctctcctttgacgacacggaggtaggatccgatgcaggcagcaataacatagcatagagtgagaagtgagaagagaaaaatggcaatctccatacccagtagacaacttttcatagatggagagtggaaagtccctcttctcaacaaccggtttccgatcatcaaccccgctactgaagacatcatagggcatattccagccgctactaaggaagatgttgaccttgcggtggatgctgctaaaagagccttttcccataacaaaggcaaagattggtcttcagctcctggctctgttcgtgctcgctatcttcgagccatcgcttcaaagataacagagaaaaaggatgaactaggaaagcttgaagcaattgattgtggaaaaccactagatgaagcactggcagacctggatgatgttattggttgttttaactactatgccgagcttgcagaaggattggacgcaaagcaaaatgctcctgtatcccttcctatggaaaccttcaagagttatgttctcaaggagcccatcggagttgttgcattaattactccatggaactatcctctattgatggctacatggaaagttgctcctgctctagctgctggttgtacagcaatattgaagccatctgaattggcatctgtgacctgtttggagctggctgaaatatgcagagaagttggccttcctccaggggtattaaacattgttactggattaggcaatgaagctggtgctcctttgtcatctcatcctgacgtagacaagatttcctttactggaagctctgcaactggaagcaggattatgacagctgcagcacagctaacgaagcctgtttctctagagcttggtggaaaaagcccaatcattgtttttgaggatgttgaccttgataagactgctgaatggaccatctttggctgcttctttacaaatggtcagatatgcagtgcaacatctcgccttattgtgcatgaaagtatagcaacagaatttgtgaatagaattgtgaaatgggccaaaaacatcaaaatttcagatccctttgaagaaggttgtaggctaggtcctattgttagtgaaggacagtataaaaaagtgttgaagtgtatctcaactgctaagagtgagggtgcaacaattttgattggagggtctcgcccagagcatttgaaaaaggggtactttgttgaaccaactatcataactgatgtaactacctcgatgcaaatttggagagaagaagtatttggacctgtgctatgtgtgaaaacattaagaacagatgaagaagctattgaactagcaaatgacacagactatggcttcggctctgctgtaatttcaaaagatctagaaagatgagagcgcatggctaaggcttttaaggctggaattgtatggattaattgccctcaaccatgcttcactcaagccccatggggaggcattaaacgtagtggttttggtcgtgaattaggagaatggggacttgataattacttgagtgtgaagcaagtgacccaatacatatctgatgaaccgtggggctggtaccagtctccttcaaggctgtgataggtatccaaaagctaacattaataagttgtgggtaatatcaaattacgattatgaccccaaagtcgagaagacatgatgtctatgtataacattgaaatggtttgcactttgcagtcaagattatgttggtagtgtttttatttgatttgtttatggttggctccaccacatgcttctaatgtttgaatttcatcatggaagacttccatcattacattatattgaagcatttcttgcgcttaaaaaacgaatcatgcataaatagatctctcgtgacttggtctctctctctcaaaaaaaaaaaaaaaaaaaaaaaaaaaaaa

SEQ ID NO: 35289 - DNA, 393 bp, Glycine max
  Clone ID: PAT_MRT3847_131869C.1
aatgaacttgcgcttctggaagcatgccccttcaatttttaggggcattttttcttttttcacttgccaaatattgggttcaaggtgaaaaaagtttatacagttggtaaggttattggtttgttagaagagtccagaagaagtctgtattcttgtactgtaattgtaaggtcgactatgaataaattgttaataaagggtattcattacccaccttcttttctttactgaaaaaaaaaaaaaaaaaaaaaaaaaaaaaaaaaaaaaaaaaaaaaaaaaaagaaaagaaaaataaaaatgatgaaaaaatagaaaaagcatcaaatgcgcccacctaggagaatacggagctagaactatatgtcacatatttaccaacaagggggggcctgt

SEQ ID NO: 35290 - DNA, 541 bp, Glycine max
  unsure (1)..(541): unsure at all n locations
  Clone ID: PAT_MRT3847_13186C.1
tttcttttttttttttttttttttttttttttttttttttttttttttttttttttttttttttttaaaaaggggggaaaaaaaaaaggggcaaaaatgggggagaaaaaaggggggcaacttggaagggccccaacggggcccaggaagggaaggggcggacacaaccccttttactntggtagaaccaaaaccctaaatttgatgaattgcggggggggaaaaaaaaaaccccccccccaatccccaaaacatggccgaaaattcacccccagcccaaccatatttaaacgggaggaaaatccaaggaaggaagggggaaccttattaattaggggaaaaaccccgcaccctttccagccccaggaaaggggggcaaatttaggggcaaccccaaaggaggggcctttcctcccgggttaagggccccgaaagaagacaacacctccttgaacttggccccagcggccacgggaacaattccacaaacagggggctatattacccggggccggaacaggaagaaacccccgggcccggg

SEQ ID NO: 35291 - DNA, 467 bp, Glycine max
  Clone ID: PAT_MRT3847_131870C.1
cggacgcttgggcggacgcgtgggcggacgcgtgggcggacgcgtgggcggacgcgtgggcaataacatagcatagagtgagaagtgagaagagaaaaatggcaatctccatacccagtagacaacttttcatagatggagagtggaaagtccctcttctcaacaatcggtttccgatcatcaaccccgctactgaagacatcatagggcatattccagccgctactaaggaagatgttgaccttgcggtggatgctgctaaaagagccttttcccataacaaaggcaaagattggtcttcagctcctggctctgttcgtgctcgctatcttcgagccatcgcttcaaagataacagagaaaaaggatgaactaggaaagcttgaagcaattgattgtggaaaaccactagatgaagcactggcagacctggatgatgttattggtttgtttaactactatgccgag

SEQ ID NO: 35292 - DNA, 379 bp, Glycine max
  Clone ID: PAT_MRT3847_131871C.1
atgaaccacagcatgaaacttgttatgatataaagggcagtatgcatagaacgtgcttattatgcctttcctaatgaatcaaaagaaatttgcatctttccgggaaagctgacgttagtagcaccacatgcagagtctttttgtccaaagtcaaatgcaacttatgaattcgcgccaaagaacttaaacctttgtgagaaacttcatgacgtaagccttgaaagcacagcacacgactcggaaaccttggaatccacagcctttggccacagccataaacactgtctctgtgatatctttaccaccaggattatgtgccaacatgatcacatggatgtgaaccacaccttttgtggaccagctacagtctggagccact

SEQ ID NO: 35293 - DNA, 1323 bp, Glycine max
  Clone ID: PAT_MRT3847_131872C.1
ccacgcgtccggattaggcaatgaagctggtgctcctttgtcatctcatcctgacgtagacaagatttcctttactggaagctctgcaactggaagcaggattaaattcggctcagcttcttgttggcagcctgtttctctagagcttggtggaaaaagcccaatcattgtttttgaggatgttgaccttgataagagtaagtgccttttattttgttatggacaacctatgttttcttgcattgaggaatcatatttcccatgaaactgattgagtggttgtcgatgagtaaaatttgggtacctagaacctattactgaaaccaaaatccaaatagacagtcatataccatttaacatttattttgctattttccttgatttaaacagctgctgaatggaccatctttggctgcttctttacaaatggtcagatatgcagtgcaacatctcgccttattgtgcatgaaagtatagcaacagaatttgtgaatagacttgtgcaatgggccaaaaacatcaaaatttcagatccctttgaagaaggttgtaggctaggtcctattgttagtgaaggacagtataaaaaagtgttgaattgtatctcaactgctaagagtgagggtgcaacaattttgattggagggtctcgcccagagcatttgaaaaaggggtactttgttgaaccaaccatcataactgatgtgactacctcgatgcaaatttggagagaagaagtttttggacctgtgctatgtgtgaaaacattcagtaccgaagaagaagctattgaactagcaaatgacacacactacggcttagggtctgctgtaatgtcaaaagatctagaaagatgcgagcgcatatcaaaggctattcaggctggaattgtatggataaattgtgctcaaccaagcttcattcaagctccatggggaggcgttaaacgtagtggttttggtcgtgaactaggagaatggggactcgagaactatttaagtgtgaagcaagtgaccaagtacatatctgatgaaccgtggggctggtatcagtcgccttcaaagctgtgatatgaattgctgttctaaaatctggcatgaataagttgtgggggacattaatttgtgatgatgatcttaattcgagaaaataatgtgcatatgtataacactgaaattgttccatggccttgttaatgacgggctgagttgattttatcttatttgtgatgatgatcttcacgttagaacatttttttaaaaaaaaaaaaaaaaatgtgatttcttcagaggactaaagagccggccgctgtacaggacccca

SEQ ID NO: 35294 - DNA, 674 bp, Glycine max
  Clone ID: PAT_MRT3847_131873C.1
ggacaacctgcgacagttaaagttgctgcaaaccttgtccggcttctcgcatataacaataagaatttcttacagaccgggttaattgttggtggttgggataaatatgagggtgcaaccattttgactggtgggtctcgcccagagcatctaaagaagggattctttgttgaaccaactgtcataactgatgtaactacctccatgcaatttttgagagaagaagtatttggaccagttctctgtgtaaaaacatttagcactgaggaagaagctattgatctagcaaatgacactgtatatggcttgggttctgctgtaatatcaaatgatctagaaagatgtgagcgcattactaaggcttttaaggctggaattgtgtggattaattgctctcaaccatgcttcactcaagccccatggggaggcattaaacgcagtggttttggtcgtgaattaggagaatggggacttgataattacttgagtgtgaagcaagtgacccaatatatctctgatgaaccgtggggctggtaccagtctccttcaaggctgtgataggtatccaaaagctaacattaataagttgtgggtaatatcaaattatgattatgaccccaaagtcgagaagacatgatgtctatgtataacattgaaatgggttgcactttgca

SEQ ID NO: 35295 - DNA, 219 bp, Glycine max
  Clone ID: PAT_MRT3847_131874C.1
aacggccaaaaaagatctcattactggggtaacaactgtaccagtaccggggtttcatgaaatcattgcatgcccgtttacaacaaaaacagttctggtgcgtttcacatcaaacacaccactgaacgggacccttaaccccgcgcgcgaaccactttttattcttcggggatgagtatagatctttgtctctctatttgcaagattttacaaaatatt

SEQ ID NO: 35296 - DNA, 107 bp, Glycine max
  Clone ID: PAT_MRT3847_131875C.1
ttacgtctttttaatttaacggagggcacacggaaacagtctctttgtattcaaccctacttttccttttccgtcatatcgattgaataattatgatccaatatatg

SEQ ID NO: 35297 - DNA, 455 bp, Glycine max
  Clone ID: PAT_MRT3847_131876C.1
ggtgatttttctgtttttagtccttttttcttggattatgatggtttgtgtataaaactttatctttctgggattttttttcctattctatttttattattgcagattatataaattattagtgaacaaaattattttaaaatttcttctattttaatgattgtgttactcaatcgacttggatgggcatttgaagaaatttctttttatcatttttctcactcaaagacgtgatataagaacaaaatagtgtgaggaaagttacaagtgatgttgctttttctgataataatgaaatatctttgagatttgatattgtgtatgcatgtacattgatcaagagttatgatggaataaaataaatattttacctagacttagcttttgacggtgaggagaaaattttgaaagctggtgtgacttacttttcatttttaataccttgtgtttcatac

SEQ ID NO: 35298 - DNA, 331 bp, Glycine max
  Clone ID: PAT_MRT3847_131877C.1
ctctttatgcccccactctctcgtacgcgttcattctgcgttcgaaactgtcgaaatcgggacggagccaatggccaccgatcggtggaccacacttcacagactgcgtgagaggctcgatgaaacccttactgccaacaggaatgaaatcttggcccttctgtcaaggatcgaacccaaaggcaagggcatactgcaacaccaccaagtcattgatgattttgagcgaaatgcctcacgagaacagacagaagcttactgatggtgcctttggagaagtcttgcaatctacacatgaagccatacttttgccaccatgggtcgcttttgc

SEQ ID NO: 35299 - DNA, 436 bp, Glycine max
  Clone ID: PAT_MRT3847_131878C.1
ggcttgaagggccgtcaaccaacccttccggttgcattagtcagaattttccagagaaacagaaaaaataagattcgcgtgtgtgtgtgcaaacatatatataaataaataaaaatatatttattttaaggaattgactcacatgattttgaaggcaggcaagcccaaagtctgcaaggggtgggccagcagagagctggtgctacagtgcaggtctgaaagttgccagagtcccttttatagagaagcttaaaaaatatttgttgaattaaatgtcttaggtagagacaaattgaattaaagtggttaagtaaatactcttaggtgaaatttgtgcaaattatgagtataaagagggtgagctacagaactctccatgaccactcaagaatgggacccaaaggcaaatgataacttattcattcatcaagggata

SEQ ID NO: 35300 - DNA, 190 bp, Glycine max
  Clone ID: PAT_MRT3847_131879C.1
tttttgtttaaattaaatactcgttgacagggacaacaatccacctgcaagaatcgttacttgcggcaacatgctactgtgcacaagtgcaagaagtcctccacccgtccctaccggatccacaaaaatttattcccacgattgcccaaaaagcccacgcctcttatattctcccctaccgaaatattaa

SEQ ID NO: 35301 - DNA, 352 bp, Glycine max
  Clone ID: PAT_MRT3847_13187C.1
atctttccttgacaccacttttttaaaaaatactctcttgtccatagactggcagtcagcattacctgggtctcaaaggtctcaatttgcataagaacccaacccagatggaagttacgccggtatgtgtcctcgccattctaatttgtcaccccatttgtccatgttgtatttcctccacatagaagtgtcatattcctttggctctcacgttctgatatgacattgtaacttgcacattatttatctctacttctgtatcatagactgctcagtgtcctttccttagttcgcattttatctccgatgtagtagaacttttgggccaccttcagtcatagtcctcttttat

SEQ ID NO: 35302 - DNA, 299 bp, Glycine max
  Clone ID: PAT_MRT3847_131880C.1
gtgaatgtgaggattcctttagaaagtggctgccatgaaaaaacacacttaagacaatcgcccaacagcgtgaatgaagttattaaaataccctgataacagagccgattatatagcacaatgggctacaaggtctaggaactagccgaccatatttgcttgtccaccctacataggttaacaagacgttgatgagggtcaattggtgaagtaagtacgaggtgagaagaggcgacgaggcgagaacattgccttgttccgtggtgaaccgcgggcgtgggtgggggtgtggtgggggg

SEQ ID NO: 35303 - DNA, 254 bp, Glycine max
  Clone ID: PAT_MRT3847_131881C.1
aatggcacatgggaatcggtcattcagcaacttgaagctatatgagaccactggaaagacgatcacttggaatgctgacgtgttagatagtcctgaagagccctttgttgtggaaaacgttcttgttcagcctccatcatagtaatgagaggtgtcgatagcatggatctctttacacattgcacgttgtcacatgaatattatcgcatggtcaagcctcaactaagctcaacgtgcatatcctcggatttttg

SEQ ID NO: 35304 - DNA, 246 bp, Glycine max
  Clone ID: PAT_MRT3847_131882C.1
cagctgaaaataaacggtgtatagtggatcacctatggagtggtccatcggagcaatggccatttttaattagatgattaccactttatgggtcaattttgagagtaaccttttctttttctttttcaattggtaaatcatactagatgaagttaaaatccgaagttttaattcatcagtaattattcatataaaaacctttgaaataccatttcctttgggacttcaaattctctttcacgggaa

SEQ ID NO: 35305 - DNA, 363 bp, Glycine max
  Clone ID: PAT_MRT3847_131883C.1
tcgtacactctgcggcgctttttttaagtataaatgttatttgtggaaattacattattttggtaagtttaaaactagatgatttttggattctcataacataaagtacgttttacaataactgcctatatcacttcctctatctttagggttttttcctttcacttttattttttaatttttaagtaaataacttttctaaaattactaaccaaacaaacaagattatgggaatagtatatatttaatttacatgaacgtgattcccaaaatacaattttatatcatgaaataagtgtcacctttattccttcagtcatattctgccccttttttataaaaaaattattgaacaatacattt

SEQ ID NO: 35306 - DNA, 665 bp, Glycine max
  unsure (1)..(665): unsure at all n locations
  Clone ID: PAT_MRT3847_131884C.1
cggccgctcgagccggcctggccggaaatacactacaatgcgcgctcacctttctccttcaggatncaccctccgataatcataaaaatgttccgcaacggatcttccatcctcgcccgctccgcccgcgccatcaaggtcacccagaccgcccgcgccctctccatccttgccgcccccaaggccctccccgctcgctccacctttgccctcggaaacgctggctccatcaggaccctcaagaccctcgatttcggaggctccaaggaggatgtcgttgagaggactgattaccccaaggaaaagctcgcccagatcttcgccaaggataccatggccgtcatcggttacggtgtgcagggtcgcgctcagtccctcaacatgaaggacaatggtctcaatgttattgttggagtgagggaggacggagagagctggaagctcgcccagcaggacggatgggttccaggaaagaacctcttccccattgccaaggccgctgagaagggttcagtcatcatgtacctcctctccgacgccgcccagaagtcaagctggaacgaggtgaagccctacgtgaccaagggaaagaccctctacttctcccacggattctccgtcgtctacaaggagaggaccggtgtcgttccccccaaggatgttga

SEQ ID NO: 35307 - DNA, 342 bp, Glycine max
  Clone ID: PAT_MRT3847_131885C.1
cgcgggtgagaatatcacccaccggttccacacgatgtcttttcatacttctgggttattcgggtttcctaaggatgatgtggccatcgtgagtcttacgttgtttgtctttgatcagtgattgaatcactgtacgctacttgtcttacttatttactagctagaaattagaatgctggatagtctcttctccactctgctttttctattctgttttttttttcttttccatttcctagatttccaaaattgtcttatggaaccaagccataaatattggattagtaatttgaaaggatatacaacaaccatccaatgaattattctaaattaatattcttt

SEQ ID NO: 35308 - DNA, 430 bp, Glycine max
  Clone ID: PAT_MRT3847_131886C.1
tcgcctatgcgtccgaaaagaacttcaaatggacagggttaaattaaaatgcgctgctgttgattagacatcaagtttcgctacacctacatagagggaatggggacagcaaaaaggaagctgaatttgctgtggagcattaggcaaggatgtcttacatagttgataatatttatcagtcccaccagaaagattctttggagggaaacttcaactttgacttataatagccctataacctggaataagtctgcactagaaatgactactagatggaggaaagacctttgaacatgacacaatcggagctggttcacattcatcataagagtctcctgaatagggagatcgcgcgaaacccttttagtatgaggacacattgagacaatgatagaattaccatacaacgatgtttatgcacatatggaaa

SEQ ID NO: 35309 - DNA, 315 bp, Glycine max
  unsure (1)..(315): unsure at all n locations
  Clone ID: PAT_MRT3847_131887C.1
aagaacaagcaaanatngctttagggagcgttggtagaaagaaatatcttacggagacacctctttgaacaccatatgaccagaattatccacattaaacaggcgtccaacaaattcatttcaattttgggctcgatttttgtgagacaaggaggaacctaggacacttgtaattccagaatccttcccaacaacaatggtggataaatgttccatataaggaaggtgaatattcttgaggataatccaaaataactgcccttttaagggctggtatggtctcttcaactgggttccgggctataaattaaaaac

SEQ ID NO: 35310 - DNA, 249 bp, Glycine max
  Clone ID: PAT_MRT3847_131888C.1
gtgatcagggaaatgacgtggagtcaactaatatactggaattcattgaccaatgtacaaacacaatgcagctaaagcaaatacatgctcacatgctccgcacatcccgcttttgtgatccatatactccagcaaattgctgactgcttatgctatctcatcatgctcttgcctcatatatgctaaaaatgtgtttaatcaaatcccgcaaccaaatctctattgttggaacacccttattcgtggata

SEQ ID NO: 35311 - DNA, 364 bp, Glycine max
  Clone ID: PAT_MRT3847_131889C.1
tttttttttttttaagtttttttttttttttttttttttttgagggaccaaaaccatttttttggaaaattttagggccaaaaatttttttgaatcaaatacatgtttggctataagcctagaaaacaatccaaatacactttttccttcaaaggttaaatatttttactgggaatgttagccctattacattgtgaatgctaaattcttttacttaaacaaaatttttttccataagggatacctgtggtttaaactttaaaccaaatgttatttatgaaacaacttttttttttggaaagaagttaccatttttaggcataaaaaaactggccccaatgttgaaaattttattttgtttaag

SEQ ID NO: 35312 - DNA, 560 bp, Glycine max
  Clone ID: PAT_MRT3847_13188C.1
tttttttttttttttttttttttttttttttttttttttttttttttttttttttttttttttttttttaacaaaaaaaaaaaccaagggccccttaaaaataaaacaaaaacttggacaacaaaaattctcccaaaaaaattaaccaaaggggacagggaaaaacccgaccggccaggggcccacgaaaaaaaaccccccctcttaccttggggggggcaaacccccaaaaccttgggccttggcaggagggaaaatcccaaaacaaggggccctttagccccccttaacccttaggccaaaaaaggctatcaccccttgaaagggggaatggcttcttcaaaaaaaaattaaaccaaaggggggggcaaaattaattggccaaacaaaaaaggaaaaaacccttcttcccaaccctaaaagggccccaatgggttttacaagggggggacaaaatttgtttatccaagcccaatcttaaagcaaaggggaacaaaaaacaaccttggggctttacgggggcccattacaggaattattttgcccggaaccccctttgg

SEQ ID NO: 35313 - DNA, 197 bp, Glycine max
  Clone ID: PAT_MRT3847_131890C.1
cccccgcgggaaggaattgccgggcactttgatgaaccctgggttttccgtcaggaatggcgaatattctgtcgaaaaatatcaaaatgaattgtttaaatggagaaagttacctatgcaccaacaattgcacggccttagtgccaacaaaaaacttaaaacaattcttttttccgctaccaatgaaattgcttccc

SEQ ID NO: 35314 - DNA, 560 bp, Glycine max
  Clone ID: PAT_MRT3847_131891C.1
ataacaccatgagatgtccgttagaactaaagggcgcccatccatgtaaacaaataatgaaaccatgcacgcaaaatacaaggtgccataagctagaaccagttaggcacctgacactcatacagtgcccctcaaagcaattccataacaacccaacatgataataccggtcaggggctggaggacacataacacatacgcgagccctaggccggcgccggaacacgcggacacagacacggtggacaacactagctacgaatgttgtaagcactcatctcttctgaggggctctcctaatcttcatactcatggggataagtcatcagaaggctgcatctggggtatgcgctgtggctaagacacaccagtaatatgaacatggtgtcagctgcgaggaactccatttcatccatacctaggacggcgaggccaagccagaaggatcttcttggggcacatagcccgacaattggttgctcaccctaatgaacattcgttgcctacaggcagaccagccaatgatagatggagccatattaaacccaggtggagggatg

SEQ ID NO: 35315 - DNA, 482 bp, Glycine max
  Clone ID: PAT_MRT3847_131892C.1
gtagctaaattaattggctgtagcattgaagatctcaagttgacactatcaactcgcaaaatgaaagttggtaatgataatattgtccaaaagttgatgctatcacaggtaaaatgaccactctgttactagaaatgttggcctgaaattatggatggaaaaaatgcaactttctagttacttgaaatattgggaaaatgaaggtgtactgcattcctcagtgcatatggcaatttgtttagtttgttatttgaagaaaaaggaaatgaaaagaaggttgttggtgatgaacatcatcttgttttatttttcttgttgggagttctattcagcatttaaatatgaacaattcatgcatacatggggccattagtcttgatataatgaaacccattggatacttcaaacgcatatcatgtttagggtcttggtattgctactgtgcattttcaccacatgtaagatagtgatttcattctaaa

SEQ ID NO: 35316 - DNA, 154 bp, Glycine max
  Clone ID: PAT_MRT3847_131893C.1
gcagattttatgcacggataatgtgttgtgatctttacaaattgcactcttgggctgaagggttcgtcgagtttgaggcaggcatgtattatcatagtacaagtgaggctgacaatgcatactatccatcatcatgggtgggtccagcatatgg

SEQ ID NO: 35317 - DNA, 319 bp, Glycine max
  Clone ID: PAT_MRT3847_131894C.1
gaccgctttagaagacacagaagggtactgttgcaatagactacgatgtcaaaaaggaatacaaataagtaaaggcggccgtttatatatccagcttacttacctttctgcaattattctcttttatagtgcacctaaatcaattaactgccacgtatatactcgaattgtataaccctgtgttctatattctagatgactttatacatttcccagctcatttatttttaagctttttaggaagcttaccaattgcttatgatattcatacttacatgtatatatcagttcatttgttctactggttatatcattctct

SEQ ID NO: 35318 - DNA, 754 bp, Glycine max
  Clone ID: PAT_MRT3847_131895C.1
cttctctcgtccgcttttttgctctctctagttcttcattttctccaccaagccattatgaacatcaataacgtgttatagcaatagctatattgaaagtaagagaaactaacctccaagcttgtcatattttttattcttttttttttttttggtggtggttttttgtgttccgatgggaaacggcatagggaagctaacggtgtgcttcaccggaaacggaggagggggtcgtcgaaagcaggatatatctattttaataacggagccgttagacgagggtttgggtcactctttctgctatgttagacccgacccgacccggatttcttcgtcgaaggtccactcggaggaaacgacgacgttcagaacaatctcgggcgcgtcggtgagcgcaaacacgtcgacgccgttatcgacggcgtttgtggatttgtactcgtacggttgcatcgacagagccgcggcgtttgagagttcaacgtcgttcgcggcgttaccacttcagccgattccgaggaccctcgtgaactcgggcccgttctcggggaacctgaacggcggtgggtttcccggctcgggcccactggagagagggttcatgtcgggcccaatcgagcgcgggttcatgtccgggcccatcgatcgcgggctttttttcgggcccgattgagagggaagggaacggaatcggaaacggatcggatcattttcagagaagcttctcgcacggagggttgggtttggggttggg

SEQ ID NO: 35319 - DNA, 490 bp, Glycine max
  Clone ID: PAT_MRT3847_131896C.1
gctcctctctctctctcttgctctctctagttcttcattttctccaccaagccataatgaataataataaagtgttatagcaatacctattgaaattgaaagtagcaacaagcaagagaaaacaaacctcaaagcttgtcatatatattttttttttgtttggtggtggtttttgtgttccgatgggaaacggcatagggaagctaacggtgtgcttcaccggaaacggtggagggggtcgtcggaagcaggatatatcctttttaataacggagccgttagacgagggcttgggtcactctttctgttacgttcgacccgacccgacccggatttcgtcgtcgaaggtgcactcggaggaaacgacgacgttcagaacaatctcgggcgcgtcggtgagtgcgaacacgtcaacgccgttatcgacggcgtttgtggatttgtactcgtacagttgcatcgacagagcccgggcgtttgagagttcaac

SEQ ID NO: 35320 - DNA, 194 bp, Glycine max
  Clone ID: PAT_MRT3847_131897C.1
acaaggaatcgctgcgtagccattttaattgtctgatcgacaagggcccatgcgatgaatatagcttggccatcagaagccacatggctgaaatgttagaagatggatgcgacaaatgcgacatggaacagaagcacgtctcccacttcttcatctcgaccctgaggaacgacttcccggacctgtacgaggcg

SEQ ID NO: 35321 - DNA, 424 bp, Glycine max
  Clone ID: PAT_MRT3847_131898C.1
gattcaaccacacaggcagggaagctctcggatagtatctttattaacaaggtagaaagtattcgtgtctaatgtaaagagtgtaactttgttcttgtttgtactttaaatgatatagcttgttcagttcactaaaactagaatgaagatgttattatcaactaatatttttactgtccatgaaggattgttgccttaataaattgtaaggttggttctcttgctactagcctagatctgtttcattttgagtttgctgtaatagtatatattgccttaaacaaggacaaaataagcacacatttttaggctttttttttccctggttatatgatggacatttactacctctttttgtctattgatcatatttctagaatcatcatcacgtttcacaccacattttattttcattatttgcttc

SEQ ID NO: 35322 - DNA, 408 bp, Glycine max
  Clone ID: PAT_MRT3847_131899C.1
ctccggggggtttagcacccccgccaaaaaggttcttttttttggggaaaaaacggggggggggggggcacctcttggaaacccaggggcaaagcccaaaatggttccctccccaatgggcacccccccagaattgggcccctctaaaattggcccaaaacaaaatttcccctgcaaaggggcccatttttttgggaacccccgccccccggggaaaaaaaaaaaaaaaacccccccgggggggaaccccaaagttggtatggggccccccccccccattagagggggggcggggggtgcggaatttttaaaacaccttcgttccctctgtgaaaaccccccccgcaaccggtggaaaccaaggggagaaccccccccccccccaacccaagaacctttttttgggtt

SEQ ID NO: 35323 - DNA, 896 bp, Glycine max
  unsure (1)..(896): unsure at all n locations
  Clone ID: PAT_MRT3847_13189C.1
tcggaaattcggcctcgagatgatcccacgcgtccgtacggctgcgaaagacgacggaagctgcacagtggagtaaaaaaaaactgtgtaagaaattagaaagggcgaacggcgcactttatctgaaagcgagactcctggggtcaaccgtgacgccacaatcgctcttgcgcgtttcaatcgccttcgacttctttgcaacgggatcaggtgctcgtccttcacgatggcgggaactgaagcaaaaaaaactgaatccaaaaaacctgccgctaagcaatccggtgggaagaagaaggaggtgaagaaggagactggcttaggtctcacgcatcggaaggcggagaacttcggagagtggtattccgaggttgttgttaatgccgaaatgattgaatactatgatatttccggttgctatattctgaggccttggtcaatggcaatatgggagatcatgcaagagtttttcgatccagaaataaagaaaatgaaaatcgagaactgctaattgtgagggagatgtcaggcagagggcggggacgggggggacggggaggatggggatgggaaaaagaaggnnnatataatacattngcctctcaaaccctatattatatattctccaacgctgttactttgtctgaagtgaaccaatcattatatgctttagcataccaatacttctgatttcctgtattaccaccctaaaatatatcgaaaggcatctaataaaatactgaaggacctcacctacttaaagagagatacaccaacttaatgcaatgcatgccctgtaagcaaagacatgttacattggacagcaaccatcattggtcaaaatgacattacctatgctggtagtgttttccttgtgaccatacatttgcctcccg

SEQ ID NO: 35324 - DNA, 121 bp, Glycine max
  Clone ID: PAT_MRT3847_1318C.1
gctcgtgaagcgatgccacaaacccgatcgctaagaattctccaaggatgccgcgcgtaccacaattggattctgagagataggatgcatgggttacttctttaagcttatattcattcca

SEQ ID NO: 35325 - DNA, 313 bp, Glycine max
  unsure (1)..(313): unsure at all n locations
  Clone ID: PAT_MRT3847_131900C.1
cataacctccgagctctacaccgaagaacgaagccatggggaagacacatggaatgggagctgctcgcaagctcaagtctcaccgcaggaggcaaaggtgggtgataagtctacaagaaatcccatcttgggaatgaatggaagaaaccttttgccggttcatcccatgccaagggattgtcttgaaaagataggtattgaactaaccanccaactctgtattcgtagtgtgccagagttcacttatcagatgggagaaattgcactttgtcctatgnngtgctgactncatgaggatgcgatttgattctgg

SEQ ID NO: 35326 - DNA, 290 bp, Glycine max
  Clone ID: PAT_MRT3847_131901C.1
ttcttttaatagacgcctacttaaaaaagctctcattatgtcatagaccaaagaattttcctaactgaatagtaatactgcctatggtgcggggcgtgcaaatattagactaataaagggctgcctactaagtcggccctttcaaaaagatgaattgaactccatctctgtcacaacgatacagaagccggatattttttttttggttacggaaaaactttatacagtggtagtattgggggaacgtgctaaaaagaacacacataaaagtgattgtttgttcaaatgtg

SEQ ID NO: 35327 - DNA, 571 bp, Glycine max
  Clone ID: PAT_MRT3847_131902C.1
ccacgcgtccgccgagattccccctaaacccgagtgcgttgttgctcgcgaagaaacaggcgactaacatgagcgtgggagcgttgaaggagggagatttgaatagggaagagggcgttcgtgagggtcgatctgaactgggcctttggctgacaaccttaacattcaacgatgacactagattgcgcgctgctgttcccaccatctagttcttagactggtcatggagccacagtgatcctttctagtccactggtgacgtcctaaaagaggaacacctaattacagcgagaagcctcttgtgcctatgctggctcaacttctccaaattgagggtacaacggcaaatgactctatagcagaggaaactgagaagtaggttgctcaacttccaaaacgtagagcatggcttctagagaatgtgaggctctataaggaggaagagaagattgaccctgtctttgcaaagaaagaggctgctcttgctgagctctacgtgaatgatgctttcagcactgaccacacagctcatgctcttacagaaggagtggccaaacacttgaagccctct

SEQ ID NO: 35328 - DNA, 203 bp, Glycine max
  Clone ID: PAT_MRT3847_131903C.1
agctcagtagttatctcaggagtaagccaatatacagatattagtagtagcagacttgcaggtatgtttctcacgttcactaggctctgtttgaatctttgggtgtctggatcagaaagacacgcatgtctctatggctcacaataatcatgaaagagcagttcccattgacgtattcgtgatacattattcacatgagcata

SEQ ID NO: 35329 - DNA, 146 bp, Glycine max
  unsure (1)..(146): unsure at all n locations
  Clone ID: PAT_MRT3847_131904C.1
cttgtcttccgttttcaaacatctgaacgccaactagacaaaggtgcacagcaactgcaatttctaaccttgtcaaggcacttcatgaatcacaaaattaaacatttcgaacaaaaatagattcttctgcntccacacaacatacg

SEQ ID NO: 35330 - DNA, 270 bp, Glycine max
  Clone ID: PAT_MRT3847_131905C.1
cggctcgagatttttacatgcagtttctagctccttcaacccagctgaggtcgtgccagggagacagagtctggagaagggcagaggaattttggaaggatccctggctcatagtagggaagctgggatgggggaggggtcaaaattatggcatgactgaacctgcatctgtgttgggtggacatgaatacttagctacctcagcaggaattccttccaggtcgcctttaacagtgaggtccttagagtactatgtccttaataaaaagg

SEQ ID NO: 35331 - DNA, 227 bp, Glycine max
  Clone ID: PAT_MRT3847_131906C.1
gcggtcgttagctcggtatgcggctcgtgtttggacaactatggcatccgctttttgtcaagttaagtgggtactgttatgaggttgaactgtggcttttgatgtttgtagtcttgccatgaggctgcttggtgaatcttctattctgaaaagactcgccgccttgccatggtcaacttggatgtaaattgcatttggagctgccatgggtctgaccttcctctcaa

SEQ ID NO: 35332 - DNA, 287 bp, Glycine max
  Clone ID: PAT_MRT3847_131907C.1
gtggttgaaagttaaaaagtagcaaagatgtttccattcgggcacaaaggtcaaaggatgaaggggactattggggttattccaaaaaatgtgtttgatattaaccaccttacccatgtttaccggatccgtcggacccgcttaaaacttttaaggcgggcccttcataccagtacctttttaagcctcttcattttccatccaactaattagggctcccaaggctattggtggaaaaggaaaagttggaaaggctccaattttggagggaaggttacctttcccac

SEQ ID NO: 35333 - DNA, 309 bp, Glycine max
  Clone ID: PAT_MRT3847_131908C.1
tactgctgctagacgacaacagagggggacagcatctactattaataaagatgagtatcgaagaacatcataggtggtgctgaaggtgtggttgctgcttcttttccttgtgggggatacagctgcacgcatgggactgagcttcttcaaaagtgatcagtcatcaagttctgacaatgatgagcattcaataccctgcatgtgatctctgcctgtgcacacgctcattgccttctcaatgcatctgataaaatattaagctgaactcatgccactcagatagtaggagctgtatgtgcacacgctcac

SEQ ID NO: 35334 - DNA, 431 bp, Glycine max
  unsure (1)..(431): unsure at all n locations
  Clone ID: PAT_MRT3847_131909C.1
ccacgcgtccgattcccccagccttgaagagcataacctatcttcatctgttcttgatttgagttaaccaggattcaggcctgaggctgaactaatgcgatttgagtatttgataagaatgacacatttatgacagtgcccaaaaaatatagtaaattaataactagtgttagtaattaataataaaacacaaaaattaagataatattagtctctaaacattgctcggcaagaagttgtgattgtttgtgtataagatggagtttaactgtcatgaaggagacttttaaagtttgtttcattgaatgggagttgatttaatgatagttaaacttagttatactgaaggtacacatcttctttttgtcttgttgatccatctttcaaggtgaaatgcanaacatcctcggcttccaattatacatgtaaaa

SEQ ID NO: 35335 - DNA, 477 bp, Glycine max
  Clone ID: PAT_MRT3847_13190C.1
ctaatttcgtagctactttcgtctcgaacgcgcacgcgtaacctaggttgttctgtgattcttcccttcatcggggtccaagtcaagctttgactgggccctgcatctcttcaatctctacgaagcaacgcctgagaagttgatatgtgaagtctccgtcaaaggtactaccttgacacaaaaacttttgaagtaaattcttgtcccacctacttaggacttcaatccagactgttgtgtttggttttccactactctaatcccactcgtagctgttgttattgactgtatttttgaggaacatgtcaaatcttaaattatttcaagattatgatgaagaccaagccaacttgtgtctcatgacaaaatctcatgaaaacaaccaagaaaaatctgtaaggaataagtggtacatcgacagtggatgttccaagcatatgacgggagatgtatccaagtttacaaccttttccccca

SEQ ID NO: 35336 - DNA, 519 bp, Glycine max
  unsure (1)..(519): unsure at all n locations
  Clone ID: PAT_MRT3847_131910C.1
atggcactcacatttttcggattctgcacagtttatgaaggcaatttgctcttgtttcttgctgaaattgcatattctggatggtcatttacctcactaactcctctaaggaaggttgagaaggggcctcagttgcttgttgtctttgttgttgttactgctgcagcattggaggaggaacatatggcctgctttgaccagcagcattctggaaaggagggacagactgttgctattgtggagggcttgcccatctcaaatttggatgattcttccaacctggattgtatctattgcttgaaagatcataattattttgttgttgttggttttgctgctggggagatgaagatgaatcctggccacttcatggactcctctaaggataatagcatcatttcttgcactgaattggttgggagttnggaagcccatcttctcaaatcaaattctagcctcaccaggagtcatatcgccaagagctctaccactggcaacatcaatcatactcctctcctg

SEQ ID NO: 35337 - DNA, 249 bp, Glycine max
  Clone ID: PAT_MRT3847_131911C.1
atttgtggcttcgcgcaacacagcacaatattctcctctctttttcacttcaataaatagtaacctaccttggcggccaaatttaaatgggaatggaaccaatttatatttttcaaccagagagacttcttttagggtgcactaaagactctattaattctctgagatccagggcgtcgtccagcgagattaactctgagggtgagtatacacacacgtttttgggggcgccgcggcggttttttgtga

SEQ ID NO: 35338 - DNA, 710 bp, Glycine max
  Clone ID: PAT_MRT3847_131912C.1
ggctcgaaatgaaagctggacttgtgcaataaacgaacaacaataacagagacagtggttctcactttccgcaaaagcgaatcaattacgccacgccaaagccacaatttcacctatccaattattcacgacatgtaacaaaacgacaacaccactttcgtcgttcgccgtattcgatttcagagttccgtggcgtccggccatggccctgcgaaacggcggcagaaaaatctccttcgaggtccttagcgtcgaggacgaatcggatccaacggaacgcaaccgcaagaagcgcaggcaccgcgcttcgaaaaagaagaagaagcttctcgatcgggccgattccgattccgcggatccgcgttcggcgccgttggagaacggaggagcctgtaacggattcgagctcgacgctagcaggtactgcggcggcggcggcggaggaggaggaagcgttgtcgtgtgcgaggaggttcgcgaggccgagagtgtgtgcgcggttgcggaggcgcgtggggcggagagtgaggaagcaaccgccgtgcgcggtggcatcgaggggtttaatttcggggaattgaggcagaggaacgtgaattgtgggagttcggaggatttagcggcttcggtggtggtgcgagatgagaaggatgatggcggtgtgaatgcaagtcctgtggagaaaggcacgaacgagcctgataggaatg

SEQ ID NO: 35339 - DNA, 534 bp, Glycine max
  unsure (1)..(534): unsure at all n locations
  Clone ID: PAT_MRT3847_131913C.1
ccacgcgtccgcccacgcgtccgcccacgcgtccgctggtgttggtgaaggagagcgatctgtcagatttcgacttcagcttccacgcggccatgaagcccgtccggtccgacagtgacgtggcactggacacctcggccgacgctgcggtggcggacacatcgccgaagctgaagcggtcttgctccaacatcgagactaagcgaccaggctcgcgttccgcgcccgagatgccggcccggtcgcgctcctacggcgatctgggcaacctggtcgccggcctcgccctggacgcgacggcgaccccgcacggcgcgccggaggccagtccggcgtccgtgaagacgtcgcgcaccgccgaccgcgtgatgctgaagaagcggtcgtccagccaggtgctgccctcgcgcagccggaagctctggtggcggctcttcctctggagccaccgcaacctgcacatgccgccggtcggcgcgcacggnnccaccgatcgtctcgccttgccgncacgacgggtacacctcggacacg

SEQ ID NO: 35340 - DNA, 197 bp, Glycine max
  Clone ID: PAT_MRT3847_131914C.1
aaaccaaagtaacacaacgcagcaaagtcctgaaactgggtgcgcttaacaaaaatgtaatcaggggtgttcggcgaacacaccacattaaaacacagattaataaaagcatttttgtcaccggcgatcaacaacccagttctggcaacaacagctgccagatgatggtggagactgtaaacttcgtgcggaaaaac

SEQ ID NO: 35341 - DNA, 337 bp, Glycine max
  Clone ID: PAT_MRT3847_131915C.1
cgaagttagaaaccaccaagtactattgcacagtcattgatgcctctggacacagggattacatcaagaacatgatcactggaacatccgaagctgactgtgctgctcttatcatagattccactactagatggtttagaagctggaatttgcaaggatgtccaggtatgatgaaattattgaatgaagtttatgactatctgaagaaggtaggatacaaccctgacaggatatcttttagttctatatctgaatgtgagggagacaagataattgagagggccacaaaccttgactaggacaaggatactactctgatagacgcacttgaccagat

SEQ ID NO: 35342 - DNA, 575 bp, Glycine max
  Clone ID: PAT_MRT3847_131916C.1
ggtcttctttttttacgatatttacatgtgtttattatattgcctaaaaaggttaggatgtgaagttttgattatggggcgcccccgtataataaaaccaaatcgtgtacgatacagtaaataaggcaagctgcaatgttggaaatatacggaatttttgaagctgggaaagtttcatacattggctgggtccttgagaaatgcaacaacttcatctggtgatccaagcgtataccgagcattggtctgtgttcgaccaacggtacactagaagcaattctccttcttcaggtcaaggacattccaagatatcttttccggagccagccgacctggcccgaggcagacatgattgcttcttcttttctgattattcgacacagggcgttgtccctttttttgggaagacaactttgctagtccatttctactcgctgggttcttcaatgacgataccctttcaactggaaactatactccttctgatcccttgcttctttgaagacccacacctattgaaggtacttctggctcaaaaaaggcgcatataatctaattcctttgacagaaaatgt

SEQ ID NO: 35343 - DNA, 463 bp, Glycine max
  unsure (1)..(463): unsure at all n locations
  Clone ID: PAT_MRT3847_131917C.1
gcttgtcgncgcaagcccgccggcggtaggctgggatttcgcctcaagtcatcatcggcctcgtcaagttcgccaatgttgacatccgcgtccgggggaccggtggtggtcacacctcgcanatgtccgctgtgcgccaggctatctccaaggcgatcattgcctactacgccaagtacgtcgacgagcactccaagaacctcctcaaggccagcctcgtcgcctacgaccgaaccctcctcgttgcggaccccagacggtgcgagcccaagaagtttggtggtaggggtgcccgtgcgaggttccagaagtcttaccgctaaactggatgctttggcgctttgcgtttgctacttactttggggctggcatggtcacggaatttagagatggccgtcaattgggtgtatggatcaaggatgcatctcggaatcaaaaacagccgcgatacccattcctgcga

SEQ ID NO: 35344 - DNA, 223 bp, Glycine max
  unsure (1)..(223): unsure at all n locations
  Clone ID: PAT_MRT3847_131918C.1
attgaacattcggacttccggatgcaagattcaaaagattatcatcagnnagaatancttcagnnactttataggaatgatatctgtgtatcagtatgcatnctataagtgatgaagtatctgnnngatatgnatatctgatcggcggntgtctcaagagacagctaggggttcatggtgtactctctggtgacntgagtgagcgtgtgggttcttaggatcg

SEQ ID NO: 35345 - DNA, 421 bp, Glycine max
  unsure (1)..(421): unsure at all n locations
  Clone ID: PAT_MRT3847_131919C.1
ggaattcggcacgaggcaatagtggaatattgcccttttatgtgtttgttgatttatcccagatattaatagtgttttgttaatgtctatttagcaaaattgatttttttatttgggaaataaatacttgttacattagaaatataaaatgtaaaaaatgctttgttttcgataatttttgttgttgcgtaaaatgagcattaatggcttttatcaaccaatctgcataaattataacactacattgcttttttgttgtttgcgtttactaagtgatttggtttgtaatgtgttgctattggacctgctatacccacgatttattaacactgtttaaagccattgcaaaatgttataattagtatcaaactgtactggttgatcatgtgtttctcttctatntaattactcgttctctatt

SEQ ID NO: 35346 - DNA, 212 bp, Glycine max
  Clone ID: PAT_MRT3847_13191C.1
ttaatttagagtgggttttttcatttgaaggtgctgcagctactactgtggcacaacattgggcttttagttgaatcaggtttgttttcagcatattatttttgttgtgtatcacggtttaatttttttttccaccacaaaagataagtgtgggttcgcgtgctgaaatgctatgggtacttcttaattcttatgggtatgtttgatagttc

SEQ ID NO: 35347 - DNA, 239 bp, Glycine max
  Clone ID: PAT_MRT3847_131920C.1
ccccactagctattacttcactctcagcactgatgcatcatgatcttgattgcaggaccctaaacttcaccttcaaccatgaccacacaagtaccaccacacagtatccaactccacacaacaacacaccgctacgaaactggcaatctcccccccagagcccgcttctaaccgcctaattatgaagccagcgtcaaagcgccctacatttaccatacctagagaggtccaactacttc

SEQ ID NO: 35348 - DNA, 503 bp, Glycine max
  Clone ID: PAT_MRT3847_131921C.1
gtttaatcccttctggaccagctgaaatatctgtccaacgaaagcagctgaaggccatcattgattcccttcttccagcatgcacagcacctgatatggaaactggtgttcctttcaaagctcaagctattattgccaatcctcctgcttatggacatgtacatgttgctgaggcccttggggtgcccctccatatcttcttcacaatgccatggacgccaacatatgagttcccccaccctttggcacgtgttcctcaaagtgccggttattggctgtcctatataatcgtggatttactaatatggtggggaatgcgaagaattatcaataacttcaggaaaacaacactgaagcttgctcctattgcatacttcagtatgtaccgtggatcaatatctcatttaccgactagctacatgtggagtcctcatgttgttcccaaaccaagtgactggggccctttagttgatggttgtggttattggttcttgagccttgca

SEQ ID NO: 35349 - DNA, 1940 bp, Glycine max
  Clone ID: PAT_MRT3847_131922C.1
ggctcgaggaagatacaaagtgacgggactgttaaagttgatctagaaaaagatgcacctcttgcatcagaattgttgaagttccaatcttttgaagagtcaacaatgagtggaactcttagttcagagtcaaaaaatctgttccacggttacaaattgtcatacttgttgttggaactagaggcgacgtacaaccttttctggccattgcaaagagacttcaggagtatggtcatcatgttaggctggcaactcatgataattttaaaacatttgtgaagtcagctaatgtagatttctatcctctgggtggtgatcctcgtattttggctggatacatggcaaggaataaaggtttaatcccttctggaccggctgaaatatctgtccaaagaaagcagctgaaggccatcattgattcccttcttccagcatgcatatcacctgatatggaaactggtgttccttttagagctcaagctattatctccaatcctactgcatgtggacatacacacgttgctgaagctcttggggtgccccttcacatcttcttcacaatgccttggacgcaggccaacatatgagttctcacaccctttggcacgtgttcctcaaagtgctggttattgggtatgtcctttggtgaaactattttcttctatctgtatttcattagttttgtgaatttatatccttgctgaatccagctctcatatataattgtggatctactaatatggtggggaatacgaggaattatcaataacttcaggaaaacaacactgaagcttgctcctattgcatacttcagtatgtaccgtggatcaatatctcatttaccgactagctacatgtggagtcctcatgttgttcccaaaccaagtgactggggccctttagttgatgttgttggttagaccaaatctagatagatcctacaaaaatagcaatgagtgtcaccatatatggcgaatatcctcccttgtttcttgagccttgcatcaaagtatcaaccccaggaagattttgtccaatggattcaaaaaggaccacctcctttatattttgggtttgggagcatgcctcttgaagatcctaaaggaacaacagatgttatattggaggcactaaaagatacagaacaacggggaattattgaccggggttggggcaatctagggaacttggcagaactttctgacaatgttttccttctggaggaatgccctcatgattggctgtttcctcaatgttctgccttggtgcatcatggtggtgctggaacaacggctacaggactaaaggctgggtgtccaacaaccattgttccattctttggagatcagttcttttggggagatagaataaatcagaaaggactaggaccagctccaattccaatatctcagctcagtcttgagaatttatcaaattccattaaattcatgctccagccagaggtaaaatcacgggcaatggaagtggcaaagttgatcgagaatgaagatggtgttactgctgcagttgattcatttcaccgtcatctacctgctgaactaccactaccaattccatttgcagtggtggatgaccatgcaaatcctttgcagtggttttttctccaactagcaaagttttgcactttaccttgtgggggtgtatagtttttttttttttttgctttgagtaaattcttttttttcttttattgattgcataattatagtttatagagctttccattttttggtaatggtagcagtgttaagcttaatattccattcatttcagtcaaagtctcttttgtgagggtttgattaatagtaaattagtaatattgaaaaatttcttgtcatttctcgttgtatgagatctcatagatcatagatatctatgttagagtgattataaaagggattctatttgcccccgcctcc

SEQ ID NO: 35350 - DNA, 331 bp, Glycine max
  Clone ID: PAT_MRT3847_131923C.1
gttattaattgaagtttttgaagggactatgaggttagagaatgttcaagttttgccagatgatatatatgtgaacgacattgttgatactgcaaaattagtcagcaagtcctcgttgcagtggtttatacataaagttcaagatataattatactaagcacacttaggcatcttgtagtaaatgatgctaataaatcaagatattctcttgaatacttggacaaagataagactattgttgctcatatggctggaagaattgatgcttacataaagatgtcacatgattggcctatattttgttcttcatataatctgttattttctaaa

SEQ ID NO: 35351 - DNA, 1247 bp, Glycine max
  Clone ID: PAT_MRT3847_131924C.1
ggctcgaggaggttggtcctttgagatgttggcctggtggcttgtgtctctcacgatccattggtgatatggatgttggtgaatttattgtccctgtaccacatgtaaagcaagtgaagctttccactgctggaggcaggattattctcagcagtgatggtgtctgggatgctctaagtgcagaaatggcccttgattgctgtcgtggcatgccacctgaggctgcagcaacccatattgtgaaagaatctgtgcaagcaaagggacttagagatgacacaacctgcattgttattgacatattacccctggagaagccacctacttctgtgccaacacaaaagaaaccggtgaaaggaatgcttaagtctatttttcgcaaaaagtcctctgaatcatcaacttttattgaaaaagaatacctggagccagatgtggtacaggaactatacgaggaagggtctgctatgctttcagagaggttagaaacaaaatatccactttgcaacatgttcaagttgttcatctgtgcagtgtgtcaggtagagattaaacccggggagggtatttccatacatgagggtctgactaacccaggaagattgcgtccctgggatgggcctttcctttgctcaagttgccaagaaaagaaagaagctatggaagggaagcgaacatcagatagacttagcagcgggagtgactgatgaattatcatgtacatttgcattttgagaatgacagattgttttaatgggaaggtcaaacttccacgcaacagtgacccccctcgattaccttggaggcttctcaggatacgaatctattttggaaatccacatgataatcaatatggagttttgtgttgttcagtcaagagattaaccaacaattgaagcttgttagaagaattctgacttagaagagaggaatatgaaccatccaaatgttgtagtaggttgtgttaaaagtgggaatgcacatttgtatataggtcttcggaatctcgaaatgtacctttaatggaagtggtctttgttgttgtattgttctacatggagggttttcaattttttgggggtccatacaagtaagtttatttagacgtcatatagatcatttccactaaggcttctgaacgatttttttattcttgtagccattcagttttgataatttcttttaccattccaatattaactttatgtaattgaaaatttgaaatgttcggaaacccccaccttcat

SEQ ID NO: 35352 - DNA, 451 bp, Glycine max
  Clone ID: PAT_MRT3847_131925C.1
ggtcctttgagatgttggcctggtggcttgtgtctctcacgatccattggtgatatggatgttggtgaattgattgtccctgtaccacacgtaaagcaagtgaagctttccactgctggaggcaggattattctcagcagtgatggtgtctgggatgctctaagtgcagaaatggcccttgattgctgtcgtggcatgtcacctgaggctgcagcaacccatattgtgaaagtacgctcatcttttgcacaattttttaatgctatagtttcaccttgtaacttgtgtcattttgtggtatgcattacttgtttctatttctaccattttttcctgtctcttttcttccttcaggaatctgtgcaagcaaagggacttagagatgacacaacctgcattgttattgacatattaccccatgagaagccacctacttctgtgctaacacaaa

SEQ ID NO: 35353 - DNA, 183 bp, Glycine max
  Clone ID: PAT_MRT3847_131926C.1
acattactggaacagataggccaaatttacgtttataatatgcagcagcagctgcaaaggtacaagtcactcaaagaacttaacacgggagcggaggaaaaccatggagagaaggaacaccatcattgaggagacagatgaaaccaccgtaaacaagcgcagaaagcgtataaaaccgaacaa

SEQ ID NO: 35354 - DNA, 178 bp, Glycine max
  unsure (1)..(178): unsure at all n locations
  Clone ID: PAT_MRT3847_131927C.1
ggaaanaaganngaacccaacgaagancagangnnaaaacaaaggacccaaacaaagccgaaagaaaganaganagcngcgattacttgcacttgttcttctctgcagtaaaaccctagctagccatcatcgtaacgtactcgatccctctgacnctcatctagaaccttcgactcgc

SEQ ID NO: 35355 - DNA, 289 bp, Glycine max
  Clone ID: PAT_MRT3847_131928C.1
gcttgttggagacaaactagtgaggtgtaaaggccattgtcgttttggattaattcatggtgtgaccccatctgcatgattttgccactttgcacaacagcaatcacatttgcattccttatggcggataatctatgtgcaatgatgattgttgcgcgccctactgctactttgtctaaagcttcttgcacaactcgttcagattcagactctagtgcacttgttgcttaatctaatagaagaatccgtggcttttttattattggtcgggctattgcaattctttgct

SEQ ID NO: 35356 - DNA, 294 bp, Glycine max
  Clone ID: PAT_MRT3847_131929C.1
cacaccaacattcactacacacactctaataccttacgattttcaaggttgatagagcacgattgtttattacagtctttataagattaccttctaaccaaatcggaatgaccttatctacatgatcctctctatcacccattgtcaaacaccaacctttttgcataaaaactattctttacgcgtgatgggatcattaccttagagtgctgatgactgaaaataaaccccttgatcacattaacaccggttctccagtctcttcactgattcaacatgcagaagaaccattat

SEQ ID NO: 35357 - DNA, 355 bp, Glycine max
  Clone ID: PAT_MRT3847_13192C.1
attaatgaaataggacccgtgtgactactaacggaaacgcatggcccctacatgggcaaaaggctttgaaggaaaaccacttaatgcctacaacgccacactaaaaccgaggcagacagctcaatacggatccctgctgaagtgcaatccactttgcgaaggacctgaattggcttgcaagcgcacaaccaggggccccccatttaggaaatcagattgacacactgctgcacggcgctaggccattgggagaaccccaactggcctgagcagagggtgaaggcagggggccaacaagacccataacacccacacctgttgttgcggaccactgaaaccctatggggactcacat

SEQ ID NO: 35358 - DNA, 829 bp, Glycine max
  Clone ID: PAT_MRT3847_131930C.1
aatcataatcagtcattgcttcggcgacttctcgatattattttttctgacagagccaccgacagagaatggccgacaagtacaacctgaagaaccccgccgtgaagcggatcctccaggaggttaaggagatgcagtccaacccttccgacgatttcacgagcctccctctcgaggaaaatatatttgagtggcaatttgcgattagagggcctcgtgatacggaatttgagggtggtatttatcatggaaggatccagttgccttcagagtatccattcaaacccccttcattcatgttgttgacacctaatggtcgtttcgagactcaaaccaagatttgcttgagcatatcaaatcatcaccctgagcattggcagccatcatggagcgtgaggactgctttagttgcactgattgcattcatgcctaccaacccaaatggtgcattgggatcgttagactacaagaaagaagagaggcgtacactggcagttaaatctcgtgaagctcctcctaaattcgggactcctgaacgtcaaaagctgatcgatgagatacacgagtacatggtaagcaaggcaccttctgttcctcaacctagcgccagtgaggcttctgaagagaaccccagaaatgaagaggctgggacacacgccaattcactgaatcctgagtctttaactgcaggagaggttattctagatcaagaagtagatggaattgtggaagaacaagaagaagtccttgcaaatgctaaccctgcaggagttgaagcttcaaaggaggttcaacctagtgtttcaaggtatgaggtgctccaaaagtc

SEQ ID NO: 35359 - DNA, 377 bp, Glycine max
  Clone ID: PAT_MRT3847_131931C.1
cccgcatctgctacgttgtgttgagctttgagatctgtctcgccaaaattcatgatttcgtgttgaatgcatcatcagagttaggtttattttttgacatttggtgtaaaatgggggtgccaacttggagaaaaccagtgatctactggggttgccttttcgtcattatcaatgtgtttgtacaaattagcaatgcattttatcttccgggaagctacatgcatacttactcaaatggagatccgatatatgccaaggttatagcaatgcattttatcttccgggaggctacatacacctactacagtctcccttactgatatacgccaaggttaattcattgaattctattgaatcttggaaagcttcttaaggga

SEQ ID NO: 35360 - DNA, 263 bp, Glycine max
  Clone ID: PAT_MRT3847_131932C.1
cctattacctatggtgcggccattttaagataatttattttactttttttttttatcctttcccaggaacaaacccagaattctgacttcaaaatctaaactctgcaccaaaactcactgggcccctttataccaaaaacggcataactttttttatccaaaagaaactagagcttttttttaatcacctatgtattctatcctatgctactttcattactaataataatgaaccaaaaaaatagttaaaccctttcattttg

SEQ ID NO: 35361 - DNA, 288 bp, Glycine max
  unsure (1)..(288): unsure at all n locations
  Clone ID: PAT_MRT3847_131933C.1
ggaacgaagnacaaagcgctgggatcganaatcttgattcggtttgatttttacgttttnnacttctgattcaacgcgcttttcgacaagcttgatacgctcttggatttttgcnggattcgatcgatcgtaattncnttggnaatcatgacntcaggcgggttngnggncttgaaccggtnatgggacggaanccggttggggancgagaanattccgaatctgnaccgntttgccggntttnaagttttncccaagaatgggngggcnatnggnaaggggcccctt

SEQ ID NO: 35362 - DNA, 324 bp, Glycine max
  Clone ID: PAT_MRT3847_131934C.1
aattgagttatgttttacaaattattcgcatttttggaacaaaaaccactagagactacaacgggcgcaactgcagggacatatgaaagctatgcatacactgtttacatacaactacgtcgtcactcacgtacgcataagtcgtctaagggatactgaccagatctatgcaaaatcatgaaagaaaccaacacaacatcgaaaactattgacacaaatgtacaccaatgaaaatgtatgagaaatgaagggcaatgactgcttttatgccaacgatctacagccggctattggatcctcgggggtcagattcatgctggatag

SEQ ID NO: 35363 - DNA, 802 bp, Glycine max
  Clone ID: PAT_MRT3847_131935C.1
caataaaaaaatatattaaaaatatgtgttctcagcatttattaatgtaaggacaaggtagactaggaatcactaaaattttgagtaatctttaccagctgtgtgtatactaggtcgacctattcttgaacagcccagaatcaaaaccagtaaaccacaccaatagaatcctcgagtaaaatcttgattgtttgagtggcttcatacactcgagattcatataattgagcagcctttacacgtggttggtcttcctcttcctgctttgcgtttccatcgaaaaattgggccatgctcaattgtctgcaatgactcacgcacgcagtaggagactgcaaatcttccaaccctttgaagtatttattcagtctgagtatactctaacagcatgtgtggagaacggtagattttaaccagagtccaatacaaaacctcttccacttcaagctctccagcagctcttgcagcatatatgtcttcacatattgccatcaatctgtcacaagaaggaagattctcaaagggaattctcattcgcaagtcagaacattgtaatctgataaaacgtccaactgctagcacgaaggtaatgtataaaccccagatgatgaacttgctcagagtgtcaccaataatgccctgtggggtttcttcagatacaattatagccataggtcctgggaacttcccacatccatgtgaacctaagatgcccaaatcataaaaggaccaccactctggatctccacggttaagaacaagatccccactgacaagctccaccgactgttcaagggaccgc

SEQ ID NO: 35364 - DNA, 401 bp, Glycine max
  Clone ID: PAT_MRT3847_131936C.1
ggtcactccaatgattcgagcaaatttagagaagcaggggtattaaattattttgtcacataatggtgtcaagcgttttacatggaccagggcgcagcttctaagtctaagtgttttctataaacactccttttattgaatttagagtcacaaattcattgaggcaacccctatcttggcttgttcaaattaatttgttttcttctggaggcatcacacaaattcaatttggaataattttcattttcaaaatgattatccaataaaaattgtaaattctgcaatataccttcatacaaatattatctaacaaattataagagttccttgagttaccttggaaccattatctgaaggtctctcaccacatcatatttcattatctcttgttgggtaaccta

SEQ ID NO: 35365 - DNA, 268 bp, Glycine max
  unsure (1)..(268): unsure at all n locations
  Clone ID: PAT_MRT3847_131937C.1
gcgattctgngccttgaataaagtcctcgtgggagaagtatganttcagtgagaaagatngcaaatgatatgacagagntttttggttcccatccttgaccttgttcctgaagagcggccaacaagctggntagttncntcntccattcatggattnantgtnggtccaaggccnttttgaagcnatcaatgctttctaatnaaaccctgctgctggaaactcngnttcnggatcagnaggaaagggacaaagatgagagggaggcca

SEQ ID NO: 35366 - DNA, 283 bp, Glycine max
  unsure (1)..(283): unsure at all n locations
  Clone ID: PAT_MRT3847_131938C.1
gttgagtgacaggctgatcgcgaattgagtcacgagttcagccatggtatctgtgtctctgcgcgtagtcctagggtggcgaagggagcagcccgagagactggggagtactcacnggcagagtgctcggacaggaatgatactgacgaaagcttatgccccgacagcgagaacctcatcgggggtcacctcgcaaaaatcttcagcccaggtctgtagcgcaatcgttcacctcgaactcggtggcttggggagagggcgaactccgtggcaacgccaccgt

SEQ ID NO: 35367 - DNA, 463 bp, Glycine max
  Clone ID: PAT_MRT3847_131939C.1
aagaatcttggcgtatgttgttggttttgtgctatctcctacactaacaactatacaagaatcttcactttttcgtaaactaaagtctctttttctctttcttccacccttcattctgcagtggggaagtaacaaagagcaagaaagagggtgaacatgtctctatggaattcaccttcttcaacatctcgagttcagagtcctcaaaatacccctataattcctgctagctgctctccaaaactcgtgaaacgaatgcaacaagaaacctgttacaaatgtgatcaacgaggacattggtcttattactgtccttacaaatcccccaaaactaaacccatctcaccctcacccaagcaagattccacagtttcctacaaaagggtatgcttctaattaacactcattttttttttcctttcatgattattatttttataatgatgttttgggggcaaaatgt

SEQ ID NO: 35368 - DNA, 441 bp, Glycine max
  Clone ID: PAT_MRT3847_13193C.1
cctttcgtttagtttggttggcaaaaaggacggaccattaagttggtttctgttacacattataattggcaaaatctgaagggcttcaccgaacacaaatctaaaaactgtgaaaagtcatttacttctttgacgcctcactttccggggacgaagttggaggcataagcccaggctttgttagtagcaaggacacaaagagtatcggtgaggttcttcaagggactctttccggtaactatggcctgaacaaagaagccaaacattgaggacatggccagtcattcgttcttgagttccttcacgctaagctaaggaaaaacctctggggtgatcagccaggggccggggggtctaagctgccccctgggtaaattggagcactgccctcccaaggggggcacacagagttctgtttcttttgaaagagccaataagaga

SEQ ID NO: 35369 - DNA, 228 bp, Glycine max
  unsure (1)..(228): unsure at all n locations
  Clone ID: PAT_MRT3847_131940C.1
actgnnnaannacnnnctctgatagacaaaccaccgaccaagaattaatattcttaaacaaatgaatgtgaaatcttgctaaattgcagagtagcgaaacgaggatcatatagaaaaaatatggtatttttttcctattaaagacttgtttttttcacaaatcgaggccataaagcgtgcaaagagagtttttttaaatacatttttctttcttctggtgccgaattc

SEQ ID NO: 35370 - DNA, 189 bp, Glycine max
  Clone ID: PAT_MRT3847_131941C.1
ctctctcaaccgttgttttagacagagacacacacatagacccttatccttcgctgtcttaccgatctctgtgcttttggagctcgcagtagcatttctgcgaccattcgtcctaatggcaactgcccccgcgccgtcttcgccgacggcgaataacggcaccgcgcctgcatcgacgactccggccac

SEQ ID NO: 35371 - DNA, 221 bp, Glycine max
  Clone ID: PAT_MRT3847_131942C.1
acagaagtaatcttgaagacttatctgcagtttctcctaatgtgattttggtgaatgcttttttatcattcagaaaggcaataacaaactaaaatcaaagcataactacacccatagcatcagctagaagaagagggtgtaacagagggggacatatatcccaagtacataaagcgtattctgaacctgctacacactttgctagtcaatctgcacaagca

SEQ ID NO: 35372 - DNA, 237 bp, Glycine max
  Clone ID: PAT_MRT3847_131943C.1
aatggggctttcaaaaccgttctatcaaccccggtcaggtgggatttgttgaatataaaaataattcacgaaacactctctctaaactttaactgctttaatcttaaaccaaagttgagttcacctttcgttattttataattttgaagcatagacaactactatgttattccaacacatggccttatacgtattacacctattgccacctaacttaattaggattatactcaaacc

SEQ ID NO: 35373 - DNA, 563 bp, Glycine max
  unsure (1)..(563): unsure at all n locations
  Clone ID: PAT_MRT3847_131944C.1
ggaaaaaaacaagaaaaagaaaaagaaaancattggaagaaaagtaagaacaaatatcatgcactgtttttaactacctccttactttgcagattctgaaaaagaaaggggttgtgatcctcccagatatatttgctaattctggaggagtcacagtcagctactttgagtgggtgcaggtaactattaactgttatgatttcacatggttgcatatttggttcctctcatattaatttgtcatatcatttgaaaaaagctaaaaagaaccatcgtaagacctaattacaagaaatactagcaacacatttttctaatattctcttttcaataaattttcctttattgcctaaaattcaagtgaatccgacttatttgggaatgagaaccattaatatattttgtgagacttgtatgaatttcactcaataaaaaagaatgtctcggaaaaataattctaaaaaaagtgttacgtagtatttttttctaacactacttatatagggtctattaattgtttttacatttttcttcttctatgacataacattgtcatgttactt

SEQ ID NO: 35374 - DNA, 164 bp, Glycine max
  Clone ID: PAT_MRT3847_131945C.1
ttaatgtaaactcttatattatgatcattctaaactaaattttctttgatgcacattcacttgcctttatcaaaaacttaccatacttcatcctctactatcaactccaatttcatttccaaatacctccttcaataccaaccacttctacattcaacttacct

SEQ ID NO: 35375 - DNA, 801 bp, Glycine max
  unsure (1)..(801): unsure at all n locations
  Clone ID: PAT_MRT3847_131946C.1
gaattcgagctttgtacccggggatcctctagagtcgacctgcagaacctgaagagagaaaaaaaagatcaggagagattattttcttgggttgttaatcaggagagaaaatgtttaaaatgaaacaattttttttttttttgccaattttgttactgagaccttgcatatcaactgccaagtcatgaaatgttgctttaatttctgatgcattttccttgtccatcatctttcagttcacactggcatgcatcaaaatggggagaattgaacttgcccagaaagcagttgctttggctgagaaaagactgccagttgattcttggcctgaatactatgatacacgtactggaaaatttatcggaaaacaagcccgaatgtatcaaacatggaccatagctggtttccttacatccaagatgcttttgaagaatcctgagatggcatccatgttattctgggaggaggattacgagcttcttgacatatgtgtttgtggacttagcaagagtggcaggaaaaggtgttcccgtggtgccgcaaggtctcaaattcttgtatgacgaattcctagagtagtgtacattcatagccagggggatcatatatttatatntgtgcgtttggtaggttatagaaaaagttaaattggaaaataaacaccttctccattgctgtaattatggttaagaaggctttcctttgttctgggagggcaattctcacttttttttttaacattaggggatagagatttaaaagtatgagctctttgtgtgtatatgcacaaatattcacatt

SEQ ID NO: 35376 - DNA, 815 bp, Glycine max
  Clone ID: PAT_MRT3847_131947C.1
ttttaaaaaaaatgctaagaaagttcccttattatgataccagagaaagagattggattcgaagaagtgaaagaagcgcaaaatgtagaatctaggaacatacttttgcgaaaaaacttaattttcaaactaatattatttttacagacttgtgacggttcttgcagcaaaaaggaagctttttgtcttgaaaaaaattacgtatatttatttccagatttgaaaaatgtttcgttgaattctctttacttttttttttatcgggaaaaaagagaaaagaaatgcattatataacaaccgaaagtttcattttgtgtctgccattggtctcacatcctaagaaagttccctttttatgacctctgagaaagaattggattcgaagttgtgatttttgtgcaaatgggaatcgatcaacttcggtggcggtggtggaacgccgtcgttttgatcggaatggtcggcgttacagtagtaaccgttaccggttccgacagtcacgagaagcaggaacaagtggtgtctcgaattgccttcggatcatgctccaaccagagcgctcctcaggttccaaaattttttctattttgttatgttttatttttctattttaatttttctactttttattctagttctgttttgttttgtcttgtctttgttttattttttttcacccatgttgcagtgtcgtgtaatggaacttgtatgctaatgattctgtttctttgtttcaaccatgatgtcccaattcttgtactagcacgctgttgcagtgccaatgttacgtcagctttaagcaaactgcaggcatc

SEQ ID NO: 35377 - DNA, 242 bp, Glycine max
  Clone ID: PAT_MRT3847_131948C.1
cgtctctctactccaaatggaatagaaaaaacgcacgaaagattccatccatttgcgacttgggagagagtaccattgctccactccctctccctcttcgccggcggccaccatgtctttgtcggagttccgaccactcgacgacaagttcctcatcgaatacataaagtccgtccccgccctctcctccaaactcgccgacaacttcgacgacttatctgtcaaagaagtcggagatggca

SEQ ID NO: 35378 - DNA, 644 bp, Glycine max
  unsure (1)..(644): unsure at all n locations
  Clone ID: PAT_MRT3847_131949C.1
ccacgcgtccgcgctatcctgggttgcagaatgataagcaacgtattcctaaagccgcaagtggttgggcttcttccctcaaaattggtcttccctcacagaagcaaagcttcttcttccctttcccttcccacacacttctccactgcccctctctcctcctacggaccctctctccacaagggaacaccaatcccttcccaaaccctaccccaagacgacgccgtcctctgccaagaagcattcactcgagtcttccacctcgccgccctccgcctcccctcctcccaatgctccgcccttgaaggccgcctccgcggccacctcctcaactggccccgcctccgcaacatcgcccgcgtccccggcgacgacctcgacccctccctcgcccctctcttgcctcaaccaggtaacgctaacggagatttcgactatgatgatgaagaagaaagacgtctcttctcgctgcaacgccggatccacggcaaggcggacggcgacggcgacgttctgggccccgtgctgtaccgcgaccggctcgccaggacgttcaacaccagcggcttncgtgaagttccgccacctcgctaagatttcgcggccgaacaggaataagaggaggaggaagagtagggaggcga

SEQ ID NO: 35379 - DNA, 781 bp, Glycine max
  unsure (1)..(781): unsure at all n locations
  Clone ID: PAT_MRT3847_13194C.1
acccggggatcctctagagtcgacctgcagcagtgatgcctttgtcagtgctcttcactgttctatacatctgcatgaacaccccgcataaaataaaatgagaagaaaagtccacaaaggctaagattatcacattatatttctagataccccttttgtccctagcctttggttctaccttccccactactagaggcaacctagctataacgactaacaacaatactcctctctctctctctctctctctctctctctcttgttctgtctagtcagaaattaattgaaagaggaataaacaactgaacttcactcattaagctcaaagactatggagaaagagagagatatgggaatgaatagtgagtaccccacctgcaagtgactcttgacatgtgctagggttagatccttaacattcattaactctaaaacagacttcggagttgctcctgcaagtgtgagaagacaaactcaagattagacgtaatctaaatgttatatatgctttatctcaaaagaatctagcttttgcatacaataataaagaaaccatcaaactattcattacatagcgtaataattaattagaccatgttcaaccatcacaaagtttttcaaaataattacaganaagaagaaggaaaanacgatttttcttttaacaccactaagatcaataatggatggattagtaaccaaatttagtgactaatttcatcaagttttagcgacggatttaactgaatcaaacatgaactatattaaatggaattacttt

SEQ ID NO: 35380 - DNA, 270 bp, Glycine max
  Clone ID: PAT_MRT3847_131950C.1
gtcttacgctccatttgtagaagggtatattacatcccatcaaacagccccataggggagggctgatgataatgatggtgatgaacaaaacaaagtacatcatctcaagaggaggatgttaagggacaaaacacatttaatgcgattgaaggagcggagtatacctagggaaagatttgatgcactcagcagaggctgttccaataacagtcactatgaacactgatgattagggctcacgatggaatcttgtttaacatactctagatg

SEQ ID NO: 35381 - DNA, 1117 bp, Glycine max
  Clone ID: PAT_MRT3847_131951C.1
gtgttcattgacccggatcgacccacgcgtccgtacggctgcgagaagacgacagaagggggaataagatagctgttggaattgctcatggattggcttatctccattatgactgtgatcctcccatagtgcaccgagacatcaagccaagcaatatacttctagactctgatatggagcctcacattgctgactttggtattgccaaacttctggatcagtcttctgcttcaaatccttccatttctgttccgggtacaattggttatattgcaccagagaatgcttatacaacaacaaatagtagggagtctgatgtatacagttacggggtagttttgcttgagctgataaccagaaagaaggcagcagaatcagatccttccttcatggagggtactatagtagtggattgggttaggtctgtgtggagggaaacaggagacattaatcaaattgttgattcaagccttgcagaggaatttctagatatccatataatggaaaatattaccaaagtgcttatggtggctctgagatgtactgagaaggatccacacaagagacccacaatgagagatgttaccaagcagttagcagatgctaatccacgggcaagaagtacaaagggctaggtaatggtatggtatctatgagaatgcattttcctccttatctggcacaagcgtggatgcaatttacataggcaagctgtagctactagttgtgcttgtgccatttgaatctcagttgctaaatacttcttcatgtgtttgattatctccccaactatataaataatagatagttatctgcgcaatcgctccttaccgtttggaaaaaaaaaaaaaaaaaaaaaaaaaaaaaagcggccagggagagtatcaagcatttgtagagatgctaaaaaagatgttctagtttgcttaaggcttatttataacttgtataatcatgaaaaagttttattatgttttgcctctctggttttggttctagtgtacaaagtttatgttctattcaatcacatgcatttatttgtgtatagatagggaaacaaaattatattgagattggatggagttcaatattaaatcgttcacagctgacgatgcat

SEQ ID NO: 35382 - DNA, 557 bp, Glycine max
  Clone ID: PAT_MRT3847_131952C.1
ggggttgccccgctataacgtttgccacaattatagttgaggggatattagcaaaccttgttcaccaatttgattggtcattgcctggtggtgctgcaggagaggacttggacatgtctgaaactcctggccttgctgctaatagaaaatatcctctttatgcagtagcaactgcatatgagagaaattagtatatcatgatcagaaaaagaagttatgagcaataagtttgtgtttcataatattgtagcttacatgactcttttatgttgtggaagcatttgtgttgttgctggttgctgtcgtttccaattgtggtttaatggattgcacaagctttgttcctgcttaacgaatgattatgtgtttgttaatctaatttggcaggttatagatatggagcacattagtcgttggttgaggaatagcagcgatggggaaatttatgcagaaagtgaggaccagaatgattttgtggtcagtttgccttcaatggaaaaagtgtgggagaattgattagacaagcagaaagactgaatatatatattgaggttttt

SEQ ID NO: 35383 - DNA, 291 bp, Glycine max
  Clone ID: PAT_MRT3847_131953C.1
ccggccggtttcaacagaggtgttacttgttccggcccctcaaattatgatgaatgttgggtcggaattttgcatttcagtataagcattacatgcccttgctgcttctagtacccttgcatattgcatctaagcaaagttattcataggcgacttcatttgattacaagtatattcttttgtaatacggttatattgcacacctacgaggctccattacaattatattattggatgcttaatcttaatgtgcataaataaattttgggatctgcatatggatgcttgccc

SEQ ID NO: 35384 - DNA, 219 bp, Glycine max
  unsure (1)..(219): unsure at all n locations
  Clone ID: PAT_MRT3847_131954C.1
cttcggatcccaaccccccaanggagagaagccacgaaaccttcaggggcaagacggggacgggaaaacagacannaccccagggcaccccccgaagccgaaaaagaacgccacaaaccagggggggaggagccggagcacagaaagcaccacacaagaaaacgccaaaagccgaancaccaangaggagacaaacagccggagaacccgcccacgaag

SEQ ID NO: 35385 - DNA, 453 bp, Glycine max
  unsure (1)..(453): unsure at all n locations
  Clone ID: PAT_MRT3847_131955C.1
atccggtcanaggaagatgatatgaattcatcgtgggaacaaaggctggtgaagcgttattattacaagcttttgaaggaatactgtctagctgagatgtgacagtacaagaatggtaaaggaattattcattcattacttatagaagatatttttgtgggattgcgcaatattgctatcttttatgcctattcttatgactgaaaccctatgttgatctttaaaagatatgggccgtatcaattgagccccttgacaatttttttacatgaggttactttctggtagccattctgtattttttcagatatagcaaagggtaccggaggattcaatctggtgagggcttgaatgattgcaccctttctctttggacattcaaaataatgggttaaactatttttattctaagttttgggtaatcacactggcggctaanggcaagaattttta

SEQ ID NO: 35386 - DNA, 527 bp, Glycine max
  Clone ID: PAT_MRT3847_131956C.1
gaaaagggggaaaaccaagccccttttttgggcaagaaactggggggggcccaaccccctttacccaaacaaacccgaaaaaaatttttgggggggggctaacaggggggggaaaaaaacaaaccggggccaatttttaatttaaattattttaaaagggggccccaaggggcctttaaagcccaaaaacggggaaaaaaagcccttattcccttgggggcaggtccaaaaaaaaaattttggggaaaaacgggcccccccccccacccctggggttgggggggggccccttaaactggccaaaccaaaccctcccccccaatttggggttttttgggggggggggaaaacccccctccaattttttggttaaccggggggggggaaaaccccttttaaagtccaacagggccctccacggaaaaatactggccccaaaaaatcccgaaaaaggggcccccccggaggaaaaccttcccatccccaaaacccggggggggaataagggcaaaattatctggaaaggg

SEQ ID NO: 35387 - DNA, 480 bp, Glycine max
  Clone ID: PAT_MRT3847_131957C.1
acgggagcatccatcataaagcaaagaatttaagagagagagaaagagatcattctagatacagtatagaaaaattagcttcagtagatattagtggtgggtttgggtttcaagagaggagacatgcctaacttgaacccaacacttcaagtacttgcttcttcatacccttaccagatcccaaaggttacatgaagccatttctctttttaaatcttcccaacaccgagttcaattcttcacaagttgattgtaatcactcaatggctcattccttcttatccctacggcgatccaatttttgcttatggaccacaagctattagtcatccccaaatgatacccccgatgctgggactagcatccaccagagtggctttgccacttgatcttgcagaagatggaccaatttatgtcaatgcaaaacaataccatggtatactgagaatgcgtcagtcacgagcaaaacttgatgctcat

SEQ ID NO: 35388 - DNA, 416 bp, Glycine max
  Clone ID: PAT_MRT3847_131958C.1
tacggctgcgagaagacgacagaaggggagatcccaaaggtactcttatagtacttcttctctttctctcactgtttttgttgcttattctgccttatcctgtctccctctcttcactacccttttttttttttcactttccttcttatcatctttttttcttttttggtttatattttgggggggtatttttcttttcatttgtacttttttatttattgatcttgggttttggtttattttattgtgtgtggaatacaagtggtgaagttagaaattttgttgtttcccatctgcatgtggagtttgaggtcagctttgtgtttgttaaggttacatgaagccatttctctttttaaatcttcccaacaccgagttcaattcttcacaagttgattgtaatcactcaatggctc

SEQ ID NO: 35389 - DNA, 1609 bp, Glycine max
  Clone ID: PAT_MRT3847_131959C.1
gagatcccaaaggtactcttatagtacttcttctctttctctcactgtttttgttgcttattctgccttatcctgtctccctctcttcactacccttttttttttttcactttccttcttatcatctttttttcttttttggtttatattttgggggggtatttttcttttcatttgtacttttttatttattgatcttgggttttggtttattttattgtgtgtggaatacaagtggtgaagttagaaattttgttgtttcccatctgcatgtggagtttgaggtcagctttgtgtttgttaacaaagccttcaaaaagcaaagcaaagaagtgaagagagagagagatcattctagagacagagagaaattagcttcagtagatattagtggtgggtatgtgtgtgtgtgggtttgggtttcaagagaggagacatgcttaacttcaacccaacacttcaagtacttgcttcttcatacccttaccagatcccaaaggtcttgatctaattttaagtgattcttctgatgagtatattgaaggttacatgaagcaatttctctttttaaatcttcccaacaccgagttcaattcttcacaagttgattgtaatcactcaatggctcattcttcttatccctacggcgatccaatttttgcttatggaccacaagctattagtcatccccaaatgatacccccgatgctgggactagcatccaccagagtggctttgccacttgatcttgcagaagatggaccaatttatgtcaatgcaaaacaataccatggtatactgagaaggcgtcagtcacgagcaaaacttgaggctcagaacaaacttatcaaaaatcgtaagccatatcttcacgagtctcggcaccgccatgctttgaatagggttaggggatccggggggcgatttctcagcaccaaacagcttgcacagtctaatgcagaatttgtcactggtgcacattctggttctgaccctaccaacagatatcaaaaggaacatctatcagaggtggaaagtcattcctcaaaagatggagataattcatctttcatcacaacctgctccgaccggccatgtttatctggcaacaatgtcaattttcggcagcaggagtgcatgtttctggggaattctgcaaacatgggtggatcaccacagttcagtgggggactcacctttggcggagcaaagcagcgcacatcagttgtccggtgagagaagaaactgatcgaaaccgacttcaccggtcaggcaaatcatccttggcttagtcacttttgtctgtgtctttatgtgttcgtactaaatgctcattttgagagacttttttcagtctgcattagcactataagacctttccaattgctttggcatgtattttaaagttgctattgtactggattttgaactggattggaatagtctgttgcatggaactagtatgtttgtgttagttactgttgaatttccttctttaaaatatgtgatgtccagcagtggattattaacttttcaggtttactatagtattcattaactttccagatgattaatatctgctaaaaaatctggttgaatactttccgaa

SEQ ID NO: 35390 - DNA, 391 bp, Glycine max
  unsure (1)..(391): unsure at all n locations
  Clone ID: PAT_MRT3847_13195C.1
cccacgccgtccgggcagtccaaagccatcatttggatgatatatgttattagtatcatgggaagtggtagctggcaatctcatcgtgtttgcttagggctttctaagcattctttcaagggtcgatagttagatagggacccanatattctaccgtttcctgtacgtctgtgcacttgatagcataaggtggtaccttagtatgaattgcacgaaataacgctagcacttctcttaatttggataacctagctttaccatatgtggaaacctcacatggctttacacacatagttgtcgagaccattcnnntccgtctaaatagcttttctgcttnntcttggaatgaattnnatgacttttcttgaaatttctgtgattnnngctggat

SEQ ID NO: 35391 - DNA, 256 bp, Glycine max
  Clone ID: PAT_MRT3847_131960C.1
ggaatagtttaagatggtccactattttattgtttatgctctctatgttgaacatatctatgttttatactaaatgaggtgtcgtgcctgcactgtcataataactcttggaagatttgattactcattagtcgtgtcctcacttaacgatttcttggcagttctcaatgcactatctattttcgcttaccttaactctagcacatactgctatcacagttttcttgtcaattattcatccttgattgttccgggg

SEQ ID NO: 35392 - DNA, 467 bp, Glycine max
  unsure (1)..(467): unsure at all n locations
  Clone ID: PAT_MRT3847_131961C.1
tttttantttaaatttaaattttattcatgattttgattaatgtaaatatttatgctaatacatcattaaaagagttcaattacattccagtggcggtaaacaagcatatcaatgatatctgtttcttggccaacctctagtgtatgtttcagaaataaacttggcattatatttatatccaagcattgcatttggttcatctgccgatcgagcttgataagttgctttagaccaagaactgttctgcaattttccttggttgtttcactttcacagttgtacagcagctatttatgcaggatttgttagcatgccttatatttataacagagattcttgaacagaaacataaaaatatccctgaacatcttcgaggcctaataatctaaaccttggtcatgtcaacaattatcttatgattcaccttgctcgtttttcaccggtttgtatttattccatgaagcac

SEQ ID NO: 35393 - DNA, 518 bp, Glycine max
  Clone ID: PAT_MRT3847_131962C.1
cccactcgttcgcccacgcgtccgcccacgcgtccgatttcatggtcgtgcatcttggccctgcaatttttgtaagtctattcaagtccaattcctctctcatcttttgtcaatgttgattgcattgatggtccttggcatccagtttcgtagaaatttcacaccaagttcttgattctgtttctaaattttatgaatatcaagtttccaattgcgttaaaacttacctgttgtgtgtttcggatgtttaatttagatggggcttaggtcatcatttttgtggtagggttctgtgccagagttgtttcttctgattaaacatgctgatcttggctatgcttctgtttcatgctctcctaaacccctaacattgtttgatcaggtttgtgctttttcttgacactcgctggcgagcatgttgattccgttttatttattttagagaatggaactgagttttatattttttggtaaaattcatttcttgaaggagtgcaatacacgtacacactcttaat

SEQ ID NO: 35394 - DNA, 483 bp, Glycine max
  unsure (1)..(483): unsure at all n locations
  Clone ID: PAT_MRT3847_131963C.1
cgaagcnggaattggcccgagggacttttctcgcaccctcgcggagcgtcttgtgattgatgtcaccaaagtgttgcacgagctggatttgcttccagctagggtgatcagcaccaacaccataacggttactggtgaatcaggtgaagaaaatgaggaaaaagtgctgtttgccaagaagagtgaaatagagacacaaagggaaatcacttcagtttggaagaagtttgtgatggagaggaagaagatgaatggtgtttgttagagccttgtttttggatcattttttgagctacttatggagaccggaccagaacatgcaattcctgtgtgagtacgtgtgcctacaaggttgtaggcacaaattttactacaaactttattactattatatatcgtgtggaggatgcagtaattcccttccccaataacatagcgtactttagatatgctgaaattgttgaaagataaattttttattta

SEQ ID NO: 35395 - DNA, 250 bp, Glycine max
  Clone ID: PAT_MRT3847_131965C.1
tcataactctcactttgactaaaatagtacaactcaccaaaaatttcagcaaatacctaaccaccttagggtctcttcatacatacctttactctttccccatgcaaatttgtgacatctttacacgaaaagtacccatctaggctacattatccaaaatcaacatttttctaaccatcaatatcaactctactgacacacttgtctttatcttctcacccgtcatgtctcaaacccaattcgacgatgg

SEQ ID NO: 35396 - DNA, 530 bp, Glycine max
  unsure (1)..(530): unsure at all n locations
  Clone ID: PAT_MRT3847_131966C.1
atnatantttctctgcgagctttcttgtatgttttgggttccttgaggctgcatatctttcagcatgtctgctagaattccacaaaggagcttggtatctggttgtcctattggcagtgtcaatgacagtgatgctttcatggcattatggaacaatgaagaagtacgagtttgatttgcaaaacaaggtatcaaccgaatggctaatagatattagtccaggccttgggatttccagggtacccggaatcggcttcatttacaccgacatagtaagcaggaatcccagctttcttttcacattttataactaatcttcctgcatttcatcaagtgttgatcttggtgtctttcaagtctatagctgcgccttatgtaccagaaagtgaaaggtatcttattggttggattgtgccaaaggatttcaaaatatatcgttgcattgtcagaagtgatattgtgaccaattagggacactggtcatttgaggagcatatatttcgtctattgcggaatcatattccattgac

SEQ ID NO: 35397 - DNA, 1988 bp, Glycine max
  Clone ID: PAT_MRT3847_131967C.1
aattcggctcgaggcttcttcgtggtcttgagcattgtcacagtcgtggtgttatgcaccgtgacatcaagggctcaaatcttctgcttgacagtaatggcaatctgaagattggtgattttgggcttgcagctttgtttcagccatctcatgggcagcctttaactagtcgtgtcgtaaccttgtggtaccgaccacctgaacttttgcttggagctacagattatggagttactgtggatttgtggagtgctggatgtattctggcagagttgtttgttgggaagcctataatgcctggacgaacagaggtaatctaccattctaggtggagcaactacataaaatcttcaaactttgtggatctccatctgaagaatactggaagaagtcaaagccaccacatgcaacagtttttaaacctcaacaaccttacaaatgtgttatttctcagacattcaaggatattccatcatctgcactgagcctattggaggtccttctttctgtagaaccgaaagatcgaggaactgcttctttagcccttcagcatgagttcttcacagcaatgccacttccttgtgatccatcaacgttaccaaagtacccaccaagtaaggagtttgatgccaaacttcgcgaagaggaaactagaagacgaagagcagcaaataaaggatatgaacatgaatcagttgggagaaattttagagagtccaaagctgtgccaatacctgatgctaatgctgagtttcaggcaactgtgaggagacaaggacagtgtaattccaagtgcactactaagaagtacaatcctgaagaggatggtgattacggcttccaccgcgaacctgcaaagtcaagagcactcgatgtattatctcattctggccagtcagtgcatccaagtgtatatggatcctcacgcaatatgaatctgaaagaggaagatctcactagcccagatcatggctttagatcaagaaagtctgagttgagaaaacaaaaatcctattggcaaggtagcactgcaaaattgtcaagattttctaattcagttgcagttcaaggtgatccactgcttgatatgagtggtgactctagtgcgaattcgcagtggccagaagatcagtttggcatgagatgtagccatcaggctgatggtgattccaaacaattgttggatggactcaaatcttcacagaagaatgactttcatcctattgggaaggatcgtgctaagggctatgctaacaaaaatgcccgcatgcaccattctggacctttgctggctccagaggataatcttgaagaaatgcttaaggaacatgaaaggcaaatccaacaggctgtccgcaaagctcgtttaggtaaggacaagacaaaaaaggctgacagtgagagtggcctaactgaatcactatttcaccatgtgagaaatcaatagtgactttcaagagagttttgatgcaatttaatatgggatgggaacacttgaacacaacaagattgtggctatcataattcattgccaagataaatacttcttttggaaattcatcaactcttgatgccgataaattactaatgctcgtggggcttcaacatacttcttcacatcagatatttataactaccgtagaaggtcttgtacagagttctaaccgacaaacttccatgtttcatgaaggtggatagtttatactttacagagcaaatgaaatccatggtgattgactgcataatattttatggtttattaacacaccagcgagttgttccattgccagatggcgaagtcatttccatggcattactttgtatatttgaaactgattttgccgaattaaattttttcatttaatgcataggcttttgttcagagctagaattcggaaggctgaagaaaggcttgcctttcgaaacatagtattcccatcaacatgggcatgcaggagaaataatactaaaacaaaacacttacttct

SEQ ID NO: 35398 - DNA, 479 bp, Glycine max
  Clone ID: PAT_MRT3847_131968C.1
caaaaaaaaaggccaacttttcgtttttttaaaaggagtaaactttgttccaaaaagcaggaacctgtccaaccaaccttaattttaatttctaattataacaatgggggcgggggcatgaatctttttttttggaaaactcccctccagttttaaatagctggaaaccctacttgctaaactagttggccctccaaggggcaagattcttaatggttctttttgttcccaaaagcttttaaactgaagctgggcccacaaaaaaccctatttgggagcacataaagccccattttttaaaaggcttccaatataaacaccagcaacccctggaaactgttttcactaaaaaccttgataaaaaaaccctttttttgggtttcaacttcaagcttaggctttggatcatagccaacgttttttcgggccggtgccactgttaacgggttaaattcttccagtttttgctttaaaccttg

SEQ ID NO: 35399 - DNA, 713 bp, Glycine max
  Clone ID: PAT_MRT3847_131969C.1
gaacatcaaaagcatggagtttccagtccaaagtttgtgtgacaacaacactagccaagcaaacattaccatgaacaagtttacaatcattatttaagaagctcacagcttttgctatctgatgcaggccccaagcataatattcatccctttgtgtaccttcaagacccaactccttaatcttgtcggacagcggcatcactggctcagtcaccatataaattgtaaccttgggagaaccagcgtcgacggtttcaatctcggtgctgtgaagaaacgacaaaatattcggatgcctaacagtgcgaagacgcttaacgccattacgccccgcagctaaatgtccatcctgagaattgctcccagacagagaaaatatggacaccggagaaccatcgtccttggaggtgccgcgaaaatgaagccaagagccccaagcagaagcataaggttcaccgatattgtatgggagatctttgaggcccgtgccagatccactcaccacctctttcaagaatttgaacattgcttcgatccacgatcacaattctgatctgatcacgctaacgctactaccaataactataactgtaactcgtacttgtggtaccgtacgatgcggttcgggatctgaaacactctttctcaacgaaatgcatacaatagcaagagaaattggattcttcgtcaacctgtccaagccacaaattgag

SEQ ID NO: 35400 - DNA, 389 bp, Glycine max
  Clone ID: PAT_MRT3847_13196C.1
cactttttctataaataattttcttttttccaaaaggcacaacatcaatgcctttattatgctttatatttcaagcatgtgtttgaaaacccttacattacaggcatgcatttttgattcctgtctataatagactataaccatatgctatttccgccaagtacgtatgcaccaaatttgttggaggacaccaagattatatatatactatatgcgtgcctgcccgaggcatttacttgaaacagggccctccaaaaatcttttgcttaatcttggacagtaaccctttcttgtcgggcggaccaccatgagattgttcatgctgacaatggttcttacaataccctgcttcagggggcgcacccccaaagatgaatccataaccaggt

SEQ ID NO: 35401 - DNA, 349 bp, Glycine max
  Clone ID: PAT_MRT3847_131970C.1
cgaaggggtccttccttaaaacctcaattgttaaccgtggaaaacagttggaagacaatcctttggaatttgaagttgcctcctccaaattaaacctcaactcaaccctgttgccccacaatgccacatgttcacgttcctgaatgtcctaaccttatagccttaataccttttgaaattaaccactttcaattaaccagtaacttccaaaaccttcaataataataataggtgatgaaatatttaattaagttcgccaaaaacaagacaaactcccacgacacaaaaagcgggcgctccaaaagattcaaccttacgttcgcctgcatgccaagttacagctcctcca

SEQ ID NO: 35402 - DNA, 619 bp, Glycine max
  unsure (1)..(619): unsure at all n locations
  Clone ID: PAT_MRT3847_131971C.1
cataaacatatttatttatataacaaaaaaggcatattacttcttgtgagaagacaaagagtattcccaactaaactacaaagagagcagactagaattatagtctggaatcatgtacaaaggaacctggtgccacttgagttaaggacattgtggcagcagtcaaatcgtgttattcatacaaattttttgcctcatatctactttatttctatcctttgtcctagtctaaaagatgaggactccttcacagttacaaagtttactacaattaacatgaacaccacatactcatctaatagtcctatcatacacactgatttgcatcccctctccaaatgaaccactttttcaatgctttcaactgtcatcatcatcagtaaagtctggttcaaggggcttcctcaatgaaccaagaatgtctagttcaggcccatatctcaagctcctacctttccttgggctggatgcctagttttgcagcatacattgtgccctttggggactgcagaggtgcagagaaatggtcactggccggttccaaagacaaaggccatcatcagattctcctttttcttgagctcacttggctnctttggtctcttatacctgaccatgc

SEQ ID NO: 35403 - DNA, 232 bp, Glycine max
  Clone ID: PAT_MRT3847_131972C.1
gaaactgacaattcaaaatggatgattactaccttactagtgtcaaataaatatttcatgtgtttttatccaagtaattagcaagttgttcagaaaacgttaaactccaaaaaacataacatttaaaaaaaagttatttgagttgctagaatccaataaattataacccataaaggttgtaactcatttctttttgctaggggaggtgcccagaatcaggcttgttataaac

SEQ ID NO: 35404 - DNA, 252 bp, Glycine max
  Clone ID: PAT_MRT3847_131973C.1
gaatcttggcagtctaatcagtgacaatgcaacacatgggtttgggtagcattcatcggcatagctctcacatggaatctttcagaaattggcatcagtaggggcatcgaattctccgaggtggcagattgcatacgacggtgaacataggtctgtagcaacaattggagtggttaagtaacctgatcaataatgaccctgcacacgttgctcatcgtgagattagtaggtatcagaagagcactgaggtcc

SEQ ID NO: 35405 - DNA, 275 bp, Glycine max
  unsure (1)..(275): unsure at all n locations
  Clone ID: PAT_MRT3847_131974C.1
gttctcttaccgacgccagancgagacacagaagagaggcttaattcaacgaggcccacgctcccaccgcaacaaagtagcacaaacagaggctagatgatgcagaaactcccaacgggcccagggtggagcctaaaatgcctgaaccaaaaatggcacgccccaaaaacacacttggaggaaccagtcggcgtagggatctagagacacaagatgggacagagggcaatcacagagcaagaggtgatacgcagcgcactcatcgcatcaaagga

SEQ ID NO: 35406 - DNA, 1109 bp, Glycine max
  Clone ID: PAT_MRT3847_131975C.1
ggctcgagaaaaaaccttcacctaccactttataaaacccgtcccttctcttctcctttcccaaatcatttgatcactctgtattgtgttttgttccttccttggttcgttccctccacaaaccaaaaacccaacaaaagaacgttcatttttcattttcgtttctaataaagagcatggccggtggttctatcaagagacattctttctccgaagaggaccatggtttcgcttcttccatggagcctgggtattctgggcacaaccaccacttccatcatggtttcgtgtctaggactttgggttatggcactttctacaaccgaggtgttaggagccagtcgattttctcgccgagatctgggagattttatgatgcaagattcgaagatcaccaaccccactttcttcaagcttgttctctttgcaagaagcgtctcggggataatagtgacatcttcatgtacaaaggggacacgcctttttgcagcgaagagtgtagacaagagcaaatggagagagacgaagccaaggagaagaataataacctttcttcttcgatgaaggctttgagaaaaaaagagcaaagaaattctgtctccccaaacaagacccaagattactcatttcgtgcagggacggttgctgctgcttagttgaaacttgtatggtgattagctattaagaggaaagaagaacgaaaaaaacagtttaaccgctacagccttctcaaaaaagaaaggaagaaaaaaaaggaggaaaacagatgaacaaaggaaagtagaagccaagttccaatccaagttactttcttttcctcgaagaagggtcaagagagaagagatccccccctaaaaaaaaggatttttgttcatgaagctgtatatggtaatacgtgtagagaagttcgttgcgtgtgggatcctctctcccaattggctctttttcgggtttattttttataaaaaaaaacatatatatcaatgtctcttagttacttactagtactattttatatgatggtgtggtgtctaatagtttcaaagttttaacgaagaaactgaatagtaccaatttagttgatatttctttcaaaaagaagaaactga

SEQ ID NO: 35407 - DNA, 140 bp, Glycine max
  Clone ID: PAT_MRT3847_131976C.1
cctctttaacactcctcctggatcaaagtgttaacaatagaaaaaaacgagtgtctcattttcctcctcaatttctgctttgatatcatgttgtggtgtttaataagtcgctggcatatagtacaattgtttttgaggat

SEQ ID NO: 35408 - DNA, 366 bp, Glycine max
  Clone ID: PAT_MRT3847_131977C.1
gttacccattataaaaaagaatttcattgaacgaatagggaagaaggaataaatgccacagagaagaaagacatcgtgaactgatgaacgggttgatgcatgatgaaagtatggaccagggcgaacagcatgagcacataggcaattccttggcccactgctataccatgacttgagggtgcaggggcaggaggaaggacccgagccttgatggaaggggccacataagccaaagcaagagccacgatggacattagaaaaacctggactttcaacacctaccattggaatttgacaacacaaccgaccacactctgaattatggatgcggcttaagctaaggccgattggacaatcaggaggaga

SEQ ID NO: 35409 - DNA, 325 bp, Glycine max
  Clone ID: PAT_MRT3847_131978C.1
aaaaaccccaaaaaaaagggtttttcccattttattattgcccaccctttacccccccttgccgttataccaaaccggccattatcccctacaaaaaattctcattgccctacataaaggacaaaccgcctttttttaaccccccccccgaaatactttgggaacccccccctaggctttaaacttggtaggcaggcccttgggcccttttttatcccccctaaatatttaaaattgcccccggggggggggggggaaaactcccaaaaaaagggtttttcacatttaatttttggcaaccttttacatccccttccctcgggcc

SEQ ID NO: 35410 - DNA, 226 bp, Glycine max
  Clone ID: PAT_MRT3847_131979C.1
gctgaagaaactgtgctggcaactcatcaccctccaattcttcaagtactgggaccaatgcgccctctgctaaatcagcagctgcaccaattggagctgacactgcatcctgaatctctgtcatgtactcggtctgttcattgatgtggtccatggcctggtcaacattatagatatccgatgcgttatgcatagccttcatagcgagtggtgcgattcttagtgc

SEQ ID NO: 35411 - DNA, 1360 bp, Glycine max
  unsure (1)..(1360): unsure at all n locations
  Clone ID: PAT_MRT3847_13197C.1
aatagttctcctcgtgtacctcgtgtaccccgagcacgccatgnnggtagcttgccccagttgacttccgctagtgctacaagcatgctgatgaagcgaacatcgggtggagggaggcgtaactagttgccgacgagtcggatgctaatggatgcatctagggatgagccgcaaaggacgtgggaacgtagatccttaggttgcaaaaagaagagttccctaaaggcaagcgtaaagctcgaaaacgcaggcgccttgctcttcagggaagagcagtgaaggatgtcagaaggagacagaaagctgactcgctaacggatgaggatctcggtccattctccaattctagtgaagagagcatgttcagtgaagatgaaattcaggctggcagaatacgtccagcaggaagttcatcagatgaggcaggtagtgcctaatatgaatatgagccagctgaataattcaacaggtttgtttttctgataataaataattggtaaagggcggactgcaaaagatagtagagggaagaactttgagttgcaaaaagaagagttccctaaaggcaagcgtaaagctcgaaaacgtaggcgccttgctcttcagggaagagcagtgaaggatgtcaggaggagacagaaagttagctcgctaacggatgaggatctgggtccattctccaattctagtgaagagagcatgttcagtgaagatgaaattcaggctggcagaatttgtcctgctggaagttcatcagatgaggcaggtagtgcctaatatgagctagctaaataactcaacaggtttgtttttgcaagaataaataattgttggcttgcagtcttcgcgagcttgttaagtggaggatggattgcgggtgcttagtgtgatgtcacagcgtatcagtagtgtaaatatttgtagcattagttgtttctttttctcatgcatgaggcagaactgaattgagtaggttgtgtagaattttttaagtggctaaggattcggttgaagagcaagaaagaatgtacaattgaatttgactaggaaatactaatttagaaactacccttggtcgctgggagcctggtatatgattaatctaatttaacacgagtcagtggtcttgagacatgggtgtatacaaggacaagtagatgtggtagctttgccaaggtcaatgtataggataattactgattggcaactgttattgattgattgttgtaaagttcttattagttattgtataacatttaggctttgcatttgtgtctcttgttagtcgactttatctagtaagaatgtaagagaagtcttttcttgttgtcaaaaaaaaaaaaaaaaaaaaaaaccaaaa

SEQ ID NO: 35412 - DNA, 315 bp, Glycine max
  unsure (1)..(315): unsure at all n locations
  Clone ID: PAT_MRT3847_131980C.1
tgaatgaatatcacaatctgcttcattgcttactaccgctgaaagcataagggcgcttatgganaacgattctaggtaacaacgatattaatttaataacacgatatccaacatgcaatgcttgctttgagcaaaggcaaacttttaactaagaaagtcttgcttaagtattgaatgaccaagttaagcacaatgctcactatttactgagcattcgtacagatcatcacaccattgggttatctctcgcacttgctcaatcattgacatcagggttccatgctggcagctattatgctataaatcctattgatg

SEQ ID NO: 35413 - DNA, 302 bp, Glycine max
  unsure (1)..(302): unsure at all n locations
  Clone ID: PAT_MRT3847_131981C.1
ctcnttaanttgcnanantngcacntcgntgcttngtgatgtcnctttctgtnctnttcactgcttggtcttgcgagaganagccntgccagagacgaagatttttggcatgctgtttggccaancnctcccattccnagttcnttgcgagatcttctaaagcctggccctgcaagtgttgaaatcgctgatcnccctatgcnaattgnagaaacacagtncccgnaaaccttcttctntaaagnnncccttcntccnggcaaaacnntgaaagtacnattcagcaagcctccctttcaaca

SEQ ID NO: 35414 - DNA, 277 bp, Glycine max
  Clone ID: PAT_MRT3847_131982C.1
aaagccgaacaaagccttacatagtaacggacaccatacacatttatatttcagcgttgactcatcttcattaacgttaaaacatacaggaccaaggaacggctgattgaacaagggtcagaatccgccgccgaggggggggaaaccactaagggtcgaacagctttgaatctttgttgcaacccatcctgattggcgaacatgaactgacctgatgtgcattacaatgcaagaaagtaacgctactgattcaccagcaggcttggagttaaagctg

SEQ ID NO: 35415 - DNA, 254 bp, Glycine max
  Clone ID: PAT_MRT3847_131983C.1
gtgtcgtcctttcacaaacaaattgaaaatagaagcccaactttggaccaaatggccacgttaattacactgatctcatagtttcagactccattagatcttaaaaaaagtgttggaaaaaatgaaaaaaggatgctgcaccactgatattgcatacacttcgctcagaatgaaaaaaccagaactgaaggaataaacgctacaacagaacaagcaaagtgggccatgcctgaggacgccctataattaggagg

SEQ ID NO: 35416 - DNA, 436 bp, Glycine max
  Clone ID: PAT_MRT3847_131984C.1
gccggatctcgttcaaagaacaatgtgaatgagtcatatgttgctaatcacggtggcctacctgatgttgattacttggagagaaaaaatccaaaggatgaaacttttagagtaaagcccttctacaataatgcaaatccacctgcttatacaagagaggaacaatttgaaggtggtttcaatcagcatgatagttgggggaatgccagacgtgtaaaagaaagccaggacactgcaacctctaggaagtctcctggtcatgcaggatctcattcaaagaacaatgtgaacaagccatttgctgctaatcatggtggcctacctgacgttgataactctgagagaagaactcaaaaggatgaaactcctagggcaaagcccttctacaataatgccatgatcccaccttcttatgtaaaacccaattctaaactga

SEQ ID NO: 35417 - DNA, 1030 bp, Glycine max
  Clone ID: PAT_MRT3847_131985C.1
ctgcaggcgtccgctgcatgcagagcacaacatcgattatccaaatgggcgaaccgcggttgcaagcagagcacaccatcgaaatgggcgaagcgaaggcgttggttccggaatcggtggtgaagaaggagaagaggaacgaggagtgggctttggagaagaagcaggaactcgatgccgcaaagaaaaagaggttcgaaacgcggaagctgatttttaacagagccaaacagtactcaaaggaatacgacgagcagcaaaaggagttgattaggttgaagcgtgaagccaagcttaagggagggttttatgttgaacctgaagctaagctcttgttcatcatcaggatccgtggtatcaatgccatggatcctaaaacaaggaagattctgcagcttctgcgtttgagacagatttttaatggcgtctttcttaaagtgaacaaagctaccgtgaatatgctgcatagggtagagccttatgttacctatgggtaccctaatttgaagagtgttaaagaattgatctacaagaggggctatggaaaagttaacaagcagagaattggactttggggaagcatgggatcatttgcgttgaagatctgatccatgagatcatgactgttggacctcacttcaaggaggccaacaattttctgtggcctttcaagctcaaagctcccctgggtggtctggagaagaaaagaaatcattatgttgaaggaggtgatgctggcaacagggaggattacataaatgagcttattagaaggatgaattagttttttttccccataccgttagtgttaattttgacgctaaaacactctttttgtttatgcttttattattttgaatgatgtatgtgctgattgagatattaattcgttgcttgccattcaatgaaatgttccttagctttttgagataaaatacaaaaaaatgttagcctgttgagataagttcttatatttgaatttgataaaaaaaaaaaaaaaaaaaaaaaaaaaagaaagtagttatatcgg

SEQ ID NO: 35418 - DNA, 534 bp, Glycine max
  Clone ID: PAT_MRT3847_131986C.1
aaaatcgtgccgaattcggcacgaggcaagaactctgcatctggggagtcacatggaactaagaaacctagtaaagttgattctccatcctcagtggaatccttaactatgaagaaaaaaggttttggtcgaccaaaaaaggttggacgtggggctgcaggtcagaggcctgcaatgccaatgaagggaaagaaaagagttaggacaaagtgatagtgctttagccaataggtttctttgtacaaagtcttttccttttggttataagaatatttttttgtttgctttaatgaagcacctagtctcatgcaacaaccaaaaggatctttgataagctgcagagggaaactaacaacaatatatggaatagttctgaactgtagtaactaacatggagaaattccaatggaagtagtcactccttttctttttattttattttatttttatttacagcatttaaatgttgctgtaaattgtaagtacgaattttgattgtaccaaaagtgcactaattttgatggatgagcatgt

SEQ ID NO: 35419 - DNA, 214 bp, Glycine max
  Clone ID: PAT_MRT3847_131987C.1
aaatggcaatcagcaaggaccacctttcatggctaagtactcttggataaccgggggtgaattattaccgtcagggaaaggttaaaacaacccctatctgttagtgaaatataacatgaaacctttagctcccaatcaatgtgaggagtctcaaaactattaccgcgtgccctttgaataaataacctacgactcataggcaatggcttggtta

SEQ ID NO: 35420 - DNA, 468 bp, Glycine max
  Clone ID: PAT_MRT3847_131988C.1
aaggtgtgcacttttattcaactggtctcaagtcagtgtacaggtaagccctggctgcctccacccactcccagggagaccaaaagccttcatacatctcaagttgggggacaaaaaagggggaagggggggcacgaaggctcatcattcaaaataaaacaaaataaaaaagtattaaggcgaagattaaaaaaattttgcattacataatttacacgaaagcaatgctatcacctcccctgtgtggacttgggagaggactgggccattctccttaaagagaagtggggtggcttttaggatggcaagggacttcctgtaacaacccatctcatatttggaatgactattaaaaaaacaacaatgtgcaatcaaagtcctcggccacattgtgaactttgggggatgctcgctccaaccgactgctgggaccttcaccggtccagtttttaaatcctgagtcaagcc

SEQ ID NO: 35421 - DNA, 454 bp, Glycine max
  unsure (1)..(454): unsure at all n locations
  Clone ID: PAT_MRT3847_131989C.1
cttcacataaattgcatttctccactaaaaagtataatacaaactagtaattaatcacatagtactaattccatccattaaatactacttagacgaagagaataggaatgcagcaattaaaggccatgcatatatatgacctacaaaacatctctttcagccttctatgatttttgccacttgagacagtgcaacataggacgaaccaccttcggacaaagctttcactgcacttcgttgagtctcttttactctctcccttatgccattgctcttcccattttcatcaccctggataatctccctcaccatatgctctatctcctccctacgcaccaccttntttgtcggcaacaccggcgtcctcagcgcaaggcccaactcctccgccagaacgtcgggttcatcctttgctccgcgtacaacgggcacgcgatcaagggaacaccgttcg

SEQ ID NO: 35422 - DNA, 881 bp, Glycine max
  Clone ID: PAT_MRT3847_13198C.1
cccacgcgtccggtgaaaatggcgcagtgtgtggccaacacattcgtgcaaggaaaaccctttcttccagttgcagcagctcccactaaaaatgtaaccagaatttattacaattgaaattcacaacgtttgattcgtggagttaataacgttgtttgattgcagcaggttcggagagcggttcagtgcggtgtgtggtgcaagaagaaggagatacacccgcaattctacgaggaatcgaaggtgtactgcaacggggagctggtgctgacgacaggtgggacccagaaggaatacgtggtggacgtgtggtcggggaaccaccccttctacctcggaagccggtcggcgtctatggtcagcgacgaccaggtcgagaagttccgcaagaagttcggggagctcaaagagatcatggagattcctgttctcaagggagagattgttatcccctcaaggcgcaagggtgtttccaaaggaggcaagaaaaaataatctattctactcgaacaggattgtctcccataggaagatattaaggtttccttttttaatttcaatttctgtaatattgtaagacgctttaagcctgtgctatggatattgtttcgagcaagcccgtgaatgtggtaatgtgattgatttggtgattatgttcattttgagaaatgccatttttttctccagttcattaggagaaaaagattcttattagttcagaatcctatcgaaagataagtaaaataacatataaatggggaagtactacctggtatccccccctctctaaaaataccctattccccccccccccccctcctttccattccccttttttccctttatccccccccaaataccccctcaccccctcttccccc

SEQ ID NO: 35423 - DNA, 239 bp, Glycine max
  Clone ID: PAT_MRT3847_131990C.1
ggggcaaaaacttatcccatttaaaaccctggcaaagcatttcaaaagggcaattaacaggttttcctatcccgccaattgccccccaaacttaatccaaggttccggcccggttaaacccatcacagcttttaaaacaaaaaagggggaacccccttttttaccggggcggggttaataaaacaaaattttaaacccatttttggcctttttagggaaacccccctgggcctaaaaat

SEQ ID NO: 35424 - DNA, 232 bp, Glycine max
  Clone ID: PAT_MRT3847_131991C.1
ggcggtgtcgctgcatgtgggggaacacgtgcaggtggcttacacacaccacaacaaatcaccgaggcatcccagatcattggctggtaaggatgagaggttctgcttgtgtcagggggctctagacaatttgggcaggctgagacaacaggatggactggccaagggagcgcatgaagggatgatggtgattgaggcttacaaagctgtacatgatcaagcgccctgcccg

SEQ ID NO: 35425 - DNA, 313 bp, Glycine max
  Clone ID: PAT_MRT3847_131992C.1
aaaatactttcgaaagatgatatcctattgaaatggtggaactgactggcataaacttaagaattcaattatcgaaattgaatatagataatacactttaattggattgcacgaacggtattaaagaaatggagtactaactaccagttcttatttattattgaattaaccgctcaacttggctttgtatcgaacatttgttcgtgatctcaaaaattcttcggcaaaaaatttgaatctatttctatatgcgaatcaattctactactgccggtcctgaggtttcttagctcgaaaaagaatctgggacgta

SEQ ID NO: 35426 - DNA, 266 bp, Glycine max
  unsure (1)..(266): unsure at all n locations
  Clone ID: PAT_MRT3847_131993C.1
gagtaaaaaaaagcaaatggagcttggttcaaacctggaggaagcttgaccagaaacttttagccccaattnncccaacccatccccaaattttcaaatccaaactctaaatttgaagggcaatcaatcccaaggccggggggctggcctttttactcagggggggaaccatggaaaggcaggagggggcccacccaaacaggggggggctggccctccttgaaaaaagtctcaagggaagcataccctttagcattttaatactg

SEQ ID NO: 35427 - DNA, 500 bp, Glycine max
  unsure (1)..(500): unsure at all n locations
  Clone ID: PAT_MRT3847_131994C.1
gcatacatgtatatatattaancaaggaatggcatgtagctttgcctttcgatgatttgtgcacttctttttttatgaagagaatatagataaacggcttaaaaaggaaagtaaattaacaaaaaagaagaaagattatgaatccttctcaatttacaagaagctttggcctttaagtgtgacatacttatatatccatcttcatatatatgtgatgtgttcaacattcattgctgggttcatcaagttcatcaacattgtctttgctttgaattgagcccttctccctgtgcttgggaattagagtgcctccaatatggctagctgaagcaccagcctgcaatgcttctatgtacaaaaccttgattaaattcctgaatcttcttcgaaaagttggcattcgggacatggaagcaacaatcccctgcagccttctaattatggcttgcaattgcgctctcctgacagtatcatcagatgggaatccagtgctatcccac

SEQ ID NO: 35428 - DNA, 616 bp, Glycine max
  Clone ID: PAT_MRT3847_131995C.1
gagaaagctaggaagagaaaggaggaaaatattaaagctcttgcaattctcatgaactgtggagtcgtgttgggtttctattgttggggttgggagttcttaactgcccttcttctcttctctcatcaaccttattgatcattctcttcttcctcttcttcttcaaaaaccaatttctttttatacaaataaagaagataccaaagaaaaacatagcaaaaaaataaaaataaaaaaatggaaggaacaagcaataaggggttgttggaatgtggaaggaagtgcactccaccgccgtttttgttgaagacttatatgcttgtggaggatccggccaccgacgacgtcatttcgtggaatgccaaagggacggcgttcgtggtgtggcagccgccggagtttgctcgggatctcctcccaacactcttcaagcacagcaacttctctagctttgtacgccagctcaatacttatgtacgtttcggaaagatattgcactctattaggataagcatatgattgcatcaagaaattctgcctaggggtattgctttaacaacttgaacttatattaaggatgtaacctctattaaacaaaaagttgcggacagggggg

SEQ ID NO: 35429 - DNA, 326 bp, Glycine max
  unsure (1)..(326): unsure at all n locations
  Clone ID: PAT_MRT3847_131996C.1
aatcaaaaaaaangaattaaaagcaaaaatagtgacgtgggaaagacatgatgtaggggtaaccactcgacatgctttgaccctatcaatcaaacgtttaataatactttctcggcccttcactgtccaaagaaatgatttatatgtccatgaatgtttcccctcttagaaaatgaccgttctctgtccttatgagctaactttaagagtatcacccgagctactttaaactatttaactactgtaatgataaattcagacataaaagcttttaattagaccactttttacaccttacttttgaaattcggctttctcagcaaatt

SEQ ID NO: 35430 - DNA, 218 bp, Glycine max
  unsure (1)..(218): unsure at all n locations
  Clone ID: PAT_MRT3847_131997C.1
gcaacatngnngcttccatnncatcactgtcactttgctttccagcaacctcggtagagtctttttgcagccaccagcggcaaagcggtgcctggtgtgaagccaaagaagagaaacggtccttcttcgattgcgatcccttggaagggttgcaagaagggaagaccccagctgctagagactcgatcccaatcctcaaagaagggtggagggagaag

SEQ ID NO: 35431 - DNA, 218 bp, Glycine max
  Clone ID: PAT_MRT3847_131998C.1
aagggacccttgggcggaaccttgggttcccccacaaatttcagaccgggacccccgggggaacaccctttgcgtaacggggaaatactaaacctgggcgtaaacggggaaaaaattatctcctggggaaaagaaaaaaaagctcggaattcacaagaaaaaacgtgccggagggaaaaaatataaaaccgggaaaccaaaaaaagggggcccacccc

SEQ ID NO: 35432 - DNA, 460 bp, Glycine max
  Clone ID: PAT_MRT3847_131999C.1
tatttttttttttttttttctttatttttctgtacaacaagaatcattggaatataggacaaaaccttattttgaaagctgtttttgtcaagtaaaagtgaccaggggtcttcttcttgcacatgcttacctttccgtcatgcataccatatatatataggttcatgaataaatctaacatcccacgttccttgttgccacaacatcctgggattcttctgggcgtaacttttctttgcagaccatactagcccttttttgtgcttcccttggtcctaacatggatccttaccttatggcctttgctgcccttctgtaccaactcttcaaaactataagtgcctgtgtctgggctaccagtgagtgtgcccgggaagctacgggatgcactggctgtgatggacattgatggaagggtcacctctttggcagctgctggatgcattctggctgtgatcac

SEQ ID NO: 35433 - DNA, 398 bp, Glycine max
  unsure (1)..(398): unsure at all n locations
  Clone ID: PAT_MRT3847_1319C.1
ccacgcgtccggttttgcatgatgtccantggaggttcatatctgacttggattgattttctcctccttgctgacattggttcttgcattttcgccaatactaaaggcttttccctttgccttctctctcttcttggttctttaaatctgaagttttgtgttcactagcatttcatataatgctttgtatattgatcaactggagtcaacgggttgttgttcagatcaacatggattactcaccttgtccttttgtaattggttgaactgtaatttcagtttcataatctaaatttctgtaaactgtagcaacagtttcattatctaaactttgtgtaaaacagatgcattcagtaatatatgctattgtttttaccttcaaaaaannnaanannnaa

SEQ ID NO: 35434 - DNA, 400 bp, Glycine max
  Clone ID: PAT_MRT3847_131C.1
aaaaaaacgggaggttttcaaaccaattggttttggagaaggaaaaaaaaaaaaaaagggcccttttaccggaattttccttttcaccaaaattctgggaaacttacccctttgaccagggaaaagcaaattcgttgaccctactttaaaaaaactattcttcagggggcaaactacgggtgggctggttagtttttattttaaaaaaccccccctgtccaaggttccaacccaaaaaaaccttttttgtccaacacccatttcctttttttatttccctagttaagtttaaattacttttttaaggacttgaacatgaggcttcatggctggattctttaaaatatccaaggagggtttgggccttgatcttaattcaaaaaaaggcgttttgggaaaa

SEQ ID NO: 35435 - DNA, 596 bp, Glycine max
  Clone ID: PAT_MRT3847_132000C.1
ggagcaaataatagatccaacacttgctgggaaaatcagaccagattctcttaggaagtttggagaaacggctgaaaaatgtttggctgactttggtgttgacaggccttctatgggagatgtcttgtggaatttggagtatgctctccaacttcaagaggcggttgttcaaggtgatcctgaagaaaatagtacaaacatgattggtgaactctctccacaggtcaacaatttcaaccatgaagtaagtgtttctgctgcacaatttgaagctacaagtctggatgatctgtctggtgtatcaatgagtagggtattctcacagctggtgaagtctgaagggaggtgattttgagcattacatcttctaaatttgcattatattactctttttttattattattttagtggtttgtcttctgaacgggtagttctcagcctccttgcctgcttgaggcactttatagacttgtaaagaaaggtcaagttaatgaaacaagtttgcttaaatgtatcccaacaataaaaaaaaaaaaaaaaaaaaaaaaaaaaaaaaaaaaaaaaaaaaaaaaaaaaaaaaaaaaaacacccaagg

SEQ ID NO: 35436 - DNA, 1354 bp, Glycine max
  Clone ID: PAT_MRT3847_132001C.1
gttggtgatttagtttcattattaaattctgccggccccgtgaaatggcatatgcaagtagtacatctttgggagtgcgacttactgagggagaggggaatttgcccaagcttgtgctcacttccccggccggtagtgaggctgagatatacctgtctggtccttccattactccgggcagagtagaatagcagatggcgatggtttccatggcattcggtgtcagcactgcgacttttccgaatctaaacaggtgtcgtggagtggcatatgcaagtttgagcaacaaagcaagtactacatctttgggagtgcgagttacagagggagaggggaatttgccgaagcttgttctcacttccccggccggtagtgaggctgagatatacctgtttggaggttgcattacttcttggaaagttcccagtggtaaggacctcctctttgttcgccctgacgctgttttcaatgggaacaaacccataagtggaggtgttccgcattgttttccacagtttggtcctggtccaattcagcagcacgggtttgcacggaatatggattggactgttgtcgattctgaaaacacataaggaaatcctgttgtaactctggagctgaaggatgctccttatagtcgtgctatgtgggatttcagcttccatgctttattcaaggtcacactaaatgctaaaagtctagcgactgagttaacagttaaaaatacagacaataaagcattctcatttagtaccaccttgcacacatattttcaagcttctgtgagtaatgcatcagtaaaggggttgaaaggttgcaaaactctgaacaaagatccagatcctaaaaatccagtgtagggtaaggaagaaagggatgttgtcactttccctggatttgtagattgtgcttatcttgatgcttccagtgagttgcaacttgacaatggtttgggtgatctgatatctatcaagaacacattgatcagatgctgtgttgtggaatccttaccttcaaatggaagcatgctacaaagattttgtttgcgttgaaaatgctaagattggaagtgtccagctagagccagaacaaacttggacagctgtgcagcaccttagcatagcttgaactgtaaatgtgcttctacatcagcaattatttttgtcttatttgataccccaacaaatatgtatcttctgtattagtaattttctatgccactactagtggcaagggagggatagtgtacaagaggtaaacctcatttaaacctcattacgttcgtaacattattgtaacaacaaaaaggaataataatttattctttttctttttccaataaaaaaaaaaaatt

SEQ ID NO: 35437 - DNA, 1368 bp, Glycine max
  Clone ID: PAT_MRT3847_132002C.1
aatgacctaacttttttagaggagataaatttaattacagatttcggggggtgggggagtagaatagcagatggcgatggtttccacgtccgtggcattcggtgtcagcactgcgacttttccgaatctaaacaggtgtcgtggagtggcatatgcaagtttgagcaacaaagcaagtactacatctttgggagtgcgagttacagagggagaggggaatttgccgaagcttgttctcacttccccggccggtaggtgcgtaattctctataaaactattttcccttcccttcacaacactaccatgtgtgtacgttggttgaatctgtgggtgtgcagtgaggctgagatatacctgtttggaggttgcattacttcttggaaagttcccagtggtaaggacctcctctttgttcgccctgacgctgttttcaatgggaacaaacccataagtggaggtgttccgcattgttttccacagtttggtcctggtccaattcagcagcacgggtttgcacggaatatggattggactgttgtcgattctgaaaacacagaaggaaatcctgttgtaactctggagctgaaggatgctccttatagtcgtgctatgtgggatttcagcttccatgctttattcaagggcacactaaatgctaaaagtcttgcgactgagctaacagttaaaaatccaggcaataaagcattctcatttagtactgccttgcacacttattttcgagcttctgcaagtaacgcatcggtaaaggggttgaaaggttgcaaaactctgaacaaagatccagatcctaaaaatccagtggagggtaaggaagaaagggatgttgtcactttccctggatttgtagattgtgtttatcttgatgcttccagtgagttgcaacttgacaatggtttgggtgatctaatatctatcaagaacacaaattggtcagatgctgtgttgtggaatccttaccttcaaatggaagcatgttacaaagattttgtttgcgttgaaaatgctaagattggaagtgtccagctagagccagaacaaacttggacagctgtgcagcaccttagcatagcttgaactgtaaatgtgtttctacatcagcaattatttttgtcatatttgataccccaacaaatatgtatcttctgtattaataattttctatgccactactgtcgagggaaggatagtgtacaagagttaaacctcattacattcgtaacattatcgtaacaacaataaggaataataattttcttttatattctcaatgctaaaagacaacatttttctcagtttggtttctcccaacaggcagtgaaaaaccattattccatcttcccactttc

SEQ ID NO: 35438 - DNA, 351 bp, Glycine max
  Clone ID: PAT_MRT3847_132003C.1
ggctgtcatacaaactgccactaggggaaaaaaggataaaattactaaagttcccttctgcattgagcattgggcattgtgcattgtgcattgagcaaggtatatctatgtagaaataatatgaaccgatacatactatcaatagatttgacataagtcattaatacaaaaagtggcaatgatcacaaccttggttttgcatagtacacatgacttaagcgcaaataattattgcttctatatatgatctgtatggaggaggcaataaattgtgcatgctaacaaaaagatcacggtcgggcggagactactcaccaagggaatccaatactgaatcgggaataggtacaa

SEQ ID NO: 35439 - DNA, 444 bp, Glycine max
  Clone ID: PAT_MRT3847_132004C.1
aaaccgggaaacacgtttttattattttatttaacccgttttctaaaatacaggggaaaaaaaggggacttccttttgggggacaaaaaaaacgaaggggaaacctcacgggaaaaaaaatttaacaaaaacataagggtccccccttattacattggatatcatggggggggggggaccacatcattaaacaattagttttttggtggccccttgagctacaacagcatcatcctttgccaaaagtcttactcctgagggggcaccacatggttctcaattttttttgggggggttccggtctccaccttcgccatttaagcttttggcaccgggggtggaacatcccgggatctcttggatatggcactttgagaaaaggttcttggccttcctcccaagaggagggaaaacatacccccaaaaaaaggggccgcgggggaa

SEQ ID NO: 35440 - DNA, 529 bp, Glycine max
  Clone ID: PAT_MRT3847_132005C.1
ggctcgagctactcataggaggccacttggacctaccacagacacccgctcagctaagctggtataaggtgagttaagctacctttcttgaaccataggattccaaccaactctggcctgttactcaggctctctacatatgctatctatatgtctatcatcacatgagtccttaataagctggaacttggtcacagctgggtcccatcactgtgaggagagatattcatcctgagggaaaaatgacagaggagcaatccaggaaggtggctgagactgaccagtagaccctctaatcctgcgcctgaacctgctgtatgtgcaaaggaggatgtggcagaggagaaatctgctattgacacacccctctccctcttctgctgatgagatcaacgctgttgtgatagctgccaagactagtgtagccgctgaaaagaaaccgattgaggggtctgcgcaccgagatgctgcgcttgcgagagatgcaaccgagtagaggctgtcactcatcaaagcatgggaagaaagt

SEQ ID NO: 35441 - DNA, 261 bp, Glycine max
  Clone ID: PAT_MRT3847_132006C.1
gggggaaacctttttcccctacgcattttctaatggggatataacccccctttcggaggttatttaaccctccaaattcaggttttttccaattttaattacccggcccaaaattaaaccctccattttccaaagtacccttaaagggtaaggacccccaaattttacccaattctttgaaattgtccttaataaaacaggccgaatccaatttaataataattttttttttcccctttttgtggttttttccaacccgtc

SEQ ID NO: 35442 - DNA, 213 bp, Glycine max
  Clone ID: PAT_MRT3847_132007C.1
acaagatcttgaaggcaaagactctgatgactactagataacactacaagctgaaaatcaagttgaattctatggaagaaatcaacatggtggcagtgatgtttacctgcctgatccgagaccagaggaagccacaccgcctctttccaatatccgctccaccttgcccccacccccctcccccccttctttactctccgtcccccccccctc

SEQ ID NO: 35443 - DNA, 283 bp, Glycine max
  Clone ID: PAT_MRT3847_132008C.1
aaaacaaaaagatcacagtttcttattattcttttttttccctatccaaatacataccacaaacagttttatcaaacatgacgacaagaactgcttataaaaacttaaagggaaacaaacccatttttttcaaaattgttttttttttttttaaggactggcttataaggggtgggagggttttatttgctgctgcttaaccctgtctgagggatgctgaactgaaccttcctgcattataataacctgggactgggaaggcattgggggggccataagttga

SEQ ID NO: 35444 - DNA, 374 bp, Glycine max
  Clone ID: PAT_MRT3847_132009C.1
ccgcccacgcgtccgaccacggcggggcccacgggggcgaccacgcgctcggtttatcagaagcaccagtgggctgatctacacgggagtcctgaggatcagatggctcaacctggatcggtgaccaaggctgatacagtgccgtgctctgaggcagggccagacattcatctcacagacgttggaccgagacctcatgatcatatggccgagaatgatacaactaacgagaacatattatgtggaccattctgtggcagtttccagccatcaactaactcactatgagacactgttctatgaacagctcgccaagtttgattggttgcctcactatgggctgcaaactagggaaacactacacgatcatccga

SEQ ID NO: 35445 - DNA, 1359 bp, Glycine max
  Clone ID: PAT_MRT3847_13200C.1
caatatcagacgattttcgcttcttttgttgatctaaaagctaattagaaatttcctattgcaaactaacgtctctagtgactaagtttctgagagtcttactcgttttgtttttgttctctctaatctcttggttcgcgttgcttattaaatgattttgtatctttggttctcttttaggatcaatggattttagtgatttagctcacaagttctctcgttgtattgggactattggaaatctcgggcttcaactgctatggtaatttcaaggaattattctcagcgaatgttatttcatatcagtcgtgggtaatttgttaaaaagctatttcatcttacttggattgttaaagaaatacaagtctctgcaattaccaggggttacctactttgccaatctcctagtctgtaaaagagctgatcagttctcatgagttgttccacttttcctgtggctggtcactggggccgcgctggtggtgcgcctctctgtcttgatgggagtattgaagaagtctaaggaaaccatctttaaagaattgaagaatgcaaaatccattgaggaagttaatgaagttgtcgcactccatgatccactcgagccgattcggctcgagctttcttatgcggatgggaaggaggcagtggccaaagcagctaacttgatttttgtggagcacttgaaacgacataaattgggtggagaactagatctaatcttgttagaacctcaattgaatgaagcattgcaaattgttggtagcaaaggtcctgagcctgaccttttactggtttatggacctgtgaggagccatcttggttttcctgcatggagacttcgttacacagagatcatacacatgggatcattgaacttcttgagatatggttccttaatgaaagccatttacaacttcacgaaagtgcaccaaaattatggtacgtagaaaaggaatttggaggtagttaaatgcacaagcacaaagcataggcgtgaagaatagaaaaatatctagctaaatatatttgtggaaaaagggctttctcactagtggttttacttactctaaatgtgtcaatcatcatgcatgagagatagaattgcacgtcatgaccgggttgtaccaactgttaattttttttttttttaagatctggtaatttaaaaggtggattgatctggtaatttaaaaggtggatttttatttgatgccgccaccaccacaacgggagattcgtatggcggataaattcctcctcccagttatatcaaagccagcagccagattttgtctagacatgatcctccgttgaatcaatattataagtcaatataaattagtaaattatgtgttt

SEQ ID NO: 35446 - DNA, 129 bp, Glycine max
  unsure (1)..(129): unsure at all n locations
  Clone ID: PAT_MRT3847_132010C.1
aggcgnnncacaccccgaaaacccttaatangaatagaaagatatgggaaattttgcatgtaaggccatgaaaatcccactcccagattttcattccttaaccgcgaccgccacgcccagcataaaccc

SEQ ID NO: 35447 - DNA, 216 bp, Glycine max
  Clone ID: PAT_MRT3847_132011C.1
gaagaattgttttcttcaccatcccaattagcttcaatctttctcctatcacatccacaattcaacgcatacgttctaatcaagagcctgagggtgtttcaataattcatactattgactaatatgctttgagtcaccttaatgaatctaagagaattatcttaccctcttctactatgtgaggtcctaatcttcacgaaaatgaatactaatata

SEQ ID NO: 35448 - DNA, 626 bp, Glycine max
  Clone ID: PAT_MRT3847_132012C.1
tcctaatggcccctaatccaacaaaggtgaagacgttgaagttcaattcaacagttcagattgtgcttcagaacacggccatcattgccgctgagaatcaccctattcactttcatggcttcaattttcatgttttggctcaagggtttgggaaattacaacgccactagagatgaacccaagttcaattttgtgaatcctcaaatacgtaacacaattgctgtgccggtcggaggatggtccgtcattagattccaagcaaataatccaggtgtttggcttatgcattgccatttggaaactcatttgccgtggggactatccacggctttcgaggttgaaaacgggccttcaatcagagtgcctccgccaccggctgatcttcctaagtgctaaacgcatgccattcgttcatgaactatataccttacatttttagattaaaataaaatatagattggttaatgtttatacacatattttcgtaatgtgggtttctgattaatttgtttgattgagaaaaataaagtgtaataaaggacgaaagttaggctattctttcaaccgtaagtgtgacttggtagccacttctctgaaataacatatgttactttgtcattttaacc

SEQ ID NO: 35449 - DNA, 1122 bp, Glycine max
  unsure (1)..(1122): unsure at all n locations
  Clone ID: PAT_MRT3847_132013C.1
cgcggnntggcgaattgatcataactcttcctttcctttatcgtttcatttagaaaacatgggcaccgtgaacactgtcactcctttctctccccccggtaccggtccgcacagagtcatcaatctatcataactcttcctttccttttatcgtttcatccagaaaacatggatgccatgacactgtcactcccgctccctccggttccggtctgtacagtgcccgcgtctgcatcaacctcgtcctctgtttctctcactcactcctggtcggccacggccaggcagaggctctcctctcacagaacaagacccattttccggaattattcctctgcggttccaaaacttacagtggtgacatgcggtgcggctgtgacggagatcaacgagacccaattcaaagacacggttctgaaggctaaccgtccggttcttgttgagttcgtcgctacttggtgcggtccttgccgtctcatctccccctctatggaatccctcgctaaggaatatgaagacagattaacggttgtaaagattgatcatgatgccaacccacggctaattgaagagtataaagtttatggactaccaacattaatactcttcaagaacgggcaagaagttccagaaagcagaagggaaggtgcaattacaaaagtgaaacttaaagagtacgtggatgctctattggaatcgatatcagtttcatagtcatcatattcatatatgtttcaaagttctgacctgttctgggagacttgagatataggagcatatctgtttgtttccatatccttgtattgtatgaaacagtttaacaggcttatacagttgtataatctatataatttctgaagctgtaaatacagcataatgtggtgaaggaaggataaacttaagggtttctacacggggttggaactcattcattttaaatccaaaaataaaatttgatcgagtcaaatatgaagaaaaataaaataaaaattgaaaaaagataagtatttggcaggataattgggttccaaactgtggtggccttgttgattgcttaattgaggaggttggtagtatttctttggacataaaggtgttgaattcagtcagagactttattcc

SEQ ID NO: 35450 - DNA, 517 bp, Glycine max
  Clone ID: PAT_MRT3847_132014C.1
gaagtcatgacgaattgatcataactcttcctttcctttatcgtttcatttagaaaacatggacaccgtgacactgtcactcctttctctccctccggttccggtccgtacagtgtccgcgtctgcatcaacctcgtcctctgtccctctcactcactcctactcctgctcggccaggcagaggctctcctctcacagaacaagactcagtttccggaatcattcctctgcggttccaaaacttacggtgacatgcggtgcggctgtgacggagatcaacgagacccaattcaaagacacggtgctgaaggctaaccgtccggttcttgttgagttcgtcgctacttggtgcggtccttgccgtctcatctcttccgccatggaatccctcgctaaggaatatgaagacagattaacggttgtaaagattgatcatgatgccaacccgcagctaattgaagagtataaagtttatggactaccgacattaatactctttcagaacgggcaggaagtt

SEQ ID NO: 35451 - DNA, 1353 bp, Glycine max
  Clone ID: PAT_MRT3847_132015C.1
cgaactcatcatttctaattgttctgatccatatatatcatactttctttgtaataacttaaagaaccccacaaaaacaccaaccatgtccacaattgcaaagagagatttgagttctaatgaagaagagagtgagctgagaagaggtccttggactcttgaagaagacagcttactcatacactatattgctcgtcatggtgaaggccgttggaatatgttagccaaaagtgcaggattgaagaggactggaaaaagttgcagacttagatggctgaattatttgaaaccagacattaagagagggaacctcactccacaggagcaactcttgatccttgaactccattccaagtggggtaacaggtggtcaaaaattgctcagcatctgccaggaagaacagacaatgagatcaagaactattggagaacaaggatacagaaacaggcacgccaacttaacattgaatctggtagcaagagattcattgatgctgtcaagtgtttttggatgccaagattgctccaaaagatggaacagagcaattctccaagccctcatcactcttccatgacaaacatgatgaatttagggaattccggagaagcttctatgagttcaatgtcaagcagcttcaatattaatccttctatgtcttcttcctcatctcctccacaaagggaatttattatggatgatgcaaatcattttaatactatgtccaaccccatcaatccatccccagattccttccaattttcacagctacttgaaatttctgaacaccccaaaagtccttcaaatgtgtttgagaacaatgtttgcagttatccaatccaggacaattgctatgttgataccaataactatggcatggaaggcataaacatggatcccctttcagcaatggatacttacgacttcccacagtttgattttcagacagcaggaaatggatggatgctagacagcatgggggattctactttatggaacatggaggctatgtgacagtgttggcaagagaaggcatgcatctcaagctcttttcatcgtgggatgttatattatcgaaagaaaaaaaagtttgaagattcttatgctatactgattcttagtgtgagtatacattctcataggtagaaattagtactaagtgtaaggttatttgatatgaacctcttgaaatatagtattttaaatagaaaatgcaggagatggtattagagttcccctgtttcagatttattagaagttggaaaagttgtaatttgaccaagacagtgtatcttggctgttataagtggcattttgaacataattcgtttttattttaaaaaaaaataattata

SEQ ID NO: 35452 - DNA, 383 bp, Glycine max
  Clone ID: PAT_MRT3847_132016C.1
attaattgggagaatggcacttcgctgcttggggatgtccctttctgttctcttcactcttggtcttgcgagataaagccatgccatagacgatgatttttatggatgctgtttggccaaacactcccattccaagttcatcgggagatcttctttatcctggccctgcgagggttgaaatcgacgatcaccctatgcaaattgaagaaactcagtgcccgaaaaccctcttctataaagaagaccttcatccaggcaaaacaatgaaagtacaattcagcaagcctcccttttaacaaccatggggtggggggacatgggtaaaggaaacttaagaccctcctatagaaggatataggcttgaagagctctgcctcctgaaa

SEQ ID NO: 35453 - DNA, 353 bp, Glycine max
  Clone ID: PAT_MRT3847_132017C.1
cttacattattttttcttttttttaaaccattcttttcttttcttttcactgatccttgaatctggtaagactcaacttcaaccatacctggttcaacttggaccttcctccttatcccatccccaaaagggaatttttttttaatttttaaaaagaaccccccttaaaaaaaaaaaaaaggaacagggggcctaatttctttggctggaccacaaaatggtggggtggcttccaaatcattgggttcttacctttggcttgccaaagttagggtctttagaattagcgtttgcacagtccaacttttggagatttatgattagggtttttggaggggagagggattttgggg

SEQ ID NO: 35454 - DNA, 152 bp, Glycine max
  Clone ID: PAT_MRT3847_132018C.1
cttctgtgaatacctttgaacatttcattctcataaaatgatcttccggacaaagacgcgactgtttttcataagctgttgtgtacgtgggttccaaatatgtaatagcgggcatagtgctaaacaatgaatcgccctcttcggatttagtc

SEQ ID NO: 35455 - DNA, 951 bp, Glycine max
  Clone ID: PAT_MRT3847_132019C.1
gaaagaaaccaaagtccctttttgtccggtttctgagcctcccctcccctctctctaagatccccaaattgcttgtgaatgctagaaaccctagacagattcgattggatgcgctcccatttcacatcaagggcgagcgcattcggttcttgcaagcaagcctggtactaccgctgcctcggcctcgacccctgaatttgaaccattcatcaccacctttcttcattcattcacggttttccttttcgactcgatttgttgttttttttgttttgtttccttgacgatgttgacgatgagcaagcagaagaagaaccagaacgcgaagaggctgttgataagcatcaatgtgctggggagcgcggggcccattaggttcgtggtgaacgaggaggagcttgtggcggcggtcatcgacaccgcacttaagtcctacgcgcgtgagggcaggcttcccgtcctgggaaacaacaccaccggtttcgtgctttattgcccccatcttggatctgatgctttgagtccttgggagagaattggatcacatggggtgaggaatttcgtgctgtttaagaagccagagggtgtggcggatgtagatggaagtacagcactttctcgcagcagcagggggagtgggagctggaaggcttggttcaacaagtccctcaacctcaagatttctacccactaatgaataaatctctcggggaattgaacatgatgccttttgtggtgaatgccactaataatatccataatacgtagtatttcttttggttgtttttgttctcgctagccagagaaccctctctttaggaaattgttcaactttgacatttaggttttgattttgatggaatacaataagttttgattcctcacttccttgccattttttattcaattaaattaaacttaagatggtgaatgtgagctaatattccaagt

SEQ ID NO: 35456 - DNA, 557 bp, Glycine max
  Clone ID: PAT_MRT3847_13201C.1
gagaaaaaccatggcaataacactcaacaatggcttcaagatgcctatcattggattgggcgtgtggcgcatggaaggaaacgaaatcagggacctaattctcaattccagatctgtggataaaacatattttgattgattagatttggatgcgttgttggcttgttgcagctgactacaaaaacgaagcagaagttggagatgcgcttaaggaggcttttgatagtggccttgtgaagagagaggatctcttcattaccaccaagctttggaattctgatcaaggccacgttcttgaggcgtgtaaagacagtctcaagaagcttcagttaacgtatctagatttatatcttgttcactttcctgttgccgtaaggcatactggggttggtaatacttctagtcctttgggtgatgatggggtcctggacatagataccaccatatccctggaaacgacctggcatgcaatggaagatcttgtttcatcgggcttggttcgcagcatagggatcagcaactatgatatctttctgaccagagattggttagcatat

SEQ ID NO: 35457 - DNA, 258 bp, Glycine max
  Clone ID: PAT_MRT3847_132020C.1
tacgtgcgagaagacgacagaaggggaaacaaagcaagctaaacataagacgcagtgatggagaggatgaagagggtgcttctgctgcttctggccttcactgttcttctcatgttgccagaagcttctgctacaaagtttactgttggaaacaaccagttttgggacgcccatattaactacactgaatgggctataggcaacatttctacttggtgactgctctatttgtgtacgataggaccaacgagcgtgtgg

SEQ ID NO: 35458 - DNA, 320 bp, Glycine max
  Clone ID: PAT_MRT3847_132021C.1
gagaaaaaaaaatggattcatttttttaagggccaagcccaccataaaggaatttcacttgatacaagctaaagctaaaagggacatcaacatggatatttgaacacatcataaaacccctttccttattttctcccccaagggggggaaaaataaaaaataaaccgagttcataccccccaccctggcaagagggaatttatcaatcccgctaatgaaaaagtaccccaagtctaaatgatcaggggtcaaactggttatgcctgcctaaaagccaatcccaaattttatttgaatgggagggtgaaaaggacaaaatt

SEQ ID NO: 35459 - DNA, 1164 bp, Glycine max
  Clone ID: PAT_MRT3847_132022C.1
cttgcaacaatacataagcatcgaagttcaagcaagcgtggcccacgcgtccttgcttcgccgtgccctcacactcacactgttctgagatggagaataacgagattctagaggagcttctcaacatcgaggttgaaattcaagatgtccaagaacaaataagggctttgatcgagaggcaagagagtttgtacgagagaaaatcggagctgagtgctattctggaagcgtgtaaggaatctggaaacgaggccaataatgcggcttcgagcgctgcggaaaattggagtggggaatttgaatgggattctgaagctgatgatgttaggttgaatgtttttggcatttcctcctaccgtgcaaatcaaagagagataattaatgccattatgagtggaagagatgttctggtgattatggctgcaggtggtggcaagagcctctgctaccagcttcctgctgttcttcgtgatggaattgctctagttgtcagtcctttgctttccttaattcaagatcaggtaatgggtttgaccgctttgggcattccagcgtatatgttgacttcaactaataagggagatgagaagttcatatataagactttggagaagggagagggggaactcaaaatattgtatgtcactccagaaaagatttcaaaaagcaagaggtttatgtcaaaacttgaaaaatgccatcatgctggtcgtctctctctaatttcaattgatgaagcacattgctgtagtcaatggggtcatgactttcgacctgactacaagagcctcagtattctcaagacacagttccctcgtgttcctattgttgctttgactgcaactgctactcagagggtccaaaatgatctgatagagatgttgcatattcctagatgtgtcaaattcgtcagcactgtcaataggccaaacttgttttatatggtaaaggaaaagtcatccgttgggaaggtagtcattgatgaaattgcagaattcattcaagaatcttatccaaataatgaatcagggattgtatattgcttctcaaggaaggaatgtgaacagattattttaggttgcaaaggagttgagggagagaggaatttcagctgattattatcatgccgatatggatgtaaatgctcgggaaaaagtccacatg

SEQ ID NO: 35460 - DNA, 486 bp, Glycine max
  unsure (1)..(486): unsure at all n locations
  Clone ID: PAT_MRT3847_132023C.1
tcctctatagctgccgccctttgtgttttttttttgaggatgaaaatgagattattgatggtgaaagaaggagatgaagatgcccacaaccagaaagaggactcctaagggtgcgtagatcgcattcaaatccttaaaacaaaaactaaccggatgaccaacgaataacattccaagaacgagttggaagncgattaggatcgcaattcgggagcacccccgccccggggttctcttctttcttcttcttctctctgaattctctcaaaggtggaccttggaaccctttactcatcctcccccacacctatttatagcaaaagatggcattaggagtcatggcagctcacccacgccagctatatcttcaacctgaagtaactttgcttgcccaggccagctaattatttcacccctcaactattttggggcctaaccgagccaagggctagccctgggttcagaaaaaaggcctaaaatgacccc

SEQ ID NO: 35461 - DNA, 194 bp, Glycine max
  Clone ID: PAT_MRT3847_132024C.1
cccacgcgtccgtacagctgcgagaagacgacagaagggtgactagggtaccttttactttgctgcgaagtctacaatagtacctgatgatacgtggattgcctctagaatgagagttgaatacaggctcggataggttctgtaaagtaggacggcatgagttggtagtgcatagactgctattattacttttg

SEQ ID NO: 35462 - DNA, 529 bp, Glycine max
  Clone ID: PAT_MRT3847_132025C.1
aatatacttcaatatgctaatcatggaagtttcacttcgtggcttacttggatttgtcttcgttcttctgtggaggcaaaaatacaagagcagctaaatgtgcggatgtattctatttgaatgtagatagagctccgtcatctgtaaacattttacaatatattcttttgtttggcaatcattataggtgttattaaaattttgttggcatgtatgccccaaattaagcacattgagtaagaaatatacgagtgtttggtaaactgatatagagattcacaatatttttgtagtttctaagatacaaatagagggatacagaaatatctcgtttctagatactgtagtggacaaggtaccaaattaatggtagcatacgagaagtcctttgttcgcttacgtgataatgtaagctttttgatattgtaatatcaaaattgattgtttttaaagttttatgtgagagaatttttttaacaactaaaaaaaaaaaaaaaaaactcgagactagttctctctctctctctct

SEQ ID NO: 35463 - DNA, 293 bp, Glycine max
  unsure (1)..(293): unsure at all n locations
  Clone ID: PAT_MRT3847_132026C.1
gtggagggcacacctagctagctcactagcttgcatgcacagaaactgaggcaaagcgaggccataccctcatgtggtcgccacggtttcactcttcctccncactataaccctatccgctactcacagaagcaccactgcccaagacatcgcgagaaaatccaaactcggagacaacgagcctctacgcactgagaataagttcaaaggattcatagagaattactggaggagctactccacagaggctgaatatctgcgcccattggagattttctcccagaacatagtca

SEQ ID NO: 35464 - DNA, 451 bp, Glycine max
  unsure (1)..(451): unsure at all n locations
  Clone ID: PAT_MRT3847_132027C.1
acgcccccaggaaccggaccggaaaacccgggcgacccacgttttgacncccactttctaggccaagcaagagaaagccgggcgcagagagggaaaaaatttggcaggccgataggccaaacactcccataccaagatcattgcgagaacatctaaagccaggccctgcaagagtcgaaaacgaagaccaccctatgcaaatagaagaaacacaggacccgaaaaccttcttcaaaaaagaagacctacatccaggcaaaacaatgaaagcacaatacagcaagcaaacacttccacaaaggaggggaacgtagggcaaggcacgggggaaaaaaagaccccaggaaagaaggaaccagaggaaaaaagcgaggcagcacaaaagaacccagcgaaggagaagagaagtcagagcaaaacccaggggaacagaaagagggcacgccacaac

SEQ ID NO: 35465 - DNA, 294 bp, Glycine max
  Clone ID: PAT_MRT3847_132028C.1
cattgttgtaagtgcttgtaatccaaaaaattaatgtgaaatcatgtgttcattcatccaacaaaaataaatgtggttaatattttgactaaaaaaaaaacaaaaaaaaaaaaaaaaaaaaaaaaaaaaaaaaaaaaaaaaaaaaaaaaaacacaagaaaaaacacaaaaaaacacaccaagcagaacaatccctgtagtgacaaaataatataatagtgcacgaggcttcgcacttatcgcccttgacgaacaaaagcgcagaacggaatggccaatgggactctccatgaag

SEQ ID NO: 35466 - DNA, 290 bp, Glycine max
  Clone ID: PAT_MRT3847_132029C.1
attgttgggaaaccccctaaaagaaaccgcccattgtgctacggggggggggggggactgccggacttctccaggggcccccaaaaaaattggtggaccaaaaaaaagggggagaagcaaaaaagggcccctagaaaaatgggcccaacatttaaaacctttttaggcgggggaaaaagacgcaaagggggaaagaaaaaaaacccgggggcgccacattaaacctgatgatggaaaaaagtctcttgactaccaaaaaaacggggagcaaatcgggacaaaaaagaaat

SEQ ID NO: 35467 - DNA, 672 bp, Glycine max
  Clone ID: PAT_MRT3847_13202C.1
aacctcgccaagttgaccctcttcaggcaattctacattgttgtcattgggtacttgtacttcacccgcattgtggtctttgctttgaagaccattgccgcttataagtaccagtgggtgagtaatctagctgaggaggccgccagcctcgcgttttatgtcgtcatgttttatatgtttaggcctgtggagaggaatgagtactttgtgctcgatgaggaggaagaagaggccgcggagatcgcgctcagggatgaagaatttgagctttgaaagaatgaaatagtttcgctttaccgaatttcaggttcttcaatgactttgctgctctacttgctagttgctgcatctgctgtttagagatgtgttgatactggaatactttctgtatgtttagtttttttgtttttcttttgcaattctgataaatgtattgtgcgggatagaaaaaagtttgataatgttctcactcaaatgccactttaactagaggagctgtactgtaccgtacacactcaattgttactgggttattttgttactcttatcattgttctttcaactgaattttacatgatgtttgattctatattgtatggtcagaatgaatactgtacaattcttagtttatcaacttcttttcacaaatcacaaaaaaaaaaaaaaaaggaa

SEQ ID NO: 35468 - DNA, 793 bp, Glycine max
  unsure (1)..(793): unsure at all n locations
  Clone ID: PAT_MRT3847_132030C.1
ccacgcgtccgaaaagctatggcacatgctgacaagctcaactgtctcccccacatattcaagagagattgctggtaatcctttaattgctcctcatcttcacaagttccatggtataataaatggaatcgacccagatatatgggacccgtataatgataaattcattcctgtaagtagacatatatacagatgtttcttattcttttcttacataggtcctacaatggcgcagttatcaaagttaagtcccaacattgtggctgcttataaactgtgtacctactagaaactaaagctagataaatgctgataattggtgtttatcttcaccttttacttcctttggataaccgtaatgactgctccatcctatactggttcttaccagtgcctttaaaataatgcaactaattaggtgagcatacttgcctcatgtttattctgttaagttgcgcttgagtgtttgggatgaatcatcaatatgaagaacatatcaactggaatattgatattgcttaattgttgcaattccaacagtgcacaactgcatacattaccctgaccgagtttaacatagaaaagttntaactaggacttcttaaatgcaatatgcaaatggattgagggattcttttattcagttgagttcattaatgactacaataagtcattagcatatctncgtccccttataacccatgcctgtacttatcatatagagttttttatttaatttccactaattcaatatgacttgntccatatcacactattccagggatcatactca

SEQ ID NO: 35469 - DNA, 1134 bp, Glycine max
  Clone ID: PAT_MRT3847_132031C.1
tgtttcgtgcaaaaacaagttgtctctctacactccctcattttctctctctagctttttagagagagaaagatcatatcccagaagaagaagaagaagagtctgaaaacatggagaagaagagatttggtgtgttgatgtgcgcagaggattcagagtacgtgaagaaagtgtacggaggatattctggagttttcgtgagaatgctggcggaggagggagagacatgggacgtgtacaaggtggcgtgtggggattttcctgatgaagatgacttgggtctctatgatggctttgtgatcactgggagttgcagtgatgcacatggcaacgacacatgggtgaatgatctcctcaacttgctccgcaaactcgattccatgaacaagaaaatcctcggaatttgcttcggccaccagatacttgggcgtgcattgggagggaaggtgactcgttctcctactggatgggaccttggtgtcagaaccataacactgtcaccatctttgccatttgctttgatttctcttgatcttccatcaaggctttccattatcgaatgccacagggatgagatccgagagctacctgccaaggcagaggtgattgcttggtcggataagactggaattgaaatgtttaggtatggagatcacattatgggaatccaaggtcaccctgagtactccaaagacattctttttcaccttattgatcgtctcattcaacgcaattacatcatagatgctttcggtaagcaagcaagggacagggctgcattgtgggagccagatagggaagcttggaagaaactctgtgtcacttttttgaagggtcgattgtgacataaaaatggcattgaaaagaggagttatagttctgctaagaagcgataatattaaaaagtagtcgtatggatgagggtgatcgatctatacataaaagttataggttggtggcactaatgtgatctggcatatatatgcacggctttgcactgttaattattagatggctttgttaggttgccagccattaagtgttgatggggcattctatctaagctcaactaaatcaatgatcaaataattatatacagcaataaaatgtttcacttttctcccccgttttaaa

SEQ ID NO: 35470 - DNA, 594 bp, Glycine max
  unsure (1)..(594): unsure at all n locations
  Clone ID: PAT_MRT3847_132032C.1
ggacagtgtaattgtccctgctttagcactgagctatcaccacctcccttcccatctcaagagatgttttgcttactgccttatttcccaaagattatgagtttgacaaggagtgtttaattcagttgtggatggctgaaaattttctacaatgtcatcaacagagtaagagtccagaagaagttggtgaacagtacttcaatgatctattatcaagatccttctttcaacaatcaagcatcaatgatctatcaccaatatttttcttaacaagttctaggatcagaaacaagacttattttgtcatgcatgaccttctcaatgatttggcaaagtatgttggtggggacatctatttcaggttggaagatgatcaagcaaaaagtattccaaaaacagctcgtcatttttcatttgaaaccaacgacatctattgttatgatgaggagcttgggagttacatgatgttgaaaggtttcgtacatttatgccaacaagtaagagtatggattttctttactataggtggtattgcaagatgtcaatacatcaaattgttctccaaatttaagtttctacggnntttatctctgc

SEQ ID NO: 35471 - DNA, 347 bp, Glycine max
  Clone ID: PAT_MRT3847_132033C.1
ggtcatgaaaacacattttttctcgcagtgaaaaggaccacaaggacaccaaggcaaaccttggtaaacttggcccggacagctaaataccggcgccaggcacaaaaggcacaggggaccaacgaggggataaccccaatccgcgggcacgtgaccaaacgaacccaaccgactccggggcgaatcttcaaaagaatacggaccggcctagtgcacaaggctaccacacaatgagcatcacaaccccgggccacatgcagcaacaagcccagccccaaaacgaataccaggaacagcacctacaggacggcccaaatgaccgatgatatcgtatccccccgctccaa

SEQ ID NO: 35472 - DNA, 406 bp, Glycine max
  Clone ID: PAT_MRT3847_132034C.1
tatgggcatattgatcctttctttattctggggttgtagcttctggtgggcgggcttttattataaaagaactttttttcaggcttttctggttggccgctgaccaccccccccccaaatggaaaatccgcccaccttacgccccgcgggggaatatcccacctaagggggcccctataaaaacccccgccgatcccgaaaaaaacaattattgggggaaaaaacgggtttgaaaccccccgtacccctctccgcctttttttcaaacccacggttttttaggggggggcccggaaaaaattccctggggaactcggaaccctgggggaaaattggggtggcctctaatggaaaacccccccaaaccggcccttgttgggaagggggaccaatggccccctcccca

SEQ ID NO: 35473 - DNA, 428 bp, Glycine max
  Clone ID: PAT_MRT3847_132035C.1
acgagctcactaatctgctggcgggctgtcgttctttttttaccacatagaatttattgtcatttatgaattcattatgtcaatagtttatagaaaaacatggctaatgtaaatactgtattatacatataccaaaatatgtaccggttgtggtgaggatatgtttgccattaatatggtgctttaggatatagcctatagaaaactaactggcaatatatcatattatactaacttaaagttatattgtagaaatctttagtccacatgattattaaagcgaataattcattcgatgaaaggcttttcccggaaatagatcacatatgatgacacacagtagtaaataagttcaacagagagatggaggataaatgatggcttgaaactatcttggaccaaaagtacattccttagaaatgagagtg

SEQ ID NO: 35474 - DNA, 202 bp, Glycine max
  Clone ID: PAT_MRT3847_132036C.1
caaaaagcaatctagctttgcatactctacctctacttcacctcgttaccaaaactagcaatcatgtctgtcgagcccaagggagatgtcggactcattggtctggccgttatgggtcaaaacctgatcctcaacatgaacgacaagggtttcaccgtcgtcgcctacaaccgaaccacctccaaggtcgaccacttcctgg

SEQ ID NO: 35475 - DNA, 205 bp, Glycine max
  unsure (1)..(205): unsure at all n locations
  Clone ID: PAT_MRT3847_132037C.1
tccggtagntggtttcagttatgcatcctttatgttcagaaaacctgtccattgtggttcacttcttgctccaagatagacacacccttgggcttcattttcttgaccgtgcccaacaccttgtccacggatcagttcatttattaatgggaattttctgttttttgtgcttgtgttgttaattttcagtgtgtgtgtgtttgtg

SEQ ID NO: 35476 - DNA, 320 bp, Glycine max
  unsure (1)..(320): unsure at all n locations
  Clone ID: PAT_MRT3847_132038C.1
ntanatgttatgngtcgcangcacgcgtacgtaagctcggaattcggctcganctcgagccgattcggctcgagtacggctgcgagaagacgacagaaangaagaagttgcaggannaaaaaaaaaaaaaaaaaannaaaaannggggccccnnnntngtgnncnnntcgccccgggattnnttncnggccgggnncntcnnggggtccnantttncccnnnnggnagtnntttnnaanttnggnnaantnngggnnaaanntgttcccnatnnaanattnttnccnnnncaaanttccnccaagataacnnnnnaccat

SEQ ID NO: 35477 - DNA, 671 bp, Glycine max
  Clone ID: PAT_MRT3847_132039C.1
aaataacacacacccacacccgcatccacatccacatctctcacccccgccacaaccacaacaacatcatctccatcactttccagcaccagcttcattagcaatggctcgcacaaagcagaccgcccgcaagtccactggtggcaaggccccccgcaagcagctcgcttccaaggctgcccgcaagagcgccccctctaccggtggtgtcaagaagcctcaccgctacaagcccggtaccgtcgctctccgtgagattcgtcgctaccagaagtcgactgagctcctgatccgcaagctacccttccagcgcctggttcgtgagattgcccaggacttcaagagcgaccttcgcttccagtcctccgccatcggtactctccaggagtccgtcgagtcctacctcgtctccctcttcgaggacaccaacctgtgcgccatccacgccaagcgtgtcaccatccagtccaaggacatccagcttgcccgccgcctccgtggcgagcgcaactaagctatccgcgtgatacccggttgcggataatgactcgttttgttctttgacacgatggaaatggttctggggataatcatggcgttacgatgagaaactggctttgctctacagttgggatgtacattaaacaatacgcagcctttgcatgctgctg

SEQ ID NO: 35478 - DNA, 588 bp, Glycine max
  unsure (1)..(588): unsure at all n locations
  Clone ID: PAT_MRT3847_13203C.1
gccgccagcaccggcatccacaaatagcattaatatttaagaattatatttaagaacaaaatgatggggggaaataaagaagggggaaacacccacaacacgaacatctcaccacaacaaaaacagggggggngncgcctcctttttttttttggtaaaaacaaaaaacccaccnnagcggnnnnnnnnaacaaaaaaagaangntntttttggttttnaaatattttggaaaaanaatttgngnnnnntgnnnngnggnaatgaggaanattcttcaaaacattgggnngtggntggggggggtgagggggagaaaaacagggggggggctcgggacaatggcgtcaacctgttcaggccgcatcttttgcctggattctgcatcatcaactggccaggcatacacctttttgttcctccagggcaaaactttggtaggcttttcatcattcaggggatgatagacaccaacaacctnaanacctttnattntaaaaaaatttnnnctaactccantaaaagggtcccgcataacaatgtagccaactgaaatttctgaggaggagtgaaatacctcccttgctaaa

SEQ ID NO: 35479 - DNA, 668 bp, Glycine max
  Clone ID: PAT_MRT3847_132040C.1
ccacaactacttctccatctccatctaccaacaacatggcccgcactaagcagaccgcccgcaagtccactggtggcaaagccccccgcaagcagctcgcatccaaggcagctcgtaagagtgcgccgtctaccggtggtgtcaagaagcctcaccgctacaagcccggaactgtcgctctccgtgagatccgtcgctaccagaagtcgactgagctcctcatccgcaagctgcccttccagcgtcttgttcgtgagattgcccaggacttcaagtccgatctccgcttccagtcctccgccatcggtgctcttcaggagtccgtcgaggcctacctcgtctccctcttcgaggacaccaacctctgcgccatccacgccaagcgtgtcaccatccagagcaaggacatccagctcgcccgccgcctccgtggtgagcgtggttaagcttctcaacaacacatcgacacgacatgacaacttcttcgggtcagtgattggattgtgtctttagtggttaggatatcaaggcgtttatagggtttcatggttcacggtcttcaactcggtttatgagtgcacacgagcggtgctgagcatgtagtatatccaggttaatcagtgatggtcactggcgatattatctcgaaatcaacagatttctacttc

SEQ ID NO: 35480 - DNA, 4431 bp, Glycine max
  Clone ID: PAT_MRT3847_132041C.1
ggctcgagatttatattgtcatgaatgaatgagactacctactttacgtgagtcagtttgccatcaatttaactagtttgagtttacattgtaattaatgttgagagagttcatcgcagtatgtctatttgtgatttccattgcaaaggaggaagccaccaagttggggacggtcattgggattgatcttggaacaacctattcatgtgttggtgtttacaagaacggccatgttgaaatcatagccaatgatcaaggtaaccgtatcaccccatcgtgggttgctttcaccgacagtgagagactaattggagaggctgccaagaatctggcagctgtcaatccagaaaggaccatctttgatgtcaagagacttattggaagaaagtttgaagataaggaggctcgaggggatattgataatggtgtttttgaggttcttgctacaaatggagatactcatcttggaggtgaggactttgatcagagaataatggagtacttcattaaattgatcaagaaaaagcatggaaaggatattagcaaggacagtagagcacttggcaagctgaggagagaggctgagcgtgcaaagagagctctcagcagccagcaccaggtccgtgtggaaattgaatcactttttgatggtgttgatttttctgagccactcacccgagctaggtttgaggagttgaacaatgacttgttccggaagaccatgggtccagtgaagaaggctatggaagatgctggattacagaagagtcagattgatgagattgttcttgttggtggaagcacaaggattccaaaggtacaacagcttttgaaggactactttgatggaaaggagccaaacaagggggtcaaccctgatgaagcagttgcctatggtgctgcagtgcaaggaagcattttgagtggagagggtggtgaaaaaaccaaaggtaccatagtctgtaaatattatttatggaagtagattgctaagcattacactttctaattgttgtgtggcaatctctatccagatatccttctcctggatgtggctcccctcactccacgcgtccgtggaaaaccttacatacaggtgaaaatgattgatggtgagactaaggtgttcagccctgaagaaatcagtgccatgattctgactaagatgaaggaaactgcggaagcattccttgggaagaaaattaatgatgctgtggtcactgtcccagcttacttcaatgatgctcagaggcaggccacctattgatgctggtgtcattgctggtctcatgttgctagaattattaatgaacctactgctgctgccattgcgtatggattggacaagaaaggtggcgagaagaacattcttgtttttgaccttgggggtggaacttttgatgttagtatcttgacaattgataatggtgtttttgaggttcttgctacaaatggagatactcatcttggaggtgaggactttgatcagagaataatggagtacttcattaaattgatcaagaaaaagcatggaaaggatattagcaaggacagtagagcacttggcaagctgaggagagaggctgagcgtgcaaagagagctctcagcagccagcaccaggtccgtgtggaaattgaatcactttttgatggtgttgatttttctgagccactcacccgagctcggtttgaggagttgaacaatgacttgttccggaagaccatgggtccagtgaagaaggctatggaagatgctgcttcactgaaaaatcttccactcctcaaacctattctccccccacgcgtccggtctgtgtgtgtgagagagagagcaatggctggctcgtgggcacgccgttctctgattgttctagccatcatttccttcggatgtctatttgcgatttccattgctaaggaggaagccaccaagttagggacggtcatcggcattgatcttggaacaacctattcatgtgtcggtgtttacaagaatggccatgttgaaatcatagccaacgaccaaggtaaccgtatcaccccatcgtgggttgctttcaccgacagtgagagactcattggggaggctgccaagaatcaggcagctgtcaacccagaaaggaccatctttgatgtcaagagacttatcggaagaaagttcgaagataaggaagttcaaaaagacatgaagcttgttccttataagattgtcaacaaggatggaaaaccttacattcaggtgaaaattaaggatggtgagaccaaggtgttcagccctgaggaaatcagtgccatggttctgatcaagatgaaggaaactgcggaagcattccgtcggtgtttacaagaataggttgttccaagatcaatgccgatgaccgtccctaacttggtggcttcctccttagcaatggacggtcatcggcattgatcttggaacaactattcatgtgtcggtgtttacaagaatggccatgttgaaatcatagccaacgaccaaggtaaccgtatcaccccatcgtgggttgctttcaccgacagtgagagactcattggggaggctgccaagaatcaggcagctgtcaacccagaaaggaccatctttgatgtcaagagacttatcggaagaaagttcgaagataaggaagttcaaaaagacatgaagcttgttccttataagattgtcaacaaggatggaaaaccttacattcaggtgaaaattaaggatggtgagaccaaggtgttcagccctgaggaaatcagtgccatggttctgatcaagatgaaggaaactgcggaagcattcctcgggaagaaaattaatgatgctgtggtcactgtcccagcttacttcaatgatgctcagaggcaggccaccaaggatgctggtgtcattgctggtctcaatgttgctagaattatcaacgaacccactgccgctgccattgcctatggattggacaagaaaggtggcgagaagaacattctagtctttgatcttggtggtgggacctttgatgtcagtatcttgacaattgataacggtgtttttgaagttcttgctacaaatggagatactcatcttggaggtgaggattttgatcaaagaataatggagtacttcattaaattgatcaagaaaaagcatggaaaggatattagcaaggacaacagagcacttggaaagctgaggagagaggctgagcgtgcaaagagggctctcagcagccagcaccaggtccgcgtggaaattgaatcactttttgatggtgttgatttttctgagccactcactcgagctaggtttgaggagttgaacaatgacttgttccggaagaccatgggtccagtgaagaaggctatggaagatgctggattacagaagagtcagattgatgagattgttcttgttggtggaagcacaaggattccaaaggtacaacagcttttgaaggactactttgatggaaaggagccaaacaagggggtcaaccctgatgaagcagttgcctatggtgctgcagtgcaaggaagcattttgagtggagagggtggtgaagaaaccaaagatatccttctcctggatgtggctcccctcactctcggaattgaaactgttggtggagtcatgacaaagttgattcccagaaacactgttatcccgaccaagaaatctcaagtgttcaccacctaccaggaccagcagactaccgtctccattcaggttttcgaaggtgagaggagtctcacaaaggattgtcgccttcttgggaaatttgatctgtctggaattccaccagctccaaggggcacccctcaaattgaagtgaccttcgaagttgatgccaacggcattctaaatgtgaaggcagaagacaagggaactggtaaatcagaaaagatcaccattacaaacgaaaagggacgtcttagccaggaagaaatagatagaatggttcgtgaagcagaagagtttgccgaggaagacaagaaggtgaaggagaggatcgatgctcgcaacagtcttgaaacctacgtatacaacatgaagaatcaggtcagtgacaaggacaagctcgcggacaagttggagtcagatgaaaaggagaaaattgagactgcagtgaaagaagcattggaatggctggatgacaaccagagtgtggagaaagaagattatgaagagaagctgaaggaggttgaagccgtttgcaacccaatcatcagtgctgtgtatcagagatcaggaggagccccaggtggtgcaggtggcgaaggcgaagacgaggatgattctcacgatgagctctagattagtctaaatttttatcatatatgggaaattaagaattcccctgcgctctgcgcttgcttttttggtgccgatgataagatacttgtgaaattacttttactttgttttttttgctt

SEQ ID NO: 35481 - DNA, 768 bp, Glycine max
  Clone ID: PAT_MRT3847_132042C.1
agttacatcccccttgggtgctgggatcatacagtgcaacttttcttcctcaggggggcaatgcctctcgcgataattcatattttctctaggaaaagtcatagcacgccgttgatcttggcagggagtgtaatcgatgtaacgagcatcacaaggttcaaaaaccttggattttgactcaaattcatcaattttgctaacctctccaccatggtgagaatcaaaactcaaattgggaactacattacagtctgcgcctttcttagtaatttccaatgctatactatctccctttccaaaaccacttctctgccatgcacccaatatatagaagaaacagcacataccaactactataaagatctgcacatggcttctagtcctaccattagctgaacttggttttgccatctagaaccaatcatatgaagctagagggaacaatggctatgaagatctgggattcctaagagaaactaattaagagagagagagaatcagagaggattttatgaaaaaaaaaaattggcaccaaagaatgattatccctgctgcatgggcagtgtgtgggacgtactaataaaaaatctgtatataaaccctatattatctgcttctatcagcatccaccatgttcacatgaacgaacaacagcagcataataataaaagacaaaagaaaaaggagaaagaaaataaaagaagaaaaaggggaatgaaaaaaaaaaactctatggattattattatgcgtcgcgctgagtagcgcga

SEQ ID NO: 35482 - DNA, 2458 bp, Glycine max
  Clone ID: PAT_MRT3847_132043C.1
gaattccggcacgagatcgtccatcgagaaaggaagaaaagaaacaaggtgacatcatcatggcttgctcgttttctcgcgggtctctgcttcctctcgccatcatcgtttccttaggatgtctatttgcgatttccattgcaaaggaggaagccaccaagttggggacggtcattgggattgatcttggaacgacctattcatgtgttggtgtttacaagaacggccatgttgaaatcatagccaatgaccaaggtaaccgtatcaccccttcttgggttgctttcaccgacagtgagagactcattggggaggctgccaagaatctggcagctgtcaacccagaaagggtcatctttgatgtcaagagacttattggaagaaagtttgaagataaggaagttcaacgagacatgaagcttgttccttataagattgtcaacaaggatggaaaaccttacatacaggtgaaaattaaggatggtgagaccaaggtgttcagccctgaggaaatcagtgccatgattctgaccaagatgaaggaaactgcggaagcattccttgggaagaaaattaatgatgctgtggtcactgtcccagcttacttcaatgatgctcagaggcaggccaccaaagatgctggtgtcattgctggtctcaatgttgctagaattattaatgaacctactgctgctgccattgcgtatggattggacaagaaaggtggcgagaagaacattcttgtttttgaccttgggggtggaacatttgatgtcagtatcttgacaattgataatggtgtttttgaggttcttgctacaaatggagatactcatcttggaggtgaggactttgatcagagaataatggagtacttcattaaattgatcaataaaaagcataaaaaggatattagcaaggacagccgagcacttagcaagctgaggagagaggctgaacgtgcaaagagagctctcagcagccagcaccaggtccgcgtggaaattgaatcactttttgatggtgttgatttttctgagccactcacccgagctcggtttgaggagttgaacaatgacttgttccggaagaccatgggaccagtgaagaaggctatggaagatgctggattacagaagaatcaaattgacgagattgttcttgtcggtggaagcacaaggattccaaaggtacaacagcttttgaaggactactttgatggaaaggagccaaacaagggtgtcaaccctgatgaagcagttgcctatggtgctgcagtgcaaggaagcattttgagtggagagggtggtgaggaaaccaaagatatccttctcttggatgtggctcccctcacccttggaattgaaactgttggtggggtgatgacgaagttgattcccagaaatactgttatccctaccaagaaatcccaggtgtttaccacctaccaggatcagcagagtaccgtctccattcaggtttttgaaggggagaggagtctcacaaaggattgccgtctgcttgggaaatttgaactgtctggaattcctccagctccaaggggtacccctcaaattgaagtgaccttcgaagttgatgcaaatggcattctaaatgtgaaggcagaagacaagggcactggtaaatcagaaaagataacaattacaaatgaaaagggacgtcttagccaggaggaaattgagcggatggttcgcgaagcagaagagtttgctgaggaagacaaaaaagtgaaggagaggattgatgctcgtaacagtcttgaaacctatgtctacaacatgaaaaaccaggtcagtgacaaagacaagctcgctgacaagttggagtctgatgaaaaagagaaagttgagactgcagtgaaagaagcattggaatggctggatgacaaccagagcgtggagaagagatatgaggagaagctcaaagaggtggaagctgtttgcaacccaatcatcagtgctgtctatcaaaggtcaggtggagccccaggtggtggtgcatcaggcgaggacgacgatgaagattctcatgacgagctctagagatgttgttgcttaagcagtagcattaaatgatgagcagtagtgtaggttaaacggagtcttcaaaattttgtaacaggtggaaattgacaatagtttccccagctcttgtatctttggtgccgaaaatactttaaagatgaatgcttgaatttgttttaggatcgctagttaaccaccgatacttcttcgcttcgaattaatcggttttatcttcatgctagggaggacggttggactcggaactacagccgtctacgtatgttggaattagtgtctgttacgtagattgagcttaaaattcagtctatcaaaccaaagtaactcttctaaagatcttttgtctgctactcttttaaaatttattttaattcattctttcgtgattctcgtca

SEQ ID NO: 35483 - DNA, 321 bp, Glycine max
  Clone ID: PAT_MRT3847_132044C.1
tggtcggcggccgcccttttttttttttttttttttttttttttgttttttttttttaaatcggtaaaaatgtgatttatatcaacacatcacattacatgggttttcccagttctggagaaagccatggtcatctgactcatctggaatgtgagctcttggctgactcatagcgctacatgagaaactcgatggggccttccaaatttgcaaaaggtgcccccttttagggccaataccctctttgaattctcgatcaaaacagagccaagtgaccgatttagccttcaatgggaccccccttgaaaggggcagaatttt

SEQ ID NO: 35484 - DNA, 3510 bp, Glycine max
  Clone ID: PAT_MRT3847_132045C.1
ggcacgtcgtgttgtgccgtcgaattcccagggtctcgggactaggcgagaccaattacaaattacactctttgcctcgcaccttcaacttaaccttttctactcataatcttaacaacttgctagaagaagataaagaaagagaaaaagtgtgtgtgtgtgagagagagcaatggctggctcgtgggcacgccgttctctgattgttctggctatcatttccttcggatgtttatttgcaatttccattgctaaggaggaagccacaaaattggggacggtcatcgggattgatcttggaacgacctattcatgtgttggtgtttacaagaacggccatgttgaaatcatagccaatgatcaaggtaaccgtatcaccccatcgtgggttgctttcaccgacagtgagagactaattggagaggctgccaagaatctggcagctgtcaacccagaaaggaccatctttgatgtcaagagacttattggaagaaagttcgaagataaggaagttcaaagagatatgaagcttgttccttataagattgtcaacaaggatggaaaaccttacatacaagtgaaaattaaggatggtgagaccaaggtgttcagccctgaggaaatcagtgccatgattctgactaagatgaaggaaactgcggaagcattccttgggaaagaaaattaatgatgccgtggtcactgtcccagcttacttcaatgatgctcagagacaggccaccaaggatgctggtgtcattgctggtctcaatgttgctagaattatcaatgaacccactgctgctgccattgcctatggattggacaagaaaggtggcgagaagaacattctagtctttgatcttggtggtgggacctttgatgtcagtatcttgacaattgataatggtgtttttgaagttcttgccacaaatggagatactcatcttggaggtgaggactttgatcagagaataatggagtacttcattaaattgatcaagaaaaagcatggaaaggatattagcaaggacaacagagcacttggcaagctgaggagagaggctgagcgtgcaaagagggctctcagcagccagcaccaggtccgcgtggaaattgaatcactttttgatggtgttgatttttctgagccactcacccgagctcgttttgaggagttgaacaatgatttgttccggaagaccatggggccagtgaagaaggctatggaagatgcaggattacagaagagtcagattgatgagattgttcttgttggtggaagcacaaggattccaaaggtacaacagcttttgaaggactactttgatggaaaggagccaaacaagggtgtcaaccctgatgaagcagttgcctatggtgctgcagtgcaaggaagcattttgagtggagagggtggtgaagaaaccaaagacatccttctcctggatgtggctcccctcactctcggaattgaaactgttggtggagtcatgacaaagttgattcccagaaacactgttatcccaaccaagaaatctcaggtgttcaccacctatcaggaccagcagactacagtctccattcaggttttcgaaggcgagaggagtctcacaaaggattgccgccttcttgggaaatttgatctgtctggaattcctccagccccaaggggtacgcctcaaattgaagtgaccttcgaagttgatgccaacggcattctaaatgtgaaggcagaagacaagggcactggtaaatcagaaaagatcaccattacaaacgaaaagggacgtcttagccaggaagaaattgagagaatggttcgcgaagcagaggagtttgcagaggaagacaagaaggtgaaggagaggatcgatgctcgcaacagtcttgaaacctatgtatacaacatgaagaaccagatcagtgacaaggacaagctcgctgacaagttggagtctgatgaaaaggagaaaattgagactgctgtgaaagaagcactggaatggctggatgacaaccagagtatggagaaagaagattatgaagagaagctgaaggaggttgaagccgtttgcaacccaatcattagtgctgtgtatcagagatctggaggagccccaggcggtggtggtgcatcaggcgaagaagacgaggacgattctcacgatgagctctagattagtcggagtctgttaaatttttatgatagctgggaattaagaagtcccctgcgcttgcttttttggtggcgatgataagatactttgtgaaattacttgtactttacttttttgcttagttttacgacgaaacttcttcagctgtatgaatgagccttgtttcacttctccagtgaagaaggctatggaagatgctggattacagaagagtcagattgatgagattgttcttgttggtggaagcacaaggattccaaaggtacaacagcttttgaaggactactttgatggaaaggagccaaacaagggggtcaaccctgatgaagcagttgcctatggtgctgcagtgcaaggaagcattttgagtggagagggtggtgaagaaaccaaagatatccttctcctggatgtggctcccctcactctcggaattgaaactgttggtggagtcatgacaaagttgattcccagaaacactgttatcccgaccaagaaatctcaagtgttcaccacctaccaggaccagcagactaccgtctccattcaggttttcgaaggtgagaggagtctcacaaaggattgtcgccttcttgggaaatttgatctgtctggaattccaccagctccaaggggcacccctcaaattgaagtgaccttcgaagttgatgccaacggcattctaaatgtgaaggcagaagacaagggaactggtaaatcagaaaagatcaccattacaaacgaaaagggacgtcttagccaggaagaaatagatagaatggttcgtgaagcagaagagtttgccgaggaagacaagaaggtgaaggagaggatcgatgctcgcaacagtcttgaaacctacgtatacaacatgaagaatcaggtcagtgacaaggacaagctcgcggacaagttggagtcagatgaaaaggagaaaattgagactgcagtgaaagaagcattggaatggctggatgacaaccagagtgtggagaaagaagattatgaagagaagctgaaggaggttgaagccgtttgcaacccaatcatcagtgctgtgtatcagagatcaggaggagccccaggtggtgcaggtggcgaaggcgaagacgaggatgattctcacgatgagctctagattagtctaaatttttatcatatatgggaaattaagaattcccctgcgctctgcgcttgcttttttggtgccgatgataagatacttgtgaaattacttttactttgtttttttgcttagttttacgaccaaacttcttcatgagaaaaaaaaaaaaaaaaaaaaaaaaaaaaaaaaaaaaaaaaaaaagag

SEQ ID NO: 35485 - DNA, 2443 bp, Glycine max
  Clone ID: PAT_MRT3847_132046C.1
aattcccggtgtcgacccacgcgtccgcgtccatcgagaaaggaaagaaaaggtgacatgataatggctcgctcgttttcacgcgggtctctgcttcctctcgccatcgtttccttagtatgtctatttgtgatttccattgcaaaggaggaagccaccaagttggggacggtcattgggattgatcttggaacaacctattcatgtgttggtgtttacaagaacggccatgttgaaatcatagccaatgatcaaggtaaccgtatcaccccatcgtgggttgctttcaccgacagtgagagactaattggagaggctgccaagaatctggcagctgtcaatccagaaaggaccatctttgatgtcaagagacttattggaagaaagtttgaagataaggaagttcaaagagatatgaagcttgttccttataagattgttaacaaggatggaaaaccttacatacaggtgaaaattaaggatggtgagaccaaggtgttcagccctgaggaaatcagtgccatgattctgactaagatgaaggaaactgcggaagcattccttgggaagaaaattaatgatgctgtggtcactgtcccagcttacttcaatgatgctcagaggcaggccaccaaggatgctggtgtcattgctggtctcaatgttgctagaattattaatgaacctactgctgctgccattgcgtatggattggacaagaaaggtggcgagaagaacattcttgtttttgaccttgggggtggaacttttgatgttagtatcttgacaattgataatggtgtttttgaggttcttgctacaaatggagatactcatcttggaggtgaggactttgatcagagaataatggagtacttcattaaattgatcaagaaaaagcatggaaaggatattagcaaggacagtagagcacttggcaagctgaggagagaggctgagcgtgcaaagagagctctcagcagccagcaccaggtccgtgtggaaattgaatcactttttgatggtgttgatttttctgagccactcacccgagctcggtttgaggagttgaacaatgacttgttccggaagaccatgggtccagtgaagaaggctatggaagatgctggattacagaagagtcagattgatgagattgttcttgttggtggaagcacaaggattccaaaggtacaacaacttttgaaggactactttgatggaaaggagccaaacaagggtgtcaaccctgatgaagcagttgcctatggtgctgcagtgcaaggaagcattttgagtggagagggtggtgaagaaaccaaagatatccttctcttggatgtggctcccctcacccttggaattgaaactgttggtggggtgatgacgaagttgattcccagaaacactgttatccctaccaagaaatctcaggtgttcaccacctaccaggatcagcagactaccgtctccattcaggtttttgaaggtgagaggagtctcacaaaggattgccgtctgcttgggaaatttgaactgtctggaattcctccagctccaaggggtacccctcaaattgaagtgaccttcgaagttgatgccaacggcattctaaatgtgaaggcagaagacaagggcactggtaaatcagaaaagatcaccattacaaacgaaaagggacgtcttagccaggaagaaattgagagaatggttcgtgaagcagaggagtttgccgaggaagacaagaaggtgaaggagaggattgatgctcgcaacagtcttgaaacctatgtctacaacatgaaaaaccagatcggtgacaaggacaagctcgctgacaagttggagtctgatgaaaaggagaaaattgagactgcagtaaaagaagcattggaatggctggatgacaaccagagtgtggagaaagaagaatatgaggagaagctcaaagaggtggaagctgtttgcaacccaatcatcagtgctgtatatcagagatcaggtggagccccaggtggtggtgcatcaggcgaggaggatggtgattctcatgacgagctctagagatgttcttgcgtagcaatgaatgatgagcagtagtgtagtttaagcggagtcttaaagtttttataacaggtggaagttgagaaaagcttccccagctcttgtatttttggtgccgaaaatactttaaaagataaatgcttgaatttgtttttggttggctagttttaccactcaccttgcgtcttcggttttccgagattcgttttattttcatgctgtatgttcctctgcgtgcttttggcttgtgactttccccttaggactagggaagacggttggactcggaacgacaggcgtctacgtaatgtatgcattagtgtctgttacgtacattgatcttgaaatggtggtttaaaatttaaataaaatgtttgac

SEQ ID NO: 35486 - DNA, 2439 bp, Glycine max
  Clone ID: PAT_MRT3847_132047C.1
attgacatgaagcttgttccttataagattgtcaacaaggatggaaaaccttacattcaggtgaaaattaaggatggtgagaccaaggtgttcagcccggctcgagctcgctccctcgtgcaatttcaaactcagattacgctctcttcgacctcgcatcgcaccttcaacttaacctattccacttgtaatcgtaaacgctttgctagaagaagagacaaagtgtgtctgtgtgtgtgagagagagagcaatggctggctcgtgggcacgccgttctctgattgttctagccatcatttccttcggatgtctatttgcgatttccattgctaaggaggaagccaccaagttagggacggtcatcggcattgatcttggaacaacctattcatgtgtcggtgtttacaagaatggccatgttgaaatcatagccaacgaccaaggtaaccgtatcaccccatcgtgggttgctttcaccgacagtgagagactcattggggaggctgccaagaatcaggcagctgtcaacccagaaaggaccatctttgatgtcaagagacttatcggaagaaagttcgaagataaggaagttcaaaaagacatgaagcttgttccttataagattgtcaacaaggatggaaaaccttacattcaggtgaaaattaaggatggtgagaccaaggtgttcagccctgaggaaatcagtgccatggttctgatcaagatgaaggaaactgcggaagcattcctcgggaagaaaattaatgatgctgtggtcactgtcccagcttacttcaatgatgctcagaggcaggccaccaaggatgctggtgtcattgctggtctcaatgttgctagaattatcaacgaacccactgccgctgccaatgccttaggattggacaagaacaagggtggacgcgggaagaacattctagtctttgatcttggtggtgggacctttgatgtcagtatcttgacaattgataacggtgtttttgaagttcttgctacaatcggagatactcatcttggaggtgaggattttgatcaaagaataatggagtacttcattaaattgatcaagaaaaagcatggaaaggatattagcaaggacaacagagcacttggaaagctgaggagagaggctgagcgtgcaaagagggctctcagcagccagcaccaggtccccctggaaattgaatcactttttgatggtgttgatttttctgagccactcactcgagctaggtttgaggagttgaacaatgacttgttccggaagaccatgggtccagtgaagaaggctatggaagatgctggattacagaagagtcagattgatgagattgttcttgttggtggaagcacaaggattccaaaggtacaacagcttttgaaggactactttgatggaaaggagccaaacaagggggtcaaccctgatgaagcagttgcctatggtgctgcagtgcaaggaagcattttgagtggagagggtggtgaagaaaccaaagatatccttctcctggatgtggctcccctcactctcggaattgaaactgttggtggagtcatgacaaagttgattcccagaaacactgttatcccgaccaagaaatctcaagtgttcaccacctaccaggaccagcagactaccgtctccattcaggttttcgaaggtgagaggagtctcacaaaggattgtcgccttcttgggaaatttgatctgtctggaattccaccagctccaaggggcacccctcaaattgaagtgaccttcgaagttgatgccaacggcattctaaatgtgaaggcagaagacaagggaactggtaaatcagaaaagatcaccattacaaacgaaaagggacgtcttagccaggaagaaatagatagaatggttcgtgaagcagaagagtttgccgaggaagacaagaaggtgaaggagaggatcgatgctcgcaacagtcttgaaacctacgtatacaacatgaagaatcaggtcagtgacaaggacaagctcgcggacaagttggagtcagatgaaaaggagaaaattgagactgcagtgaaagaagcattggaatggctggatgacaaccagagtgtggagaaagaagattatgaagagaagctgaaggaggttgaagccgtttgcaacccaatcatcagtgctgtgtatcagagatcaggaggagccccaggtggtgcaggtggcgaaggcgaagacgaggatgattctcacgatgagctctagattagtctaaatttttatcatatatgggaaattaagaattcccctgcgctctgcgcttgcttttttggtgccgatgataagatacttgtgaaattacttttaaaaaaaaaaaaaatatgatggtgaaagcaatgtagtggtgacaaaaatataattattgtgatgagggtaaaaataa

SEQ ID NO: 35487 - DNA, 308 bp, Glycine max
  Clone ID: PAT_MRT3847_132048C.1
ggagccggcgaggaacccgggtgtcgacccacggggtggaacccccgcgagaagacgacagaagggggggggtggaaaaagagaacccggccaccacccggggggggccagggaaggcagggcagcagagcaacgacaacaggaacaaaggaggcgggaacacgcacgccgagggggacagcaaaggaaccggcaagggcgccgagaacaacggcaccatgaggcaagacaacaccggcgcacgcgccaccgaccccaagagaggagcaagagaccccccacgggccgagccggcaccacgcccaaga

SEQ ID NO: 35488 - DNA, 500 bp, Glycine max
  Clone ID: PAT_MRT3847_132049C.1
gttagtaagtagtttatgcgaggcatattcttaatttgtctcgttgagaatatgggaatagcaaggaaatgttcatattgtggtaacttaggtcacaatgcaaggacttgtaaaagtactcccggtcaaggacaactaaagctcttcggagtgcaactagatgtttcttcttctccatcatcctcgaattctttttcatcatcatcaccttcatattctggcatgaaaagaagttttagcacgaattacttgttgtcttcatgggcatcttcatctgtaccctcctccttttcctcgccttccctgcttggtgcaaatgaaaattcagatagttacttactcaatgccaatagcctcatatcaacaattcaagacacaaaaaaaggtgtcccgtggacagaggaggagcatcggatatttcttatagggcttgagaagctggggaagggaaactggagaggcatatctaaaagttttgtgacaacaagaacacctaccca

SEQ ID NO: 35489 - DNA, 544 bp, Glycine max
  Clone ID: PAT_MRT3847_13204C.1
ggctcgagctggcattgaaaagtgtatctgtgcaatcttgaggaaaaaattcatggacacttcccttggtgtctacatcaagaaagagaggagagataagtgattggtgatgaatatggtagaccaaagagataaagaaaaattgagagtgccatttaggtattttaactgtttaagtgttcataaatcaacatcaagaaaaaagagctatggacctctattggtgtctacaccaagaaagagataggaagagatgagagataggtgatgtgaagtgatagaagagagatagagaaattgggagtatcaatcaggcgtttagactgtataggtgtttaaaaatcagaacttcttaaggaaaaaaaattcatggacaccaagagagagagagaggaagagaggagatatagtgattgatataattaatgatataatgtgatagaagagagataaaaagaatttgcgagtgtcaaaatcaggtatttggattgtttaggcgttcacaaataagcactccaatcttatatggtgtgtacatttacta

SEQ ID NO: 35490 - DNA, 469 bp, Glycine max
  Clone ID: PAT_MRT3847_132050C.1
tgttaacataaatgttcattttttttctcctgtttttctattcatgccaaagcatccaaacatgttccattgtgcattacagtaattactatactggaaaccattttttttcaggtgctgttgtcatacttatagcatgtttggttttgcttatttttgtggaagtaatctatttttttgggtgaaatctctctctagaagttggcaaacataggctgaagcaaacacacatttaaacactatgaatttcagttttttctcacaagttcttgaatacatgcctacagtttcatgatggcaagtgaggggatcaaggagcgaaacatcattcacaaggtttttaacaatatacataatactgtctctattttgttattttgatctagtgaactctctgtctaataaggccgtgagatttactctagtattctgcaagaaacttcattcttaacttcttaccgagcttctt

SEQ ID NO: 35491 - DNA, 475 bp, Glycine max
  Clone ID: PAT_MRT3847_132051C.1
cgctttctttgccttcgaaacccttgtccacagcaaggaaccgttttcggccatagaagcgctatttccataataatgcatacagagagcaccactccagactgccctgtgacgcaactcaataacactcgccaaatcaagggaaatgaaacagagacttcattggagataccaagatcattttatggttatggccactcaaataggaactatggagacaataactgaatgccagaaaggaagacggggcgtcaattaatccaacatgcaacgtttctggtatattcggcatacgccatgagccaatgttagtagcatgtgctcgccagctgattgcgcgcatgagtgtatttggctcctccaggccagcggtgcactcacttggtcttacagaccataatgtggacacatcgaaaggcattgtcattgctgcgatggacaatgccatgtggtgcgaaaatgctgttgaaccatc

SEQ ID NO: 35492 - DNA, 385 bp, Glycine max
  Clone ID: PAT_MRT3847_132052C.1
gggaccaattatgacaaatgaaaaggagtgtgaactaccttgtatatcaaaagagttaaattagtctatgccttttcaaatgtaacacttatcatttctcatgtagctactccttttctcaatgtttcgtcaccaagaagttaccttgtgaagaaaaagcatgtgaaatttagcaaaaaaatcagtgctgctgctgttgcaacaacaacaacaactgaggaaattcaagagtatgaattccccttcttaatacctttttctacttttgtctttccttcctttacaatgatagtgtcacctgcaatgggaaaaatgagcatcccgaatttttgtagacctttgcttttgcttgtacattatgaaaggcgttttataaattggaaac

SEQ ID NO: 35493 - DNA, 131 bp, Glycine max
  Clone ID: PAT_MRT3847_132053C.1
ccggtggcgcagttgcgtaatcgggggatggagttggagacttttcaccccgaagtggagacttgtacatagtgaggtcctggagttcaatgcgatggtcatcgcgggtattcataataataagcaggtga

SEQ ID NO: 35494 - DNA, 391 bp, Glycine max
  Clone ID: PAT_MRT3847_132054C.1
ttttatttttttttccaatcaccattacctcaaatcacttttctcttccgctttctttaccaacaataaccaaaacaaacccttataataaacaacctaccactacttaattttacaaataaattaaattcacccaatatttaacaccacacccaccatcactttgacaaaaataaatcactacatttgacatcaattaccaaaaaaaaaaaaaaccattctattactcaacactaacttctatcaactaaaccttcactttcacacccctccctctaacccttccaacttaaactcccatgaaaaacctccccccctttaaccaaccaaccttcttagaccttccttttcccctccacaatccagacatacccttacccttagcctactt

SEQ ID NO: 35495 - DNA, 425 bp, Glycine max
  Clone ID: PAT_MRT3847_132055C.1
cctcacccttttaataccctttttaaaactattcaccatgattttgtaatctcaggagtcagtgcgaataaacagtttgttgaatctctctttgattgatcaatgtttgacatttcgaatcctcattcctaatgagtatattaggatggtaataaacatttttcagtactggctaaagggcaaggccaatgagcatatgttaggccccacatctatttaataatgttacactaattaaaattatggaatcttaacatatttttaatagtaaatatacaattttgtgtatgaagttatttataataataaactcagtttattagttatttacaatgtacataatcactaaaaggctacacattatccagtttctttctgacttaataagcttttttattatcttatgtgtgttacttttttatcat

SEQ ID NO: 35496 - DNA, 355 bp, Glycine max
  Clone ID: PAT_MRT3847_132056C.1
ggctcgagggtgggctttacgtatacccataaaccttggttaagaaccgtgaactcagggggatccacatgaggtgggccatgctcggcgccttgcactgcgtactcacgcagctgctgtgccgcaacgaagagaagcttggagaagccgtgtagtttaaggacggttccctgatcttcatcgagggcggactgcgctactagtgcatcccgagccggatccacgcccagagcatcctcggcatctgggccacacaagatatcctaatgggttccgttcaaggtcaccgcatcgctggtggccccctcggagagggcactgacccaatctagccaagtggaagcttcgacccatt

SEQ ID NO: 35497 - DNA, 440 bp, Glycine max
  Clone ID: PAT_MRT3847_132057C.1
attctttctattttttcatatttttttttctctcattatgttcagaaaggagaaaagggggaggaacagggataccttaccatgtccatttgaataatctttaccagacaagccaaacgtgtggacgttttatacccccaacccatgtaatctttcccagggttggcccacccccaaaaaaattttttttaatatcggacctcccttgaggaacgggtggttttaaaaaggcttaaggtttaaaaaccctttaaattttctttaccttaacccgacctttaaataaaaaaaaacttggaggggcggtgaaaaattatgatcaagggcccaggaaggggacgggaattttgcttctgatccccttttaaaatctaaagagaggggcgggttcggaattgttttcgacccgggggtttgggccggacttctaatccgggacc

SEQ ID NO: 35498 - DNA, 1395 bp, Glycine max
  Clone ID: PAT_MRT3847_132058C.1
ctcatctgatgtaacaccactatatgccctttgtgatgtccacattgaaagtatggaattctagtaaggtttataagaccttggctctccaacttatgtggtttggtgctctcaaggcgcttatcaattggtctgagaggctcccaccatgtttctgatctgtaaatcaatggtctggctggtaatgctggcattgcttgagattagtcagggggctagtgcacagccatcatgcatggtggccgttgcccagacctgctaagcatggtggaatgttagatccaattacacccacgcgtccgcttaaatttcccaatcaattccatccatcgggtctttactctcttacccaacccacacacactctttctctctctctctttccctgatcatcaaaatcagaaaaaattgggggaatggagaccaacaaccagcaacaacaacaacaaggagctcaagcccaatcgggaccctaccccgtcgccggcgccggcggcagtgcaggtgcaggtgcaggcgctcctccccctttccagcaccttctccagcagcagcagcagcagctccagatgttctggtcttaccagcgtcaagaaatcgagcacgtgaacgactttaagaatcaccagctccctcttgcccgcatcaagaagatcatgaaggccgacgaggatgtccgcatgatctccgccgaggcccccatcctcttcgccaaggcctgcgagctcttcatcctcgagctcaccatccgctcctggctccacgccgaggagaacaagcgccgcaccctccagaagaacgacatcgccgccgccatcacccgcaccgacattttcgacttcctcgttgatattgtcccccgcgacgagatcaaggacgacgctgctcttgtgggggccaccgccagtggggtgccttactactacccgcccattggacagcctgccgggatgatgattggccgccccgccgtcgatcccgccaccggggtttatgtccagccgccctcccaggcatggcagtccgtctggcagtccgctgccgaggacgcttcctatggcaccggcggggccggtgcccagcggagccttgatggccagagttgagtgacatcgatgccgatgatggacagtcaggagttatgaagattctgaacttgctgcaatttagaaatggttttgtttactaaatttttatgggatgacactgtgaacctgttaactcgatgaacagcatgatttaactacttttgtacaaaaatttaaaactaaacactgatccttctgtgtgaaacatgtatgatcatctgccaatactgtttatttcctcataaaaaaaaaaaaaaaaaaaaaaaaaaaaaaaaaaaaaaaaaaaaaaaaaaaaaaaaaaaaaaaa

SEQ ID NO: 35499 - DNA, 642 bp, Glycine max
  Clone ID: PAT_MRT3847_132059C.1
gcgtcgtaaaataggatttttttagtaatgggtgtccgaaattcattcttaattcctagtgctctataaatactaaaagaagagtcacattcaactacttcaaaaagaactttcatttcaattacaaaccaaattcccctaaagatagatatgatgtctcttaaacacagcagtgttgacgatatattattgctcctccttaacatcagtaagcaagtggctgagaccatttgttagagctgatcttgagattaaagatgctttcaatatgttaaaaccctccttaatgccaatgacaacaactttttccttcaagtcactaagaggtatatttaaacggctgagtaaagataaacccgaaattggagacataggtgcgacaaccaagtcatcagtagccataaacattgctggtcccttggcatagccattaccttcaatgcttccttcagatgacttaggatctactaacaccaaccgtgtataacgttcaaacttctcataattctcatattcataataatcagttttatagaattgattgcgaaaaataaattctgtataatgatcaaacggataacaataataatactctgaaatttgttcacaaatcggtaacatctggttggctattttttgttt

SEQ ID NO: 35500 - DNA, 645 bp, Glycine max
  Clone ID: PAT_MRT3847_13205C.1
accggaaaaaacccccgcgctcgaaagctaatattttgcggccgccctttatggggggccggttttttttttttttgtttttttacttttttttgttttaaaggtttttgttactttgtttttttgggaactagctttagtgagggtcctttgttatcctctctacactaatgaaaaaatttttattgtgggctttcgctctttttttgggggggggggggaaccaatttctggggagaaaaaactaccgaaagacctttttgttttttgtccgaaaaaaaaagtttttcttactgcttgtcctttattttccttctaaaacactaattttcttgcgctgaaaaatggttttgtttggggtaaatttagctcccccttttgggtgaccccaatcccccccccaaaaaaaaaagggaccacggccaaaaaactttccttataattggggcccccgccccccaattgtgaaggcgcgggggcccatttgtcaacacattttttgggtgttggggggggcacgagggggcccctaatgggaggggtcccaaaacaaggggggcacaaaagcccttccccctgtgggggggccaggggcaaaaaagtttggaaaaaaaattttttttttttttgcgcccccattttcgg

SEQ ID NO: 35501 - DNA, 326 bp, Glycine max
  Clone ID: PAT_MRT3847_132060C.1
aggacgcgtgagttgactcgtgcgttttacttttgaacggacactatttcagacgcgagggcgtgacgcatacatctgaggcttggatgtttactgtaggaaatgcacttatagaatcattacaaagactgtgataatataatagacccaggattgtctgccatatattcatagcataattatgaactaataatacaatgtgaaatatagaaaggcgatatcttgagataaatgatggatgaaaacacaatggattaaaaaggaagcatataatctagatatgaatataacatatgactaatacatggaaacatagcactgtacaa

SEQ ID NO: 35502 - DNA, 158 bp, Glycine max
  Clone ID: PAT_MRT3847_132061C.1
aatctaaaaatgttttttgcttatcctgtcaacccaattagggcgttactcaaactgctttggctccaaccagatacaagctgagcacatgataaataaatctcaataccttatttaagtggtctaaatagactaggagctcactatttctcaacata

SEQ ID NO: 35503 - DNA, 1605 bp, Glycine max
  Clone ID: PAT_MRT3847_132062C.1
atctggtgttgtgcaaggtttcaaagcaccatgtggccaaacatgtggtgctccaagaagaagctgcaggcacatgtatggctccttgtcacccttcatctccatgcccagatataaggtgtgaattccctgttacaatcacttgctcttgtggccgtataacggcaaatgttccttgtgatgttggtggtagcagtagcaattataatgctgatgccatacatgaagcttccattattcaaacattgcctgtacctcttcaaccagttgatgcaaatggcaagaaagttcccctaggacaaagaaagctgatatgtgatgatgaatgttctaagctggaacgcaaaagggttctcgcggatgcttttgacattactgctccaaatctccacgcgtccgattttggtgataactctctttcttctgaattgcttttagattttttcaggcgtgagccaaaatgggttttagctgttgaggagagatgcaaaattttagtacttggcaagactagaggaacaggaactacacatggtttaaaagtccacatcttttgtcccatgctgaaggaaaaaagagatgcagtgaggttgattgctgatagatggaagcttgcaatcactgctgccggctgggagccaaagcgatttattgtaatttctgttaccccaaaatcaaaggccccggctcgtgtgataggggttaagggtactacaactttaaatgtgcctcttcctcctgtatttgatccgttggttgacatggacctgcgacttgttgtctcatttccagacttaccaagggatactgaaattaattccttggttttgaggtttggtggcgagtgtgagcttgtttggttgaacgacaagaatgctttggctgtttttcatgatcctgctcgagctgcaactgcgatgaggaggttggattatgcaacagtttatcagggagctgttttggttgccccgaatgctggggcattggtggcatcttcagctaccaatgcctggggaggagctggggcaatgaaaggaggaggagcgctgccagcattgaaaggtaactcatggaaaaaggctgtggctcaagactctggttgggaagattcttggggtggtgaagagtggattgctggttctgtgaatatccagccatctgtttggaaaaaggaagcacctctggctgcttctttgaatcgttggaatgtcttggagcaggaatcgagttcaagtttgtcgtctacaactgttagagctgaagtttctgggaagaaaactgaaaatgctggtgaagaaggtggctcaaaggaagaggaaaagttggatgcagcttctgaagtagttgatgattgggagaaggcttatgaatgagggcaaaaaataggcctccttctgttaaaaaaaaatccgtattgttagaaattttatcttgttgaaaagtagacatgaatggttaggtctccttgccttgttttatgaattttggcaaggtgaaggtcatttcgtttccttataggtatatgttttaaactcaaaagttattagaacagttggtacccagatttgagcacacggggtatctacagaaaaaattgcattttgt

SEQ ID NO: 35504 - DNA, 317 bp, Glycine max
  Clone ID: PAT_MRT3847_132063C.1
tccacaacccccacgctataatagattctttaaaaccttcatccctttctttttcaaattcacatctcccccattaaataaataacatactcttcaacaattcccattcaaaacttttttcccattctaaaaaccccttaattcccctccccattcatcccttaatccttacttattaatacacctctcccaatattttttcaccctacctctcaacccacaacctatattctaccatatctcaaaaaacaattcactaaccctttcattaattccctcaacaattctctattattttcctacctcatcaacttaat

SEQ ID NO: 35505 - DNA, 575 bp, Glycine max
  Clone ID: PAT_MRT3847_132064C.1
tatgccaaagagcatgcaaatttgctttagagaaaccatagaaaaggccatagagcatgagaggaagagaagagaaacccccgaggctatggatgaagacatggagggggaaaatgtttcaaagatcaaggcggctcattttgaaaagtcaatgaagtatgcgcgtaggagtgttagtgatgctgatatacgcaaataccaagcatttgctcagactttacagcaatccaggggctttggaagtgactttaattttcctgcagctgtgagtaggaccccaggatttgaaccctttgcaacttttgctggtggagctgatgaaaatgatctctatagttaggttttgtttatttaaagttacacccctagctcggaactgcgaagcctttttcagtttttacttttcgtccattaattagccaccattagtagtactggattttgtataacccccccccccatgatggatgaaattcggattatgttggaaaataattgagcatgcctaatcctggatttcagtactgtagtgtggtgggttactacttactagtataacgttaacaacttaatcc

SEQ ID NO: 35506 - DNA, 287 bp, Glycine max
  Clone ID: PAT_MRT3847_132065C.1
tggggtttttttttttttttgccaattaacaaacaaaaaccacccaaaaaatactcatacaacaaaactgcataacgatgaaaaattatgtcaaacctatctaaagacaatatattaggggcgatcagaaatccactgaatttaggaacaactcctcaaaagacacggtaccgaattcctcttggaactcatcagatacaggcagcgaacgttttgccaaatttttttaacaaaaaaacaccgtagtttacccttagttgttcatttagggagagttggtttttttt

SEQ ID NO: 35507 - DNA, 190 bp, Glycine max
  Clone ID: PAT_MRT3847_132066C.1
gcttaaccaatctcaattgtggtcatgccagatcattgtctggctcgtcgatttagtcaacgtatggctgcatcaacaggaggtgcagcaccatatctagagcgcacaataattgagcctggcaatacaagcgctatgatatacgtatccaaaggccaaggttcatatgctagttcttatggatctattt

SEQ ID NO: 35508 - DNA, 460 bp, Glycine max
  Clone ID: PAT_MRT3847_132067C.1
ccacgcgtccgagctacgaggagctgatagaacgtcttaatgaaagaagacggtgatttggaagcacgcagatcctggtgatcgcaagggggaactgagcatcttacacgactccactttggacacagacatgggcctcttcctacatgaggacgagaacgcgaaggccgagatggtgtgcttgcgacacatcctggggccggtccaccatgccaacaaggagagcaaggccctccaccagacagagacccacatgggcctcctaagcccaatcatcactgtaatactaggcgcactgaagaaagtccagaccctacggacccacctggaggagaaagaccgcgccaatgccgccaacatgtacctatccattactacagacaggacctgcaccatataggcgtagccggtatggggtcaccaacgagcccatgacaaaacgaccggagcttatgatggg

SEQ ID NO: 35509 - DNA, 1231 bp, Glycine max
  Clone ID: PAT_MRT3847_132068C.1
ctgccccttgcttgtcccagtcgctagcctgctcacctccccctgtattctcggttttttgttccccctctgtagcatgctgtaaggccccccctgcattctagtccgtgttactcgatggaaaacccggctttagcatcgctactagggcagagtcctaaccctatttaacaccttattagctttggtagacccaatagttagtcatcagaatcccttcttctctataatatctatgatccattcactctgagccgtaacagttctaaactccaccatttagtgacacccttaacatgatataatgccatcggtgcattcaagcccgggttactcgatggaaaacccggctttggcgtcgctactccgtcacacgacaggggaaaacaagcgtagcaataaattgtcgagcggaggagggcttttgaaaatgttgaagctgtttcctatgttgagttcgggatgcaaaatggtggcactgctgggaagaccacgaaagatgctgaaggacagtgcgacgaccgggacaatcttcggttaccggaaggggagggtgagtttggcgatacaggaggacactcgtcaaatgccggtatttctgatagagttgccgatgctggcgagcgccttgaacaaggagatggcgtcggacatagtgaggattgcgctggagagcgagaccaagagcaacaagaagaagcttctggaggagtacgtgtgggctgtgtattgcaatgggaggaaagttggctactccataaggaggaagcaaatgagcgacgatgagcttcacgtcatgcagcatttgagaggggtttccatgggagcaggggttctccccacctcatcggatcataaggattgcgatggggaaatgacttacatcagggccagctttcagagggtcgttggctccatggattcccaagccttgtatatcattaatcctgatgccactgctcatggccctgagttgagtatcttctttcttagacctcactagaataatcataatcataatcatatcttgtatctacctcttcctagcttacattggatcattattattctacccacgcatgtaagctcaaaactgccattcaatgaatagtccatctcatatgttaattgtttcttctgttgtgtgtttaacttccctgttttctaatctcttttcaattgttcctgttggctgctgtttaatttgtaagacccaccagttcttctcaat

SEQ ID NO: 35510 - DNA, 386 bp, Glycine max
  Clone ID: PAT_MRT3847_132069C.1
ccactctttttcaataattgatctgcagaattgctctcttgcaaattggatactgttactggccaatattatcctgagtgggctccaatcaattgtctagtgcatagacaaccaatttacattactgatggaaattatgtcagaaagcacgacgctatcattgaatatgatgcatgtacaattccaaatgattgtggttcattggttgatggcaaggctggaaatcacagacaaattgctggtttccatgttgctggactcaaaggaagactgcgatatgcttcattgataccatatgatgagccagctgtgcaagctcaaagtgctgaaggttactcagacttcttacctgtggaggttgatcgatcaagatggagttgctcaca

SEQ ID NO: 35511 - DNA, 839 bp, Glycine max
  Clone ID: PAT_MRT3847_13206C.1
gaattcgagctcggtacccggggatcctctagagtcgacctgcagctaaacacatattcgcaccagcatatgctaagaaagcatcaagatatctgcaccggaactactaatctgtgagaatatatgaacattaatgccaaccataaagaattacatgacaaggattagtgataactgagagaaaataatttaaaccaagatccgaaaataatttctacaaggatttttgttcattaaattggtgaattatgatagaatataaatatatatatatatatagagagagagagagagagagttaatatatgatttaatccgtgaaatgctgtttatttttggtccatgaaagtgatcatttgtacaatttagtcttccaatgtatcaacttgctcatattttagatatttcatcgcacatatatataatcaaaatgtgagcaaaattaataaattttgggattaaagataaacaggatgtcactttcagaaaccaaattatatattaactctttctctcactctatatagtcgcatattgaatatgccaattgcatctccaatacaaagaaagattacccgaaagggaagtttaagggaaaaagagtagttgcaaatcacaatacatttattgcttatttttaaaagtatattatataatagatgcatttaagttggtaagcagatgacatatttataaaccaataattgggaataaagcattttttgtaatttcaaaaaatttgttttgacaaatgaaaagaaagtgcccaaagcataaaagaagtattagacgtgatatgatacgaatctttttgggaggggaaaaggagttggaagcat

SEQ ID NO: 35512 - DNA, 616 bp, Glycine max
  Clone ID: PAT_MRT3847_132070C.1
tttttttttaaaagcaaatctggtctgggatttaatttatcaaactgtgacataaatagagcctgaaatgcaagccaaggtaccaaactcttaaacaaaaaagtccaacaacggacagaaacagaaaacatgtagataatctggatcaacctaaggcaatttcaagatcaacttgaggcatatgatttactcatagatccaagagtgttgggagctttgccagttagcagggccctcagggaaccacaatgcaatttccttgttagcactttcaactgcatcacttccatggataacattcctacacaaagacaagttcataaaacaaaattcaaagttcccttcaaattaatcaatagaattgtaaataataagtatctagatccacactaagagcaatgttgataaacattgactaaaacaacaattttgattttcatgaatacaagatacagaacatggatttgttggattccactcccttgattatgatgtactcaacagtgttatcatcttgcttaattgatgatgtcatgaacatattgcaatattcgcagaattggttgagcacaacacttttttctctaaaacacaaaacgttggaaaccaatgttgt

SEQ ID NO: 35513 - DNA, 224 bp, Glycine max
  Clone ID: PAT_MRT3847_132071C.1
cattttctcaaacgcctttattaattaataaacaaatggctgctgccgccgcatttactgtgcttctctcacctattattcctaccgtcaccaactttacccccttctcttctttgtcttctctttctcctctcggcaccaacactaaaaccacctttttcttatcttcccttaaccacttctcagagaccctaaaatcatttcttctttagaccataacttct

SEQ ID NO: 35514 - DNA, 696 bp, Glycine max
  unsure (1)..(696): unsure at all n locations
  Clone ID: PAT_MRT3847_132072C.1
ctagaacaaacacttaagttgcttcacaaggcactagagatacttaatgaaggctctggtcagcaaaacacaatagcaggaattgaagcatagatgggggtcatgtactacgtgttggagaactacactgaatcttacaatgctttcaagaatgctgtgtcgaagcttcatgctaccggagagaagaaatctgccttctttggtactgttcttaatcaaatgggacttgcttgtgtgcagctccatgccttagatgaggctgcagaattatttgaagaagcgagggtcattttggaacaagagaatggaccttgtcacccctgaaacacttggagtatatggcaatcttgctggcacgtatgatgcaattggaaggttggatgaagcaatttatattgaaattcttgaaaaccattgtggtaatgaggaaggaaaagcttgggaccacaaatccagatgttgatgaaaaaaaaagttggacaagttgttaaggaaacaggcagaataccaaaaacaaccttgtcgctgaggcctgatcgtgcatgaagaatatggctagctagctaggattgataaaaagctcttatgtttttaacggaattctagaaatggaacaatgagcatatatagaaaaacaagtcgtgatgggtgggtagttattgtgggtaaaatttaattaattngaatgaatgaatg

SEQ ID NO: 35515 - DNA, 377 bp, Glycine max
  Clone ID: PAT_MRT3847_132073C.1
gaagagctatgatccacgcagtgcacgcagtccgtgagttcggcattgagcctcgagctcaaaattaaattgacaaaaatccgcgatttagaagtgagagatgatggggttgagggtcaccaaactgttcagcaggttgcttgcgaagaacgaaatgaggattctgatggtaggtctggatgctcctggtaagacaaccatctcgtacaagctcaagctgggtgaaatcgtgaccactatccccaccatctgatttaatgttgagactgcggagtacaagaacatcagcttgactgtgtggaatgttgctgtgcaagacaagatccgaccactgtgaaagcattttttccagaacacttacgggctgatttttgtgg

SEQ ID NO: 35516 - DNA, 197 bp, Glycine max
  Clone ID: PAT_MRT3847_132074C.1
caggcatacttcaatatggtctgaaaccatgaagatcaatagattcctagatgatcttctcgaacgtagggaccaatgagccgaggacatagataacgagcatttatccatcgaagtccgaaaaaaccctcttctgtgctcactctgtcgccaaacgaataacgaacccacattataacatcgggaagcgtatcact

SEQ ID NO: 35517 - DNA, 224 bp, Glycine max
  Clone ID: PAT_MRT3847_132075C.1
ggctcgagccgcacacttctttttttttttatttcagttctaactaaacatgctgatcggcagcgaaggacaaagagacgaacatagcctcaactgcagcatgactaacgagaagaacgaagagcaccaatgccacaacacgatctggtacaatgagatctctgatggacaacctcaatcacaagcacagccgaaaccagtagcgaaatctgaacgatctaagg

SEQ ID NO: 35518 - DNA, 120 bp, Glycine max
  Clone ID: PAT_MRT3847_132076C.1
atcctgtatagcgggcgccccccacgcgtccggattgttctttgtgaatctctccatcgaggactttggagagtattgatatataatgggagaataaagcagtgcccatcgaagatataa

SEQ ID NO: 35519 - DNA, 1505 bp, Glycine max
  Clone ID: PAT_MRT3847_132077C.1
aaaatctgaatcaggcatgcggagtttgaatgtgccaaagacaatcacatgtcgtgtattgtccattgatacattaaaaaccttggttgaaacatctttgattggagatgatgttgagcaatccatgttaaaggtcgaaaatcaagaagatcaagggaaactacattggctcagtgatgcaaacaaaaagccttcaattgttcttgctgggcttcatgcctgtggtgacctttcggtgactatgctaaagactttcgtagagtgtaaagatgttaaagctgttgttagtctaggttgctgttacaatttattatctgaagaaatgattaaggatggtgaatctcaatttggatttccgatgagtcacgctgtaagatccattggtttatcacttggaaaaagtgcacgtgatcttgcttgccagagtgctgagagatggaggagtctggacatgcatgctggcattcacaactttgagttgcatgcttttcgggctgcttttcaaatggttctttctaaatattatccggaaattgtgatgagtactccttcaattgggcgtaaagggaaggctcttcgtcggcgacatcagaggagatctgcggaatcccagctgcatcttaaaggaagtacttgccacatgagacacaatttcccttctgtagttccttcagagtcagaaactgacgggattttgggctccatgtctgagatacagaccttacctggtgaaattccttctaatgaaagggctggatgtgaagtgattaaatctgatgacaaactttcacattttgagaatttctgccagtctggattgtctcatcttggaattaaacattcacaggatataaaccttcaaggcatatggaaggaagcagaaccatttgccgtccgtctaggtccttttcggcctctctgtcctgcctttggccctcttttgctcactctcttttttcttctgcccggggtgtttcttcaagagcaaggcagtgctctagaagcctgcttgttaccgatatttgatccaaaaatatcaccaagaaatgtggcaataattgcaaaaaagatcgacaaagatttaagatcctcctgttgctaaaagactttcttgagagttgagttgattgtcaagattccctcagttgaagaaagtcaatttcacatgggacaaggtcacaatgatctacaattcaatgcctgtctttcatgagttgtgttgattctcaagatcggtgcaggtgaaggtcaagatcatttgggacaaggagacaatgctgctgactgctttcctctgttcttgttggtgaaagtttgttactcaggttccaacatcatgctaagttactttgttatcataatcatatgtaatgttctgagtagctagctgggcaattcacttaaatgatgcaagcttgtaaaatttttgcacctgtgttatttgtattaattattattaggcttccagaatatttgtatattatcattcttttcggtgtctttcc

SEQ ID NO: 35520 - DNA, 598 bp, Glycine max
  unsure (1)..(598): unsure at all n locations
  Clone ID: PAT_MRT3847_132078C.1
cccatgcgtccgcgccataaagaatctattntttctgtctttttctttttactctcttaagttcgtagcagcaaatcaggatctgctgcttcagtgcttcttcaccttttgtcttctagcctctggaatttttccatggagacagagaacggtgacaccaggtccaaaaagatggaagagtatgaagtcatagagcaaattggaagaggagcttttggctctgccttcctcgttcttcacaagtccgagaaaaagaggtatgtgctgaaaaagattaggttggccaaacagacagagaagttcaaacgtacagcacaccaagagatgaacctgattgcaaaactgaataacccatatattgtggactacaaagatgcttgggtggagaaggaggaccacatatgcattataaccggctattgtgaaggaggtgacatggcagagaacataaagaaagcccgagggtcattttttcctgaggagaaagtctgcaaatggctgactcagttgttgatagctgtggactactttgcatccaatcgtgtgatccacagagatcttaagtgtttcaacatattnctcaccaaagacaacaaca

SEQ ID NO: 35521 - DNA, 284 bp, Glycine max
  Clone ID: PAT_MRT3847_132079C.1
gaggcctcatacgacaccaaattcgaggagataaacaaggttctgtttggtagagaggaggggcagcaacaaggggaggagaggctgcaagagagtgtgattgtggagatctcagagagacaaattcgggaactgagcaaacatgccagatctagttcaaggaaaaccatttcttctgaagataaaccttgcaacttcagaagccgcgaccccatctattccaacaagcttggcaagttgtttgagattaccccagggaacaaccctcagcttcgggacttgga

SEQ ID NO: 35522 - DNA, 520 bp, Glycine max
  unsure (1)..(520): unsure at all n locations
  Clone ID: PAT_MRT3847_13207C.1
ccacgcgtccgcactcctccatgccgataagactctggctatatgcacatagtatcccataagaggaaagactcggcctttcaaaaccctcacactacagggcatcactgctgtcagttagcataggtggagggctcttaggctactacactggagttactgtcgggagcccttatctatataaaagaagattgtgcgcaggacaagcccagaagatgctttcattaaacatttggcaggatggaggggactgcagcatttgttggggcagcagcaaggggactgaattaatgacggtgatgggagaaagaaggcaaccctgattgcagacgttatctttactctgggagcaattgtaatggctgctgccccagatccttatattctcataattggccgtgatttggctgcgtngggtgtggntgacgcactggatagtgacactgagttgatcgtataacaagcattatcatgtttggctggcgcgctttcgggcttcatagagcgaagcagaaccggt

SEQ ID NO: 35523 - DNA, 730 bp, Glycine max
  unsure (1)..(730): unsure at all n locations
  Clone ID: PAT_MRT3847_132080C.1
gctcgacctcgagccgaatcggctcgagattgacttgtaggatatctagggtgaatcacgtaccaacatgtctaagtcactttcaaacactaataatgtgcagcaagggaagactaatttgcttcaaaacccatttgaattcagtgacgaacagattctggataatgtttaccgaacccattttcattgtgttgagaagtgcgatgtaacatctcttcacaccgttgcctcgtgcgttatcaaccactccattgaaatcacggacaccgtgattactaagggtagccaactgagtgatcggttcagagaagacacgaccataacttcccaacaacttactgcaaaactgaagcgaattgcttgccagatggtgtgcacggctcgtggtgatcactacgcacaccacacaacaatgttgattctggaacaactaaaagcatattcttgggatgcaaaagcacttattgttcaagcagcatttgctttggaatatgggaaattcttgtaccttcccttgaccacacaatatcagatgtctgaaaaatcattggctgatttgaatggacttctaatgattcaacacaacacacaacatctcactttcttcaacagtgtggtgaagaaggtaatgcaagtgattgaatgcatcactgagtgggagaggctaactagtgcangatatgacataaaagatgtgcctaccttggcagaaactttgcatgagatccct

SEQ ID NO: 35524 - DNA, 243 bp, Glycine max
  Clone ID: PAT_MRT3847_132081C.1
ccatctctttctctggctctctccatctatcataagggtcactcacgaaactcctctgagagcacgtgcacagccatcggtaccgcggttagctccctgagtagggtcgatgggtggcgagtcacatgaggaccagctcggcctgtcgggccggagtcacacggtgggaaatccccggctctcagtgctcgggacttactctggaggtcctcgactgacatccaggtcttagacctcgatttg

SEQ ID NO: 35525 - DNA, 433 bp, Glycine max
  Clone ID: PAT_MRT3847_132082C.1
ccacaaaaggataataaaataaactggaaaaaaaacttggggatcatcacccctccccccaaaaatcaacggcccccgtttcaccgggaaaaaaacccccggggagggaaacccctccccaaaaaaaaattccggaaaaattcaaaaaaccccatttttttttttaaaaattcaatttccccccccaaaaaaccagggctggaaaactgctcggggggggggttgaaaaaaacacccttttaaataaccccaacatttccccctccgatgaaaggccccgcccaaaaaaaccaggggtggggccaggtccacctaacaaaagggggcccaaatgttacaccagggtttagggttgctccggaaaaggccccccccaacaaaaggttaccccccacaaagaaaccaagggggaggggagcaaaaattccccaat

SEQ ID NO: 35526 - DNA, 171 bp, Glycine max
  Clone ID: PAT_MRT3847_132083C.1
cgctcgaggctaatcctagttctcttcactcctcgctgcacaacagcagtactaccattagccgcgtttttcaaaagtgattttcgagaattagcgatgggaattgaaagaggaggctaatggtagtactgctgttgttgccagcgaggagttgaaggaactaggactagc

SEQ ID NO: 35527 - DNA, 528 bp, Glycine max
  Clone ID: PAT_MRT3847_132084C.1
ggctcgaggagcacttcaaggtgaggaacaattttttgcttttaaaagttatcttctgtttattatgaatatcttctctggatatgttgattttaagacatgcaggaagttcctcataatttggaatttggaggcagtcattgattgactgggtgagacttgtaaatatggtatacaattttttctgtatactatttggagggtgcagacgacgacttgaattatacaatgcaactttaactgccttaggctcaaaagtggcctttatgtcctcaaaaagatattttaggttgattattttggactgaaattctaaattgggctagtcttgtatgttgtacatacattatattgcacaaactttttaagatgtcactctaaacagaactaaccactacttaagatcttacgactaaatttaaaaaatagttagaaactgtatcattctgccaaggccatctagttaagtgtctcggctcagtatatcatgtgaatatattaattgagaaagttgcattttggtattta

SEQ ID NO: 35528 - DNA, 1904 bp, Glycine max
  Clone ID: PAT_MRT3847_132085C.1
gagcttctagaactgattgaaagagactctgttatgatatggatgtttcagtaactcttgaaatatcacccatcatctatttaaatccttggataatattattctgaatcccctgaaaaaaaaaaaaaaaaaaaaaaaaaaaaaaaaaaaaaaaaaaaaaaaaaaaaaaaaaaaaaaaaaaaaaaaaaaaaaaaaaaaaaaaaaaaaaaaaaaaaataaaaaaaaaaaaaaaacaaaacaaaaaaacaaaaaaaaaaaaaaaaaaaaaaaaaaaaaaggagcgcggacgcgtgggcggacgcgtgggcgtacgcgtgggtttttggtagccgctgcgagaagacgccagaaggggaattcaatacggatttgttgtgcgcgctagatatttggagtttggacgcagaaattttcttaaattattgtagggaatgaaattgaaagggaaaaaaaaaatcaaaattatcttgagcggtaacacagagcagagcacggaaaggaaaaacctcggtagagttgagggtttagcggcagcatagagaatagagatagagcgaattgaaactctctaatggcactctacacccatctcatctctttctcttcttcttcttttcttcattcaccttcgcctctatgtcttccaaagcctctcttcccttcttttactttgacagtgggcaattcaacctcccacaccaccagtctcgccgttcgctcctcttattccgaaatgggctcttcccctgagcccatcaatttcaggaagccagggattccgtccatgtctcacttgagactctcaatgaacgaaagtagcaagccatcatttaaatggcgaagggttttgctcaaagtcagcggagaagcacttgctggagaccactctcagaacattgaccctaagataaccatggccattgcaagggaggtggcagcagtgactcgccttggcattgaggttgcactggtagttggtgggggtaacatcttccgtggatcctcctgggctggaagtagcggactagaccgctcatctgctgattatattgggatgttggccactgttatgaatgctatatttcttcaagcaacaatggagagtataggcattcctactcgggtgcagaccgcatttcgtatgtctgaggttgcagaaccgtatattcgcagaagggcagtgaggcatttggaaaaaggaagggttgtcatttttgctgctggaactggaaatccattctttaccacagacactgctgcagcactccgatgtgcagaaattaatgccggggttgtactcaaagcaacaaacgttgatggagtttttgatgaggccccaaagcgtaatccacaagcacgtcttcatgagacactaacctatcaggaggtaacttccaaagatctgtcagtgatggacatgactgccataactttatgccaagaaaataatattccagttattgtctttaatcttaacaaacctggtaacattgagaaagctattaaaggagaaagagttggcactttgattggggccacctggaattctaccgtatcaagagcatgaaaatatttgtagtctggttacccattgattatttcttgtgtttttcttttcctatacaatcttccagccgaggatgccaaatatgtgaggtgcattacttgcgattggtggttttgatggacttcaagggtgctgttgagtcataaatttgtaaatataacaagttaaattatcgtttgatgtttccctccacctggtttggccttattttactttgccattttgtggtttatgcaaattatattttgacttctggactttgctccgtttgcatagctttaacagctcaaaaaaacggggcaacacggttatacaaaaaaaccgcgcatcccggaag

SEQ ID NO: 35529 - DNA, 437 bp, Glycine max
  Clone ID: PAT_MRT3847_132086C.1
attctgagagttttgttttgtttttacagcctggattgactctgtcaaagcccatggtgcctgggatttcaagtgaaaaccagggtcagcccagtccaatttctgttttagagcctccatttgaagatgataatgctgttatcgagtccttgggctgtttgaggggtggtcagctgggtaatgcttactcctttctctcactttattattgctatttcagtaagttcctttttgatattccttgtctttactgttttattacctgactgaattttttctgtaggatcacgggtgtctctgaagtctaatttaattgataaatcaccacctatagaatcaatcgcccggaccctctcatgggacgattcttgtgcagaagggtttggggggggggccccccaagtccataccctttgagccctcgttggcatctagac

SEQ ID NO: 35530 - DNA, 317 bp, Glycine max
  Clone ID: PAT_MRT3847_132087C.1
ggaagggcttcacctgttatgatggttttctcggaccgcataagctagcatgtgaggcctatgtgccgggcgtctactgccctatatacaggatgtaaagccgatggcgagcaggggcatacattgcatgctgctccgattgatgccaattgtggaagctttgctacatatggacctgcctcctgtgttgaactaaacgttggagtacttgctcgacattttctccctgaagatgaggataatgggactcaggaggattttgaacgccatgtggtacaagaacgtggaggtacgacacctttgttatctgttgacct

SEQ ID NO: 35531 - DNA, 193 bp, Glycine max
  unsure (1)..(193): unsure at all n locations
  Clone ID: PAT_MRT3847_132088C.1
ggtggagactaacatnggtgccaacgcgttcaaggacagcaaactctgcaatatgctcacaatgcatgaattgcaccgacgattacatgaggatactggaattacattagattaccttcaccccggctgcattggcacaacaggcctgttcagatagcacattcccttgttcataactctgttaactccattt

SEQ ID NO: 35532 - DNA, 279 bp, Glycine max
  Clone ID: PAT_MRT3847_132089C.1
aggaaaaaaaaattagtgttttggcagcaaatgatttggggcaataaataaaaacaaaataaagcttggtaattgtaagaaggttttgtcacaaccaaggctttgtaacttgagaaaccattaatttctcactcaattggtgggaagggggggaaaataactaaaacccccgccccttcatgaagggctttgcaattccccattgcatgaatcccatgctttttcataaaaattggtcttgggggggtcccattttccccccaattttttaataaccct

SEQ ID NO: 35533 - DNA, 1707 bp, Glycine max
  Clone ID: PAT_MRT3847_13208C.1
gatgaaggaaggaggtgaatgaaagacttttgtgacaggtagcagctcagctaaatgcaatggttggttaacgttaatgctgtgttgtggacacactctcacatctcatatctcatatctcaatctccgtgtgtttagatgtctctcaatttgcaactaaaaaataaaaatgttgagacaatcggttttcagtttgttcgtagtaactctttctctttcacttttccttttcaccatcaatatcaatgtcatgcccatgcctctctctcttttccctcaccaccacgcactcgcttttgccctccgacaaccgtcttctctgccgttacggcggagcatccagccgcgccaccggtgaggatggtggcagtggttggccacggagttgccagccctctcaagtctgcatcttgggaacaagtcatgcttcacactgtgcagagattgaaatgggttgatgaagggtatgaacttcttgtatttacagatgaatgtatcatatctaatggacaaatgaccataaaactccagagagaattactgaatgctgatatattggtgattgttgctgttacaaacaaggaatccgttgagtggattaataacaactgcaaaactattgaaaatgtaatatgccttgactcttcaccagatttgaaaaacaaattaggaggctatgatgttcccagtgaagataaagctaaagaatcatatgaagtagtgcaaacagtatctgaagcatgggatcgacataattctgatgatataaggttctgtttgctggtactaatcaatgcttatataaggccggttccagggttgaagaacttgggagctaaaggtttttccaccctaaactgtatgttgaagaactgtggtcgtcaggtacttaattgcttgttggatcccaattgtaggaaagctcttcaatgcttgaataagtgtagtcctgttgatcaagtttgtaactactgatgtattgcttcatatgaaagtacaaatctagaagccttttcactatgtgtattactaaaaaacaactgtcttgagttgaaagcagaaatccctgacaagccatatgtgcctccaatgattgagttccaggggcagaactgaagtcatgaaatggcagaagatttgtttgttggatggttggagagtttcaaagggagctggcgtgttgtagcagggcagaacccggcatatgatcaatttccatgccaataccagtttttctataggggaaaagcaaaagggtcattttggtatgagcccgtattccaggtaaaaacattggaaggccaattggtctggagtaggaggaaatatagggtcagaagaggtaaggtacctggcacattctattttagtgtattagataacggagttgtttcaaatgagttttggacaattgtggatgtatctgataatcttagttggggtttgttctattatcacggtgctgctagagttgcagggcaatcttatactggggcagtacttgttagtccagatggagcatttccaaatgacacagagaggactaagatagttgctgcactagacaaatgtgaaattaaagagtgggaagtatattctgttgacaattgttcatgcatagatccacccctgggaagtaaaattttctcaagggtccatcagcgacttacgatagtgttttaaaacaaattttatataaaaaaaaat

SEQ ID NO: 35534 - DNA, 1515 bp, Glycine max
  Clone ID: PAT_MRT3847_132090C.1
agatatgtgctgcaaaaacccttcactgaagaacaatgcagacaatcttgtatggaagattgtttgtgttctgttgctattttcaggttaggtgacagctgctggaagaagaagttgccactttcaaatggtagagttgatgccacacttaatggtgcaaaggccttcatgaaagtgaggaaagacaactcctccttggttgttcctccaatcattgtgaaaaagaatagtaggaacactttgattgtgcttttgagtggttctgcttgtctcaatctaatattggttggagcaatctgcttgagcagtttttatgttttttggtgcaagaagaagcttagaagagttggcaaaagtggcactaatgtggaaaccaatttgcgttgcttcacttatgaggaacttgaagaagctaccaatggctttgagaaagtgctaggaaagggagcttttggtattgtgtacgaaggagtcatcaacatgggttcccttactctcgtggcagtaaaaaggttgaacacttttctcttggaagaggttcaaaaggaattcaagaatgaactgaatgccattggcctcactcatcataagaacttggtccgtttacttggattttgtgagactcaagacgaaaggttgctggtttatgagtacatgagcaatggaactttagcaagccttgttttcaatgtggagaaaccaagttggaaactgaggctacaaattgcaactggggttgctagaggacttctatatctgcatgaagagtgcagcacacagatcatccattgtgacataaagcctcaaaacatactccttgatgattactataatgcaagaatttcagactttggattggccaagattttgaacatgaatcagagcagaaccaacactgccataaggggaacaaaagggtatgttgcacttgaatggttcaaaaacatgccaatcacggccaaagtggatgtctatagttatggggtgctgctacttgagatagtttcatgcagaaaaagtgtagaatttgaggcagatgaagagaaagcaatcctaactgaatgggcttttgactgctacactgaaggtgttcttcatgacttggttgagaatgacaaagaggcattggatgacatgaagaccttggagaaattggtgatgattgccctttggtgtgtgcaagaggatcctggtcttagaccaacaatgagaaatgtgacacagatgcttgaaggtgttgttgaagtccaaattccaccatgcccctcctcacaacttagtattcaatattctctagactaatcagttggtgctaatcctagttgtggtatctagattctagtgtgaactgtaaaatttacatatatgtatgtgtatctatttgaagctttatgttccttcagcattatagcattcggggtttgagatcaattgccctaatgtattaactagcttgataaaccagtcacgttttggatttagtaaatgtgcataacttcaataaaacatttaagc

SEQ ID NO: 35535 - DNA, 496 bp, Glycine max
  Clone ID: PAT_MRT3847_132091C.1
ccactctttcttttaggtgttgtgctgacccgacaatatcgacaataagtgtgatcacaccgtatcatgagggaacgccggtaacagtgaagatatccggtgagggggatctgcgtatatgcactcacgcacgcggagcaggaaacagaagttcataacttgcattggcactttgtaggtggcgcagtaactgacagaccctattgtgctgtggccgactgcatgtatagtgtgaatactggtgctaataggtatggttgatcgcactgaaagaaggagaacccaagctacgattactggccacaaaactagtgaatgggaacaagcatggatctactctttgaagagtgatttaccttattaggcgggaccaccgaaatcttcaccgtatgttgatcgccatatcattccagtatgattgtacagctacacatgaactgattgaagagtttgttgttgggtatttctccgaacataatatagttctgctcttcat

SEQ ID NO: 35536 - DNA, 253 bp, Glycine max
  Clone ID: PAT_MRT3847_132092C.1
ttaaatgactggtattccaagtaatgtaacatcaccaccctagaaacagcccacaaatgaaaaagagagatagccaccactgactaaaatttatgatttagagtttacactagtaagataggcaagcaacccaaatcaactttcacatgcttgcacagttacgctagagcgtatagagagagttatataatcccgcctgttaaaacatggccaattgtgacaagctgcaaatgttgaattgatgatgagagga

SEQ ID NO: 35537 - DNA, 1110 bp, Glycine max
  Clone ID: PAT_MRT3847_132093C.1
ggctcgagcagccctttcgttttgcttcacacaacagccggcgatcgccttcggatctctgagaaaaggaattcaaaaagagggtgtgagagacctttcactatggcagacattggtgattcttcttccaaagggaaaaatgtattggaatctcttccaaaaattgagcaattaactcaaggtgttgctgatgttaacatagagtcaggacaagatgatggtgaatgggtggtatatgcaaagaagtccaagaatagagcccgaagcacaactgttaaaccatggagtcctccggttcataattctagacccactggaaatacaaagatggctcacaagccagttactcggaatgatggaggagttggaagggcttctgggagtggaaatccttggcagtcccaaaatgctaacttcaagagacctgctggcagaggaaatggaaggccacagttaactgcaagtgaatctgaaagcagcaataatgtgacttctaatccagtcattcgaccacccctcgagcatgggtggaattggcaatctatatctggctccaagcagtccaagagtgttgatgatagcctggtgaagggtgaaatttcagaagagtcccctatgaagcagcccttccaagatgatgaaggggatgagatggaagggtttgatgcggaagatgctcaggatgatgtgctgatgcgggatgagcatcattctatgatccgtgaaatgagccaggcgtatgcatcacaaggatatatatagatatagatacatagatatatatagatacagaccccaatatgagggttacaaagtcaagcaatcaagcttgatctccatatgtcacctcaggggttgaggtaaatgcaaaagtaagaaccaggattcctgagttgaggtttttttttcttttctacggacggtaaggcggacgtgtgggaacattaagaaaaggactaacaagcgtgtttgaaatggtaggagacacaggcaagcatgattgcgtggaagatgcacagattcacgcattagaagacaccatcgcatcacactattttggtgactacaagctattggataagaaaaaggtaaggagctgaaaaagaacgc

SEQ ID NO: 35538 - DNA, 2416 bp, Glycine max
  Clone ID: PAT_MRT3847_132094C.1
acgccggggaaagaggtttgtttggtgtgagtgaatagggatcagggatgtggaggctgaagatagcagatggaggaaatgatccatacatattcagcacaaacaatttcgttgggaggcagacatgggagtttgatcctgaagcaggcagtccagaggaacgggcccaggttgaagcagctcgtcagcatttctaccacaaccgcttcaaggtcaagccctgcgctgacctcctttggcgttttcaggttctcagagaaaataacttcaaacaaacaattcctcgtgtgactatagaagatggagaggaaatcacataccaaaaagtcacaagcgccgtcagaaggggcgcacaccaccttgcggcactgcagacctctgatggccattggcctgctcaaattgcaggtcctctcttctttcttcctcctttggttttttgtatgtatattacaggaaatcttgaatcagtatttccagaagaacatcgcaaagaaattcttcgttacacatattatcaccagaatgaagacggaggatggggactacacatagagggtcatagcactatgttttgtactgcactgaactatatatgcatgcgaatgcttggagaaggacctaatggaggtcatgacaatgcttgtgctagagcaagaaagtggattcgagatcatggtggtgtaacacatataccttcatggggaaaaacttggctttcgatactcggtgtatttgattggtgcggaagcaacccaatgcccccagagttttggatccttccatcttttcttcctatgcatccgggtccaatcacaccactcatcttacaattaagagaagagttgtttactcaaccttatgaaaaagttaattggaagaaagcgcgtcaccaatgtgcaaaggaagatctttactatccccatcctttgatacaagacctaatatgggatagtttatacatattcactgaaccgctacttactcgttggcctttcaacaagttgattagagaaaaggcccttcaagtaactatgaaacatattcattatgaagatgagactagtcgatacataaccattggttgtgtggaaaaggttttatgtatgcttgcttgttgggtggaagatccaaacggagatgctttcaagaagcatcttgcaagggtcccagattacttatgggtttctgaagatggaatgaccatgcagagttttggtagccaagaatgggatgctggctttgctgttcaagctttgcttgccactaacataattgaagaaattggtcctacgtttgcaaaaggacatgatttcatcaagaagtctcaggtgaaggataatccttttggagattttaaaagtatgcatcgtcatatttctaaagggtcttggacattctctgatcaagaccatggatggcaagtttctgattgcactgcagaaggtttaaagtgttgtctacttctatcaatgttgccaccagagattgtgggagaaaagatggaacctgaaagattatacgattcagtcaatgtcttgttgtcgcttcagagtaaaaaaggtggtttagcagcatgggagcctgcaggagctcaagagtggttagaatactccaatcccacagaattttttgcggacattgtagttgaacatgaatatgttgagtgccctggatctgcaatccaagctttagttttgttcaagaagctatatccaggacttaggaggaaagagatagaaaatttcattaccaatgcagttcgatcccttgaagatacacaaacagctgatggttcatggtatggaaattggggagtttgcttcacttatggctcttggtttgcacttggaggtctagcagctgccggtaagacttacaccaagtgtgctgccattcgcaaagccgttaaatttctacttacaacacaaagagaggacggtggatggggagagagttatctttcaagcccaaaaaagatatatgtacctctagaaggaagccgatcaaatgttgtacatacagcatgggctcttatgggactaattcatgctggacaggcggatagagaccccatgcctcttcaccgtgctgcaaagttgctcattaattctcagttggaagagggtgattggccccaacaggaaatcacgggagtattcatgaaaaattgcatgttgcattatccaatgtacagagatatttatccaatgtgggctctagctgaatatcgaaggcgggttccattgccttccactgaagtttaatttagaatggtttgagcacgaaaaggcaaaggcattttcattaagattgaggcaaataaagcaaataagttgtgtgtaatcaagcttaatcaattttttcatattcctatgtttatttcctacatatattggtagaaaaattatttcag

SEQ ID NO: 35539 - DNA, 2669 bp, Glycine max
  Clone ID: PAT_MRT3847_132095C.1
atttgggctcgagttggtgtgagtgaatagggatcagggatgtggaggctgaagatagcagatggaggaaatgatccatacatattcagcacaaacaatttcgttgggaggcagacatgggagtttgatcctgaagcaggcagtccagaggaacgggcccaggttgaagcagctcgtcagcatttctaccacaaccgcttcaaggtcaagccctgcgctgacctcctttggcgttttcaggttctcagagaaaataacttcaaacaaacaattcctcgtgtgactatagaagatggagaggaaatcacataccaaaaagtcacaagcgccgtcagaaggggcgcacaccaccttgcggcactgcagacctctgatggccattggcctgctcaaattgcaggtcctctcttctttcttcctcctttggttttttgtatgtatattacaggaaatcttgaatcagtatttccagaagaacatcgcaaagaaattcttcgttacacatattatcaccagaatgaagacggaggatggggactacacatagagggtcatagcactatgttttgtactgcactgaactatatatgcatgcgaatgcttggagaaggacctaatggaggtcatgacaatgcttgtgctagagcaagaaagtggattcgagatcatggtggtgtaacacatataccttcatggggaaaaacttggctttcgatactcggtgtatttgattggtgcggaagcaacccaatgcccccagagttttggatccttccatcttttcttcctatgcatccagctaagatgtggtgttactgtcgattggtatacatgcctatgtcttacttatatgggaagaggtttgtgggtccaatcacaccactcatcttacaattaagagaagagttgtttactcaaccttatgaaaaagttaattggaagaaagcgcgtcaccaatgtgcaaaggaagatctttactatccccatcctttgatacaagacctaatatgggatagtttatacatattcactgaaccgctacttactcgttggcctttcaacaagttgattagagaaaaggcccttcaagtaactatgaaacatattcattatgaagatgagactagtcgatacataaccattggttgtgtggaaaaggttttatgtatgcttgcttgttgggtggaagatccaaacggagatgctttcaagaagcatcttgcaagggtcccagattacttatgggtttctgaagatggaatgaccatgcagagttttggtagccaagaatgggatgctggctttgctgttcaagctttgcttgccactaacataattgaagaaattggtcctacgtttgcaaaaggacatgatttcatcaagaagtctcaggtgaaggataatccttttggagattttaaaagtatgcatcgtcatatttctaaagggtcttggacattctctgatcaagaccatggatggcaagtttctgattgcactgcagaaggtttaaagtgttgtctacttctatcaatgttgccaccagagattgtgggagaaaagatggaacctgaaagattatacgattcagtcaatgtcttgttgtcgcttcagagtaaaaaaggtggtttagcagcatgggagcctgcaggagctcaagagtggttagaattactcaatcccacagaattttttgcggacattgtagttgaacatgaatatgttgagtgcactggatctgcaatccaagctttagttttgttcaagaagctatatccaggacataggaggaaagagatagaaaatttcattaccaatgcagttcgattccttgaagatacacaaacagctgatggttcatggtatggaaattggggagtttgcttcacttatggctcttggtttgcacttggaggtctagcagctgctggtaagacttacaccaattgtgctgccattcgcaaagccgttaaatttctacttacaacacaaagagaggacggtggatggggagagagttatctttcaagcccaaaaaagatatatgtacctctagaaggaagccgatcaaatgttgtacatacagcatgggctcttatgggactaattcatgctggacaggcggatagagaccccatgcctcttcaccgtgctgcaaagttgctcattaattctcagttggaagagggtgattggccccaacaggaaatcacgggagtattcatgaaaaattgcatgttgcattatccaatgtacagagatatttatccaatgtgggctctagctgaatatcgaaggcgggttccattgccttccactgaagtttaatttagaatggtttgagcacgaaaaggcaaaggcattttcattaagattgaggcaaataaagcaaataagttgtgtgtaatcaagcttaatcaattttttcatattcctatgtttatttcctacatatattggtagaaaaattatttcatgtcggcttgtatagatgttcttaatgttcgtgttacgatacaaagataagtctagtaaaatactacgcacgtaacattagagggctgtgaagaagataaaaatgttaccaagaaaattaattagtttctcagtgatactcaatacacagggtcgtgcctatggtaaatagggatccccaagaaataacaagc

SEQ ID NO: 35540 - DNA, 600 bp, Glycine max
  unsure (1)..(600): unsure at all n locations
  Clone ID: PAT_MRT3847_132096C.1
cccccccccaataattcatgtagccaactgtntgtacaaatttcacgcatctgtacgtattcgagaagacgaggtaaggggacaaccaaaatcattgacatcctaaagcattcgtagttcaaaaattccatcttcaatttacaagtctttttggacactctgtccctaatttcaacacatacaacaatgggttttcgtttgcctggtatcagaaaggcatcattttctgcaaaccaagcatcttcgaaagccgtggatgtggaaaagggctaccttgcagtctatgtcggagagaaaatgaggcggtttgtgatccccgtatcttacttgaacaaaccctcattccaggacttgttaagtcaggctgaggaagagtttggatatcatcatcccaacggtggcctcacaattccttgcagtgaagatgtcttccaacatataacttctttcttgaattaataaatgtcaattttttttggaggctgcatagattagcgaagaaattttgtacaataggcgtcttctcaacttgtaaagatctcccttttcgagaaagagggaaaagaaagattatagaatgacaaaagtcagtatttcatt

SEQ ID NO: 35541 - DNA, 247 bp, Glycine max
  Clone ID: PAT_MRT3847_132097C.1
tgtgacatcatgcaaggctagtgatttccactactgcaatcttgaaagagttgaaccttacatgagcaaatacactacaggggatagagagagtgagagtacttgtggaaacaattgcaccgaggattgcatatgtgtgggttatttgtaccacacggagaattctatgtgttgggtggcttatgatcttcaaaccctgactagaagggccaattcctcacatgtggattctattaaagtgcctaat

SEQ ID NO: 35542 - DNA, 409 bp, Glycine max
  Clone ID: PAT_MRT3847_132098C.1
gattgtgggcttgttgttgttttgacctggtttttttggtctgtttcctgtttgtgaaccaccccatcaatagtgaaaaatataggaaccggcctaggggcgaaaaaagccccctccagcgcgaggggggggggcaaaccccaaaccacccgaggggcgagcaagacccacaaaaagattgggggggggggaaaaaagagggcgcggggggacacccggaaattcgggcccggtgccggggggcgagccaacattccctaagggggggcggaataaaagatggggacaacaggggcaaagaggcccccggggggaaaggggcaaccgcaaaaaatcccccggaacaatcaggcggggaacaaaaggtggaaaggcggggggggccaaggagagagccacaccaaaagaa

SEQ ID NO: 35543 - DNA, 325 bp, Glycine max
  Clone ID: PAT_MRT3847_132099C.1
attagaactcaaaaatttgctctttaacttgagatttaatttaagaaaaaattaccgcacctggtgtctcatgttcttgccggttgctcctatcagaaaatatacaaacccccatggtgacaatttctattagattctgcgtccaaaaaagacgggatgggcatggcactgctggacaaacttccaaagaaagaattatgtagcggatgaccgtcccacttaaacaaggaaacttttttcttctttaagacacctttccacggactggatatagctgttgctttcaaacagcgggttatatggaggtaccaaaaatagagcggcg

SEQ ID NO: 35544 - DNA, 361 bp, Glycine max
  Clone ID: PAT_MRT3847_13209C.1
ccttttagtgccacctggaacccctatgttgaacttttccagaggctgcaaaggcatgctttgaaccttcaagttgttatgccctttccataagtgtgggggaaatgttggaaacaattgcagaattcctttaccaccatgggggttggaagaaatcagcaagaaccctgagctggttacacagacagatcagggaggaggatcctgagacatcttcttgggctggatcgggtctgtctaaaggaaaactctttcagtgtacttgactacatggaagcttgtgcaaattagagattacttgtgcaggtatcgggaaaacaatgggaatgggtcttgggagactcagataccatcttatcaa

SEQ ID NO: 35545 - DNA, 845 bp, Glycine max
  Clone ID: PAT_MRT3847_1320C.1
cgaattcgagctcggtacccggggatcctctagagtcgacctgcagctcttgtggcagctataacatctgtcatgggaacttcacattcaaacaccaatgccaccaatagtacaagtggagatgagtagtgcaatataataatgcataaggcttctgttattggtgtcatttccttaattttgcaaatttattttgttttgatcgttttcatattcaagataggtatagagatttttgttcttacgaatttgtttggcacaaagacgttcaccattattttccacgcatgggtttgtattttttttttaattttgatttaattaaaaaaaagtgacaacaaaattagaactcccactcatttacctttttcaattaattgtgatatgccagtaaaaaaaattaattgtgatatgaattacttttttattattaaaatttgaattaatgatgatataagttatcattttagctgtaataaaattaattataatataaactaatatcatgattgatttgattactattaataaatgattctaactactattaaaaatgataaattatcccttaatttatttaatttgaatgttaaaaaaattatgttgtgcagcaattaatttgattacttttaaaaattaacttatatttataattatttaaaaaccataaaaatatataactgaaatatatttgaaatatattttcattgtgttaaagggggtgaaaaaaataaataaaggaaacataatttcattgataaaatatagagcggaaatacaataagatttttttaattgtcccaagtattattcaacgtaatcatgatttacatatttattgattc

SEQ ID NO: 35546 - DNA, 2574 bp, Glycine max
  Clone ID: PAT_MRT3847_132100C.1
ctggagcgttggttcttttgatttctcattcatcacttcactaccgtcttgttttttgttttggttcttctcttcctcactccttttttcaaacctcgaaaccaaacaagggttttcttctctttccccccctcctgattctccattttccctctatttcacactccaattttctcctccttttcatattttttttcttctctgattctcaccaaaaccattttttcgtcttctgtattcaagttccctggaattctcaattcgggggcgtgttcgtttctacacatgtttggatgaagagacgcaacaggaccctatgtgttgttgttctccggtaccgatgattgtttatggctgaaagttgctgacttggttactgggttttgctgacccaagtggtagaagaagggtagggggaggaatcggagtgattgttgaaaaagtggggtttagggtttttggtgggggttgtggaatttgtgattgaattagggttgttgagtgcatgagagagtgaattgtgttgttgtgatggatgtggaggaaactgaggagttggtgtctttggacccagatttgttgctgcttccggaggtgtctccttttgcactgaaatcgagtccttatgttgttgaggagctattcacacagtggctttcgcttccagatacttgtcgcctggttaagtcattgcttgctgatgcaaaggcaggagctcgtttgaatgcacttgagaactcaacaaatacaaatgctctgtcaatcaactctctaccttccttgtttcctgctgggagtacaccaccactttcaccgcgcagttcatctggttccccacgtaccacaaaacagagaaatagtccttcattaggatctccactaaaattagccagtgagcctgtaagggagagggaggtcattccacagttctacttcaaaaatggtcgtccacctccaagtgaaatgaaagagcatttcctatatcaaattgatagtcgattttatggtcatttggatggtctacaattacatgaatttaagtcttttacaaaagagctctgcaaacttccctcatttttctccactgctcttttcaaaaagattgatgtcaattttactggatccataacaagggatcaatttatagactattggattcggggcaatatgttagctatggatttacccacacaaatatataccatactgaagcaaccatatcgaacataccttgtacaggatgatttcaaacctgtcctgagggaactattgtctactcatcctggattggagtttttgcaaaccacgcctgaatttcaggaaagatatgctgagactgtcatacacagaatattttactacatgaatagatcaggaaatggccgacttacactgagggaattgaaacgtgggaacctaattgatgcaatactacatgtagatgaggaagaggatattaacaaagtactgaggtacttctcatatgagcatttttatgtcatttactgcaaattttgggagctcgacacagatcatgactttttcattgatagctcgagccgaatcggctcgaggaaccattctcttacctatcggattgttgatagaattttttcccaggttccaaggaaatttaccagtaaaattgaagggaagatgaactatgaagattttgtttattttatacttgccgaggaagataagtcatccgaacctagtctcgaatactggttcaaatgcattgatttggatggaaatggagtgctgacacctaatgaaatgcagttcttttatgaggagcagttgcatcggatggagtgcatggcccaagagcctgtgctgtttgaagatatattgtgtcagattgtggatatgattggaccagagaatgagggatatatcacattacgagatgttaaaggcagtaaactttctggaaatgttttcaatattcttttcaatctcaacaagtttattactttcgagactcgtgatccatttctcatacgtcaggaacgtgaggatccaaatttgacagagtgggatcgttttgcacatagagagtatattaggctttccatggaagaagatggtgaagatatgtcaaatgccagtggagatgtctgggaagaatcacttgaggcccctttctgaggttaagatgaatcaaaggctatggattccagccactgaatatgcaagcagtataatatttgaagaggctatgttgccgttaagtgtctactaatagtgtgctctaaagaggttcccctcgaatatgtttagtatactaagaatagctagtgccttggacagggtacgagcaggtgcagatttatttgttattgttcatatacacatttcttagaattgtccgtatcaaattaaatttctgtaaaaaaaattgtggagtttttcttcttctttgtttcatgtttgatatatttttttccttacaaattttatcatggtcaaatgtattaaactttcaacgtttttatttgttaaacagagaagagaaattgtcatatcatatcctttaagtgaaaaaaaaaaaaaaaaagaacaaaggac

SEQ ID NO: 35547 - DNA, 262 bp, Glycine max
  Clone ID: PAT_MRT3847_132101C.1
gggaaaaacacttttcttaatgcttttcaaaaccatacaagtataacttgccacgggctaaacaatgcctatcttaacaggtattccaaaacaactgggcaaaaaaaacagagccccataaagccggtaaaaaggtgaggggaaaggatccctggcaagctgactattaattatggtcatgtcccgaattctaaagaggctatgatcatatacattacaatagttctctcagtagcttaaatcaataggggggtttttcaca

SEQ ID NO: 35548 - DNA, 262 bp, Glycine max
  unsure (1)..(262): unsure at all n locations
  Clone ID: PAT_MRT3847_132103C.1
gggaatattgggaatgttccacttgtcctgatttcngctttgtgtcgagcccaatccaatccctttggagncatggaaaaatgcagcacagatggaactgcctatgtatcatttggccantgggtcggtgctatcatcctatatacatatgtatttcaaatgttggcgcctcctccagaaggcacatttgagattgataatgaaagtgttcccttgaagagcactccaatgagtgatgctacacctgaacaagctccattgc

SEQ ID NO: 35549 - DNA, 408 bp, Glycine max
  unsure (1)..(408): unsure at all n locations
  Clone ID: PAT_MRT3847_132104C.1
gtattagatttgtttcattagattttgcgttcaaggatataaatatgcacatgtaatcatgaccaagaaataaataaataatcaatgaagttttttttctcaaaattcttatgagttaaatttcataagaaaagttaattctgaaataaatgttaatattatatntaatatataattaatatttattttataaatattaaaaattatatattattatatttgttcctatatataataaaaagaaacaaatagtagtgttttttactaatttaaaaattatatgagaccgcttacaagtatattgatttatgattttattcaatgcccctagtttaatgtgaagtctattagggagatatctatattgtttatgaaagtgaatgcatttattatcaatataactcacat

SEQ ID NO: 35550 - DNA, 240 bp, Glycine max
  Clone ID: PAT_MRT3847_132105C.1
ccaggattacattctaagatcactaccaatgtgtttgaaacaagggcccttttttcataaaaccccctaaagacaaaaaacaccttaagaatactttaactctgatttgaccacccaaagttaaaacctcatatagggaatgtcgctcccttcttcttacgcttcttattacatgaagaaaaaatggtcctttctaaatccctaaaaccggattaaacctatcattgacgaaaaaggaat

SEQ ID NO: 35551 - DNA, 231 bp, Glycine max
  unsure (1)..(231): unsure at all n locations
  Clone ID: PAT_MRT3847_132106C.1
tgtcataccgacaggaagaaaattaaaacacatcgcatcttttaaaagacgggagcgccaccacaccaccatnttcttaccactcccccaacatcctcatcacaacaacattatgtttactatcaaacgataacctactatatttcatttcacaaaaaccaaccaacttttaatctaaccccattctcctatctgttaacactaaacaaacctacctccacaaatttcaaa

SEQ ID NO: 35552 - DNA, 245 bp, Glycine max
  unsure (1)..(245): unsure at all n locations
  Clone ID: PAT_MRT3847_132107C.1
agctctgtgatgatttttttggcgaagtttctatatgttatgaagacgtttcaggtgcattatggggcattgatgatcactctaaatctattctgccaaannnntataatgcgattggtcagatgctgatgattctaataatacacaaccatgagcttatcatgtagtgtagacggattctatagcctggattcatataatgacataggtcaacatattcttgtcgcctcgcttgtaactgctat

SEQ ID NO: 35553 - DNA, 116 bp, Glycine max
  Clone ID: PAT_MRT3847_132108C.1
ggctcgaggcttattttagcttaatataacacctaacgcagttgataataaacaaacctatgaccgggcagcccattacccttgaggagcagttgctccaccgggacaatatcttc

SEQ ID NO: 35554 - DNA, 243 bp, Glycine max
  Clone ID: PAT_MRT3847_132109C.1
tcggttgcgagaagacgacagaagggtacggctgcgagaagacgacagaagggtacggctgcgagaagacgacagaagggggcagtgcgtgcctcactccccatatatacaaacaatcaatcacaatcgctggttcttggttggctcgtatcgatggctgtttgcttgctagtcactccctccatattgcatccaacatagatagaatcaattgatatggatcatgcatacacacctagatag

SEQ ID NO: 35555 - DNA, 1768 bp, Glycine max
  Clone ID: PAT_MRT3847_13210C.1
gccatatctcgagtcgcaatttcagtgtgttttttaagagagagagagaatcacgtttacatgtctctgaatttgcaactaaaaaatgttgaaacaattggttttcagtttcttcataacaacgctttctctttcacttatccttttcaccatcaatatcatacccatgcctcgctctcttttccctcaccaccacaaactcgctttcgccctccgacaaccgtcttctccgccctgacggcggagcagatcgccgcgccgccggtgaggatggtggctgtggttggcaacggagctgccagccctctcaagtccgcatcttgggaacaagtcatgcttcacactgcaaagagattgaaatgggttgatgaagggtatgaacttcttgtatttacagatgaatgtattatatctaatggaccgatgaccatgaaactccagagagaattactgaatgctgatatattggttattgttgctgttacaaacaaggaatctgttgagtggattaataacaacagaaaaactattgaaaatgtaatatgccttgactcttcaccggatttgaaaaacaaattaggaggctatgatgttcccagtgaagtgagaggaagtatgtttggaaacttttttggaaattctcaatctgagaaagctaaagaatcatatgaagtagtgcagactgtatctgaagcatgggatcgacataattctgatgatataaggttctgtttgctggtactaatcaatgcttatataaggcccgttccagtattgaagaacttgagagctaaaggtttttctaccctgaactgtatgttgaagaactgtggtcgtcaggtacttaattgcttgttggatcccaattgtagaaaagctcttcaatgcttgaacaagtgtagtcccgttgatcaagtttgtaactaccgatgtattgcttcatatgaaagtgcaaatctagaggctttttcactatgtgtattacagaaaaacaactgtcttgagttggaagcagaaatccctgacaagccatatgtgcctccaatgatcaagttccgggggaagaacttaagttatgaaatgacagaagatttgtttgttggatggttggggagtttggaatggagctggcgtgttgtagcagggcagaacccagcatatgatcagtttccatgccaataccagttgttctataggggaaaagcaaaagggtcattttggtacgaaccagtattccaggtaaaaacattggaaggccaattggtttggaggaggaggaaatatagagtcagaagaggtaaggtacctggcacattctatttcagtgtattagataatggagttgtttcaaatgagttttggacaattgtggatgtggctgataatcttagttggggtttgttccattatcgtggtgctgctagagttgcaggacaatcttatactggggcagtacttgttagtccagatggagcatttccaaatgacagagagaggacaaagatagttgctgcactagacaaatgtgaaattaaagagtgggagctatatactgttgacaattgttcatgcatagatccacccctaggaattccggagggttcaagtttacataccatagtccaaattgaagttccaaagtagatggctgtattattatttgtgccgagaactcatcagaattataatctctatccggtaatgttcagcacacatgcagattcaattttcaaagaaagttaattggttttgtttcttgtcagtgtct

SEQ ID NO: 35556 - DNA, 348 bp, Glycine max
  Clone ID: PAT_MRT3847_132110C.1
ccacgcgtccgcggacgcgtgggtcagagcccaatgggttatagtccttataacaagcccaaagctgattttgattttgatgatgatgatcacacactctggccttcactgtttcaagatctcaaaccaacttgattttgtttttgtcattgcttttttggcgtgggcttagatggtgagtgacgcttacctctttaatttttttttttttttacttttcttttgtagattatatcataataggaacgtaacatctagcaattaattatcatgagatgtcatgttttgctgcaacgctttcttgtattcattctccttgtttatacattagtattttttgacagctgc

SEQ ID NO: 35557 - DNA, 310 bp, Glycine max
  Clone ID: PAT_MRT3847_132111C.1
cgagaaggcagagaaagcaacagcaagaacagaagagaagaaggtgatagccgatgagcacgcaaaagcagaaaaatctagagcagagataaagctgcataaagctaaagcaaagcatgcagcagaaaagctaagcgccaaccagtcacattatagtctccaccataaccacaacaaccctgcgcttagtaaaacaactcagactcactaccagcaagagcaccagcaccagccacttaaagcaggtcctatgcctgaaaccgcttatccatcttatgcactagagagaaaaccctagccctccaaagaa

SEQ ID NO: 35558 - DNA, 237 bp, Glycine max
  Clone ID: PAT_MRT3847_132112C.1
tggtttttttttttttttttttttttttttattagggctctcaccaaaaaagggggccggggaagcaaaaaaaagatctgccacacaaaccgctcttttattaagataaaaaaaacggtccgctttgccaaagcgcgtggtaaagctgccccctaaaacggggacttagcttgatgggagaacccccccctgtgggggggggaaaaactcttttgaaaggggtccaacagggacttt

SEQ ID NO: 35559 - DNA, 290 bp, Glycine max
  Clone ID: PAT_MRT3847_132113C.1
cgataactaggagagacacctcgaaggatcaacagagatggagactatgactgaagagggcggtcggccatatcatttatcacgacgatgataacattgcaactctccaagacgacgacagtgatgtgatgttacatagctaacaacaatcgtgacaacatgctgctgcgtgcagcactagctaatgcctcatatgctagcatagcaacaccactgattgcctcaaccatggaggctactgagaatgcctcgtcaggatacatgacgaggagcacatgcagtgccgcgaa

SEQ ID NO: 35560 - DNA, 318 bp, Glycine max
  unsure (1)..(318): unsure at all n locations
  Clone ID: PAT_MRT3847_132114C.1
ngtcgcangcacgcgtacgtaagctcggaattcggctcgagtacggctgcgagaagacgacagaagggnngttaagagacnnaaaaaaaaaaaaaaaaaaaaaaaaaangngncnnccnncngttntnncccccancccgggnnttntttcngnnngggnncctncnngngtnnnaacttnccccnngnnggtnngtntnannngttgnggtnntnnnggggtnancngttncctgggnnaaatttttttccnccccnatttccncanagcnnnntnnnnnnnnccnntccannagctngcanngntacgngnaanaa

SEQ ID NO: 35561 - DNA, 192 bp, Glycine max
  Clone ID: PAT_MRT3847_132115C.1
ctctctatctgattacaagagaagaatcaaaacccgttgactgaaccctaaagggaaaatcagacagtgcggctccgtactaccatatcccaatctctaacactagcaagctggagcaacttcctcaccctaatcgacacatagttgggggggcctttttatatttgaggtgccttgatacacaaaacatta

SEQ ID NO: 35562 - DNA, 363 bp, Glycine max
  Clone ID: PAT_MRT3847_132116C.1
aacaatggggggggactgagtaaatttttaaagcaaggattcacaatcttttgaaaaggaaaagggtggtttaatcaaaacaggaatcatttggcttttgttttttttataacataaaaaatggagcttagtccatatcacctttaataaaaaggaaagggattttgggcccattggattggccattttttttttcaccaggaactaaaaacttttcacatagttttagtcttacaacaagcctttagcaattatttggtgaaaaagtttctttgccttatcattttcattttttttaaaaagagcaatgatgattatgttaaaaggaaccgcttttggggtgccacccttgtttttcatttt

SEQ ID NO: 35563 - DNA, 478 bp, Glycine max
  Clone ID: PAT_MRT3847_132117C.1
atattacaatgtttaaccattataatatttacaatatttattttattatttcagcattacatcaagatattgttatcgatagatgatatgtgtattttattttactaattaacataaaaaaattaaaaattatataagaatataatataaatatgtttatttaattttattattttatttttatcaattatttcagtaaataattttatcaaacatttatatttcaataagtcaacttaataactttcaattataaattacaaactttcaacaagctttttaattacttttgtcaaatatagtcatatttaaaacataaaattcaccaagctttatctccaatacaaaataattacttaaaactaattctaagagtcatgctaaccagtgtcattaatatattaattaagaaatcataatttttttttattaaaaatgttgcattgaaaatcatgaaagagtctatcacatgcacttt

SEQ ID NO: 35564 - DNA, 274 bp, Glycine max
  unsure (1)..(274): unsure at all n locations
  Clone ID: PAT_MRT3847_132118C.1
gcttttcacaaacaagaattaaatctcaaccattttcgagcacatccangnnnnnnntgcccgaaaccctaacgcaaaacgatatcaactcgaagaccgacccttcggtcgcaaagcagtacgacaatgagacaccaaaggnccagcaaatccaggagtctttaagctagtngnctcanagaaggtttgcntgctgacacctatagaaatggtnntgggcccatngggtgntngnggtaatgggnaanggaacggttccgattnctttccttgg

SEQ ID NO: 35565 - DNA, 1121 bp, Glycine max
  Clone ID: PAT_MRT3847_132119C.1
gagcagtccggcaagcgacttgccatcgagcctcgcaatgccactgcatcgtcgccatttgctcttcctgaaggcgccagagaagggcggccacagacacccaacgctcaaaatggcagtgcattgccacccttcccgggtcgggagtggacaatagaaggaagcaatgatccacaaattcaccgttggtttgagttcccatatagagccctcatcacttctaatgcataatgggatgtcaagtcttaagggagttagcagcaacagtgactcacccacaataccttttcaatcatctaattacctgaacaccacagtacctgattcttcattgaatcctggaatgacacacaatattggtgaatcgggcttcctgcaaactccagaaaatggggggcaaggaaacccaactaacaaaacctttgtgaaggtttacaagtcagggtcctttggaagatccttggacatcactaaattcaccagctaccctgagctacgcagtgagcttgctcgtatgtttggcctggaaggtgagttggaggaccctgtgagatcaggctggcagcttgtattcgttgaccaagagaatgacgttcttctccttggtgatggcccgtggccggaatttgtaaatagtgtagggtgcatcaagatactttcccctcaggaagtgcagcaaatgggcaacaatggccttgagcttcttaactctgtccccattcagaggctctctaacggcgtctgtgacgactacgcaggccgtgaggacccaagaaatttaagcactgggataacaattgtggggtctttaaactactgaatgatgtgacaatcaatactatgaatctcttctctctcttgtattattactcctacttctccactctttgtcaatggtgggatgtactgcctagttgtagtttataggctacttataagccttttgttttttttgtctgttttcctgttttttgctgcctaggaccattcataagataaacaatgtaaaccatatggcatcttgtcaatgtgctatctacaatatattgattacttaatctgtgtttggctaggagttcaatgcccgaagactgaagagcaaacggacaaaagtgaactga

SEQ ID NO: 35566 - DNA, 191 bp, Glycine max
  Clone ID: PAT_MRT3847_13211C.1
gtcgctcctttgatcgtcagccctaccgtcaatcgtcaatccccatctgacgacgacgatcatcaccactgacatcccaccctgaggcagcgacttgtcctccaacacaagcgaccctcgcccatccgtagcgacagggagcgcgcatcccttgggaacaatgcgcatcggcgcaactcgacacaacacac

SEQ ID NO: 35567 - DNA, 691 bp, Glycine max
  Clone ID: PAT_MRT3847_132120C.1
ggctcgagggtttacaagtcagggtcctttggaagatccttggacatcactaaattcaccagctaccctgagctacgcagcgagcttgctcgtatgtttggccttgaaggtgagttggaggaccctgtgagatcaggctggcagcttgtattcgttgaccaagagaatgacgttctgctccttggtgatggcccgtggccggaatttgtaaatagtgtagggtatatcaagatactttcccctcaggaagtgcagcagatgggcaacaatgaacttgagcttcttaactcggtccccattcagaggctctctaacggtgtctgtgaggacccaagaaatttaagcactgggataacaactgtggggtctttaaactactgaatgatatgacaatcaaatactatgaatctcttctctcttgtattattgctcctacttctccaccctttgtcaaatggtgggaagtactgcctagttgtagtttataggctacttattaagccttttttttttgtcttcctgttcttgctgcctaggaccattcttaagataaacaatgtaaacatatggcatcttggcaatgtgctatctacaatatattaattatttagtgtgtgtttggctagaaggttacaaacgtatgtttgcagaagtatcatcacccttacttttaatttatttttatacattg

SEQ ID NO: 35568 - DNA, 367 bp, Glycine max
  Clone ID: PAT_MRT3847_132121C.1
gtgaataatggagtggaagccgttcgtgcagtgcagcgccatacttatgatgtcattttgatggatgtttacatgccagttatgaatggtcttcaaacaacaaaactgattcggtcttatgaggaaacaggcaattgggaagctgcaagagaagctggaattgaacaatgttcaccagcttcaaatgaatgttctgtaccacttaaaaaccggatccacatcattgcgatgacagcaaacacaatgtcagagagtgctgacgaatgttatgcaaatggtatggactcatttgtgtcaaaacctgtgacattccaaaaactgaaagattgtctagaacagtacctgaggtgaggtgaatcaatccatg

SEQ ID NO: 35569 - DNA, 410 bp, Glycine max
  Clone ID: PAT_MRT3847_132122C.1
accacgcgtccggattctctaattccgatccttccgtaggcccgcagatccgttttgccctattgcggagatgaagaaccccaggaagaagaagagaccgaagccgcagaagaagcttgagaagaacaaaggcgttgctgctgctgctgctgatgttgccgagaacgaaaacgaaaacgaagaagaaaagagaaaacgcagcattttggaggcactggttgaggccttctccttgtcttcagtcagggaagcttccatggactataacattgtcggcggtgatcccgacagggctttggagatcctaaggaagggtttttcggacacatccgaggtttcgttctcgtgttttacttacggctctaattcttcttcttcctttaagacggggttggaattgggttccaaag

SEQ ID NO: 35570 - DNA, 349 bp, Glycine max
  unsure (1)..(349): unsure at all n locations
  Clone ID: PAT_MRT3847_132123C.1
cagaaggggggccggcannangaaacangggaggcagggagcacgggnccagnnnngcnccanggncnngaccaaggacagaaagacnngacgcggaacaagnggccanacaaggggggggggggagganaggcttttttttttgnancncccaanggagncncgccgggggacgggggccaagagncacaagccccgcagagccggncacaannaaaanggnacaaggcanannnggangcacccgggggaaaggaaccacnggcnnnnggaccggaaagcangggnaagggncaagnangganaaacgggcagagcanagggagaaanngganggcnnangcaaagg

SEQ ID NO: 35571 - DNA, 1049 bp, Glycine max
  unsure (1)..(1049): unsure at all n locations
  Clone ID: PAT_MRT3847_132124C.1
atttacaaatatgtacaacagtgactcacaaccgcatcagttatgacttatgactccaacagaacagtgttttgtttttacatctcgccaaagcataaagcttcagaaatagcttaccttttcttcaaaacagatctcactactagaaagaaaccaagccattaaaaccaacaaaacaaattgggnnggggggggaccctactaatgcaggaaacaaaaaaaaagggttgtgcctacaacacaaatgatacatttaaaaagaattaaaaaaatgagtaaaggagccctaaagtcctcaagtggatgtagattagggagttactgaggaaagagtgaaaagggcaatgaaatgatcataattgccttatcttcatgatttccccttccccttgactccttcacgctgattacgaaaatgactgagaagctgttgtgcttcttcactggttttgggggcaaggctgggggaagaatgcacttttccttagctcttggagtaccagactgagataatgcaactaggggaggtacagctccttcttggagaaccagggtacaaaacttttgattatgaagacatagttgcaagaggatggaagcagcattttcctttcccctctgagaacctgattcaacaatttcaactagtgagggaatgcccccttcccttgcaatttctattcggccctctgcaattgttgacaggtttgccaaaagagcaacagccttgtcaaccattttatcagtaggatccaatagcagaaccagaaacttcacggctccagcttgaactatacgagctttattctcatggaatattgataggttgaataaagcagtggcagcatccttctttcccctaagagttcctgaggctagaagacccaccaaagctttaacagcaccagaacggccaatttttgccttattgttatctattacagagaggctgaacagagcagcagcagaattctcctttgcaccatcattccctttctccaaaagatggataagtggttctatggcccctgcttccataatcaaggcct

SEQ ID NO: 35572 - DNA, 187 bp, Glycine max
  Clone ID: PAT_MRT3847_132125C.1
ggatttatagtgggccttttcaaaatttttagaacccactttacatttcctttggaaaggatagggttggaaaatgcctggttccgaataatataaaagtctccccctaaaatcctcaaggaggaaaattaaattcactgtccttaatcctttggggtggggaattactggaattgattttaagggt

SEQ ID NO: 35573 - DNA, 633 bp, Glycine max
  Clone ID: PAT_MRT3847_132126C.1
gttttgcgggattgcatgtcgagggcacctgttgttagattctccactgccaaaagagctgctcagttgaagttcttccttgaggatcctctcaattttgataccttgtcacttgttttcaacagctattccaaacacactattagttaatcattcaggggtcagtacgcatgtatcttaactgcatctttggattcacgttaaatcatgttgaaatatcagctaacttgattttaggtcgagtagatttgcaaggctccaaggtattcagtgtgctatggctgggaagaatgcttatttgagattcacttgtagcacgggtgatgccatggggatgaacatggtttccaaaggggtgcaaaacgttcttgattttcttcagaatgattttcctgacatggatgttattggcatttctggaaattattgttcggacaagaaacctgctgcagtgaattggatcgagggacgtgggaaatcagttgtttgtgaagcaatcatcaaagaagaagtggtgcagaaggtattgaagaccaacgtgtctgccctggtggagcttaacatgctcaaaaaccttgctggttctgctgtcgctggtgctcttggtgggtttaatgctcatgctagtaacat

SEQ ID NO: 35574 - DNA, 433 bp, Glycine max
  Clone ID: PAT_MRT3847_132127C.1
ttattttttttatatttttttttttgtttagccaaaacgctttcctgaaaattgtatacctcaagacgatttcaaacatttttccaaaaaattttattaagccaatgcgtaccttccccaaatggatgggagtttatctttatcaatttaaaaataatactggaaaatgaatggtgcagccgtttcaaatatgcaccacctacagcgggcctgggaatggtccattctccctttgctcattacatctgtcaacccattgaccatggtaaagagaaccattatatttggcaaacttggcacattctggtgccccttctcctttagcaggttcacgtaagtgatattcaccctctcgcttaaagcaatgcctggtttgattttgcagttggaaaacggaaatctgctagaaccgtctcaagcttaatttgcgggg

SEQ ID NO: 35575 - DNA, 351 bp, Glycine max
  Clone ID: PAT_MRT3847_132128C.1
tgggaggagactgtgggagcacaaggcgaacctgaagcagttgacatgttcaccatcgttgaccctatctctgattgagaggctctctcacgagcgcaggacaccttctacgggcaaacttcgaggtcgaccagtctatactccatgtgcaagctgacctcgaaacacttcagaaacagtctcgggtacacgcttcaagagcataggtcttcttagtcgagccatgacacacgcttgcttatgcgaagagaacaccaaagcttgagccatcttaggagccagacgaatcagaacctcacgtgctttacatctgctctgcagagacgtcaatctttgcatcacagagctgaa

SEQ ID NO: 35576 - DNA, 470 bp, Glycine max
  Clone ID: PAT_MRT3847_132129C.1
attttatctggttcgagcaaggttgtcttctaaaacctaggtcttcagttgtggcgagtaccaacagagggtgcaaggccatctatgcttctggtggggccagcagtgtggttttgagggattgcatgtctagggcacctgttgttagattctccactgccaagagagctgcacagttgaagtttttcttggaggatcctctcaattttgataccttgtcacttgttttcaacaggtcgagtagatttgccaggctccaaggtattcagtgtgctatggctgggaagaatgcttatttgagattcacttgtagcacgggtgatgccatggggatgaacatggttttcaaaggggtgcaaaacgttcttgattttcttctgaatgatttccctgacatggatgttattggcatttctggaaattattgttcggacaagaaacctgctgcagtaaattggatcgagggacgt

SEQ ID NO: 35577 - DNA, 314 bp, Glycine max
  Clone ID: PAT_MRT3847_13212C.1
cgctctccaacaacagcagcaccatgctccgtctcacactgcgtcgcggctttggccgtcgtcgccctctccgggagcgcgttcgctggttttgaaggacaaacccagaacaagttcatcgtgacctacaatgtcgtccccgacgtgttcggtctcttcgccttctacaccatgccccgcaccctccgagaggccaaggatctccacttcgactgggcttctgagcgcaacgccgtcgacaacaacaccgacctctactgccgcaagggagaccaccgcgtctgcgtgctcttcgacaaggctggcagcgtggc

SEQ ID NO: 35578 - DNA, 821 bp, Glycine max
  unsure (1)..(821): unsure at all n locations
  Clone ID: PAT_MRT3847_132130C.1
gaattcgagctcggtacccggggatcctctagagtcgacctgcagcggctgacggggcggtcgcttgaggggctgccgctggaggggtttgattatgactccattttggggcagtgctgcgaaatgccggtggggtatgttcagattccggtgggggtggcggggccgttgttgttggatgggtttgaatacactgtgccgatggccacgacggaagggtgccttgtggcgagtaccaatagagggtgcaaggccatctatgcttctggtggggccagcagtgtggttttgcgggattgcatgtcgagggcacctgttgttagattctccactgccaaaagagctgctcagttgaagttcttccttgaggatcctctcaattttgataccttgtcacttgttttcaacaggtttgattttttgaactctttagagtgtgttcatgagaattaatcattggtgatgccatgaaaaagtggttgttttaccttgataaataattgattatttcttgtcatgaagctattccaaacacactattagttaatcattcaggggtcagtacgcatgtatctttactgcatctttggatttcacgttaaatcatgttgaaatatcagctaacttgattttaggtaagtgttcttgtgtttgtttggttgcatgttgaagaatcgattttgagtttgaagcaattttagatagttttatgtggtcgataaacaaatntgtagtgagtacgttcactcagacaaactaaatgaantttctgtagtttaaggattaattttttatgttcatggttttttaaaatgttaggg

SEQ ID NO: 35579 - DNA, 665 bp, Glycine max
  Clone ID: PAT_MRT3847_132131C.1
gtctacttagtttgggatgatgaggcaatgtccatggaggaaagaagaatgtctttgccaaaatatcaggtgcatgatgaaagtagccaggtaagtcatactacctctttaatagatggagttgctttcacatctaaccagatgagtataggctttatgcttcctgttttcagattcagttgtttacacattgtttcctatttaaagaggtacattctgtataaatttttaattcttttttaaaaataaaataaacggaaaagaaaatatgatcattttaatcctcactctggcttccaacctaaatgggtagtgcatgctatttaattttgaatggcctctatggctgcaagctatggctccaatttttgtgggcatctaaagattcaagtaggtactgtattaatttcttttggtagttaattataattaccataccacaacataatttgtgaagcttgctgcaaactaccatcttcgtgatctttcatcccagcatttgtacaccgtaaaagagtatgtatatatgaattttattgggtttggttttgccaatgttattctttatctcccccctttgattcctaagtttggggttttgggtgggaaatggtcttacacatcagatatttgcccattcgtagcatcattacaatttatttatg

SEQ ID NO: 35580 - DNA, 316 bp, Glycine max
  Clone ID: PAT_MRT3847_132132C.1
cactgtttttatccacatagcctaattaagctcactactagccgcaacaagtgcaccaatccctggaaaacacatcggtggcccaaaactgactgctgatgccactcttctcggttgcactgatgcatgtggaacaatggaccccgctagtgggtactgaaacctgaacacccaatgatacggattttacaccccagggctgagcactactctgtgcaacaacctactaagctgcggcccgttcttcgagatactgtgctaccagaatctacggaagtgcaaccccacgaacccttcgatcctaatcactgcaacc

SEQ ID NO: 35581 - DNA, 422 bp, Glycine max
  Clone ID: PAT_MRT3847_132133C.1
aacaaaaatcagcccaggttaattttaaaggcccaggaacttatttacccccgctttttttacaggaccaaacctttttttcacttgggggctaaaccccaaccttaattatttccaatacaagaaaaaaacaagttccccccgaatttaatttaataaaagacaaaagcttggtcccccagaagcctggtttcgcattctctccaagaacatttttattcagggttggggtaacaacttagttcccttaccccttcctttttttgggctcgacagggggttccttaaaaaaccaaagcctatttggtttttacccggcacaattgccaaagagccggggggttggcttctatcagggggccccgaagggagacttttgggacttggcagagatttttcgggttcaaattgaagaagggggg

SEQ ID NO: 35582 - DNA, 372 bp, Glycine max
  Clone ID: PAT_MRT3847_132134C.1
acctcatttttcatatttcatggtgttaacaacttcatggcggggtttgttttccaccttatcatcaccatccctcaccattttattactcctttctctccctttattcctgttttccctgtccataagtttctcttgcctatcttatttaatattactttattcttattttattttcttccaattttgctcttttctttcttcctttttcctttctgttttatttcatatccttttaattttattttttgttattaacttccttttatttttttatactttctcttattttttattatatctcttctattcttctttttaatatttgtttttctccctttatttttttcattattaatatttttctctttt

SEQ ID NO: 35583 - DNA, 448 bp, Glycine max
  Clone ID: PAT_MRT3847_132135C.1
aattgcattttccattattgtcattggaaattctgctgttttcattggactttggagtgcacattttgtttggacatactactgtgtggcaagaacaaataggttcggactggttttcaagcttgtggtgctcatgtgtttgccaattcctctgttactttggccaatagtgggtattgttggaagccttttaggtggaattggatatgggttttttgctcctcttcttgcaacttttcaggctgtagggaagggagagaatgttaaccagaaatttcaccactgcttcattgatggttgtcggtcaacaattgaaagaagctacacagtggttcaagatgtcacagacttctgctttcactcctatttttcatacatggatgaactaagagaaaacttaccccatcatgaaaagccgttagatatccaactgtcattattgccatgt

SEQ ID NO: 35584 - DNA, 224 bp, Glycine max
  Clone ID: PAT_MRT3847_132136C.1
ggcacacaccctctacctctttaatctatatcccaaacccattggcgtggtcgcagtcgcagtcaagggccaaggcaaaaccttaaatggcttaacactttcgtcggaatccgtttttggttttttccgggccaggatgccggcgaaggacgacggttccgccagggagaggggcttggttctttttttgaaaatcggttaaaacaagcgcaccgttaaaacca

SEQ ID NO: 35585 - DNA, 258 bp, Glycine max
  Clone ID: PAT_MRT3847_132137C.1
ggaaaacaatggtctggcctttgcaaaaaccttgtttgattcttaatgattttttatcccattgcttggctgtcttcaattatccatgccccttgccattatcacgtttttcagctattctcttgagggtcgaattatcccaagacataaggttctagtggagaatcagattaatattaagctaagatacatcatgttgactagcactgacgaagaattcaacaaaatggtcaagggcataattagaaagcgcctcag

SEQ ID NO: 35586 - DNA, 315 bp, Glycine max
  Clone ID: PAT_MRT3847_132138C.1
gggaaaaaaacccccccctttttccacagggggggggggacaaaaccccccccaacttggttttggggaaaggaatgttcccgggccccttttttctttgggggggggccctttttaaattttggggacaccccaagggtttttcccaaggggggtggccttttcaacaaggtggccctcaaggggaaaatctttgggggggataaaaaatgtgggggcttaccctcttaaaccccccaaaaaagaatctttcttgttttttttttgaaagggcatacttgggagaaaccttttttaaaatggttcctttggggg

SEQ ID NO: 35587 - DNA, 954 bp, Glycine max
  Clone ID: PAT_MRT3847_132139C.1
gcaagaaccaagcaggaagggattcttaggttgggaaaccgaaacaagtaacgagagaccaaagtagccaagaacgaagcttgacgttgtcttgaagtcattacaatttcatacccacattccgctttctttggaacactctcgctttcgccttcttccttcacactcagcaaatgagtcgctatccagaagttctgtgggcacaacgttctgataaggtttaccttactgttgctctacctgatgccaagaatgtttctgtgaagtgtgagcctcagggtttgtttactttctctgcttctggggttcaagaagaagcctacagctttagcttggagctgtacggatgcattgaacctgagggttgtaaaactaaatctggcttaagaaacatactatgctcaattcagaaaggagaaaaaggttggtggaagaggctattgaagtctgaagagaaacctgctccatacttgaaggttgattggaacagatggtgtgatgaggatgatgaagagtcaacctctgatttggtatctaatgatgatgctcggtttgttggtgaagatgatagaagcagtgatgatgaaggaatgctgtatcttcctgatttggaaaaggctaggggatagaagctctcactgtactgacagatttagggagcatggttgacatggaatcatattcatatggaactatttacaataggggcagagatagactatttgataagatgcaccgtgatgtgattgttgctgccttgtatatagaatctaagctaattagtgctttgaaaacagtcttgatattttgtgtgactacttgggaccaattcttatgagaggtttctttgaagggaatgctggttgcatcatataatctaataacattgtccggaacctcatttgtcatttcaaggttgcaacatttataagaaattctatttttctccttttc

SEQ ID NO: 35588 - DNA, 352 bp, Glycine max
  Clone ID: PAT_MRT3847_13213C.1
agtgcacctgcggcctttgctgctgcttaaggctggtcgaacaacactgaggggggatcctccggttcaggattatagatcggattagtgacactggtgcgtcttcataatactgtcatgccttgtacctctactgattctagatcgagaacgcactgacccctgcctcatgattctttacgattgtctgtcacattagaagaggaatgcatacgttgctaaaacttaacaactctatttcacctcatttagaggggtcaaatatgcattaacagccaagatgtagagtatctatcagcatatatacatatataggtctacctttatgatgaatatgaacgttctatgtttt

SEQ ID NO: 35589 - DNA, 110 bp, Glycine max
  Clone ID: PAT_MRT3847_132140C.1
caggacagaatctctacttgggggatatctggccatctactgaagcaattcctgaggcagtccaatacagtgtgtcgcacgagatgttctgaagtacatacgcgggtatt

SEQ ID NO: 35590 - DNA, 303 bp, Glycine max
  Clone ID: PAT_MRT3847_132141C.1
aagggttagggttattttatttttattgaaagttgaaacaaacaaagctgaaaaaagaacacacggacccagcaacagaaaaacaaggacgataagacgaaactaaagaacgcccatgaaaaaggggataagaaaaagaggaaagcaaacaacacatgtacaaaaacaaaacagaaccgcaaactaacatcgactgaaatacaagagagaagcacctgaaagcggatgagagccacagagagagcaagactcacgcgaaaaacaaccaatagaaaggaagccagaaaaaacaaatactagaga

SEQ ID NO: 35591 - DNA, 261 bp, Glycine max
  Clone ID: PAT_MRT3847_132142C.1
gggggaaaaggaaggggtttttcaacttttgggaggaaaaaacctggaattttaaccccaaaggcaaccggaaaaaggttccaaaaaagccccttttttaggggccccgggaaaaaacaaaaatcccaaccccaaaaaaacctggggggaaatctggggggcgaaaaattattttaccccccggcgttttcccaatctccaaatttctacccaaaaaaagggtgggattttcgccggacccccaaaggggatccatttgcg

SEQ ID NO: 35592 - DNA, 400 bp, Glycine max
  Clone ID: PAT_MRT3847_132143C.1
gggggtcaaaccaatttttttcccttttttttcgctcccttttggccaacttttaaaaaggggggcaaacctttgcatagaaaaggcccatggggggggggaacgaccccggtggcaagacttcaaacccaacccccccaattagttggagaaactttaaaaggccccttgggaaaaataagggggctaacccaattcctttcaaaaggtgggcaatccccaccttttttttaaggtttatccggccatttccctttttggggcttaaaaataccttaacaaaggggggggggctcccggaaccggtcctctacaggggtccaaaaccccctgttcggactggggaccaactcatttactcccgccgctttgggaaaatatctgcgaaaaaattgtttag

SEQ ID NO: 35593 - DNA, 445 bp, Glycine max
  Clone ID: PAT_MRT3847_132144C.1
agccacaaggggcaaaaaaatttttttacggggggctggggccaacatttcccataaaatacaatagacccaaaaaaaggctaaagcaatatctcaaaaaccttggggcccccaacgagtattcggacccaactttattttttttaaaatggccaagggtacaaaaaaattagctatctaatctatcccgggttaaaaaggccctcaaaaattagggaagctcagggctctataacttttttttggattaaccaaaggccaacggaaacctctcactcactcaaacgggaaattaaattaccccacccgggttttatcccttcaacaaaaagcctcaatggaaaaaaggagccctatgtttcatcttcaccatctgaaagcaggtaatcttgaatttggtcccttagcaaactcaaattaccattgggggcttggtttgctcggc

SEQ ID NO: 35594 - DNA, 347 bp, Glycine max
  Clone ID: PAT_MRT3847_132145C.1
gttgagctgagtgagtcacagttgttctcattgaagcagaagaagaaatggcggcttctctgcaactggtccaatgcaaactagcgagaccctttcggtccttccctttgcgaaggtcaactccccctctgagtctgaggtgttgcgcttcgcccccttcttcctacagctcactctcatctcaagcctgagactggcttgcttcagatacgtaaagagcttggagtatttgcaaatcttagaccagctaccgtatactctccgttagtggatgcttcaactttgaagagagaggttgctgaaggggtcgatatcatgcttataagggaactcactggaggtatcta

SEQ ID NO: 35595 - DNA, 619 bp, Glycine max
  Clone ID: PAT_MRT3847_132146C.1
ccacgcgtccgggaatttcgaataaagggaaagagggtgcaaagtgcatcttctttttgttgttctctcaaactttaacaatctcataaataaataatcagaacgaagaagaagaagaattgaattcgaaaaatcgtagcgtagcgttggttgcgattgaaacggtacgatgggaagaggaaaattcaagagcaagcccaccggtcgccgccagttctccaccccggaagatatgcgtgagtgtcccctttttctcacttttcgttgtagtttacgtctttgccctttgaatttcgattgctgtttactattctttgtgggtctttttttatgtcacctgaatccaagaaattttgttgttgcaaaataatggtttttcaattttgttattgttttttttttttttttttgtgttttgttgaagctgtagaatgggatgaagggcggtgcatggatgttttgatgtgtgtttggaatttgttgggattgttagatctggcttgtgaagtctctgaatatctatctggttttgggttggaattgaatttgagtcacttgtttcatttattttgggttaactggtggagtttgggcccttttggttgattttttttgtcgg

SEQ ID NO: 35596 - DNA, 1119 bp, Glycine max
  Clone ID: PAT_MRT3847_132147C.1
acccacgctaatacccacgcgtccgtacggctgcgagaagacgacagaaggggagagttaataatccgaaactaggttaaatataaccttacctaaatactagagggaaagaaagatagaagttgagctgagtgagtcacagttgttctcattgaagcagaagaagaaatggcggcttctctgcaactgttccaatgcaaactagcgagaccctttcggtccttccctttgcgaaggtcaactccccctctgagtctgaggtgttgcgcttcgcccccttcttcctacagcatcactctcattcccggcgatggtatcggccccgaaatcatctctgtggccaaagacgttcttgtcctcgtgggttctctcgaagggatcaaattcgagttccaagaggttcttatgggtggagctgcattggatgccaccggagtccctttacccgatgataccctttctgccgctaagcaatctcatgccgttttgcttggtgctgttggaggttataaatgggataagaacgagaaacatctcaagcctgagactggcttgcttcagatacgtaaagagcttggagtatttgcaaatcttagaccagctaccgtatactctccgttagtggatgcttcaactttgaagagagaggttgctgaaggggtcgatatcatgcttataagggaactcactggaggtatctattttggagaacccagggctttggcaccaatgaaaatggtgaagagattggctttaatactgagatttatgctacacatgagatagatcgcatagctcattttgcatttgctcaaagacctcatcttcgtggtcacagacgttcttgtcctcgtgggttctctcgaagggatcaaattcgagttgcaagatgttcttatggctgcagctgcattggatgccaccggagtccttgtaccagatgataccctttctgccgttaaacactctcatgccgctctgcttggtgctggtggaggatataaatgggataagatcgagacacatctcgagcctgagactggcttgcttcatatacgtaaagagctggcagtatttgcagatcttagaccagctaccgtgttctctgcgttagtggat

SEQ ID NO: 35597 - DNA, 456 bp, Glycine max
  Clone ID: PAT_MRT3847_132148C.1
caacaattacagcttagctagcctcgatctccctcttgttgaattcccctaccccaaccaaaaccctttgtcggaacacaaaaaacaaatgatgtctggttggatgcaagacacagcagaagaacaaaactctgcttctgcttcatggccaaactcaaacgccaacaacgaattaagctgcgtgtcattgtgtgcttacaaaccgatctcctcccagatccatgaagcagaatggcggcacgtgcccaacaacataacacataccaacgttgctgcttctgataattataatctgcttcaacaaccattgcaccctactaacctcaactttctcactcccaagcccaccttttaccctttggagatgagttccgatgtgggatttcttgaccctcaagcttccttcacttcgaaaactgatggtgatgtcttcttgagctcaaataataacctttt

SEQ ID NO: 35598 - DNA, 2141 bp, Glycine max
  Clone ID: PAT_MRT3847_132149C.1
gtatgacgggcgtgagtcacagttttgcgggaagaagcagaagaatacggccagacaaaaactcagaaaacacagggaaagaaagagttgagtgatggcggcttgtctgcaactgtggcaatgcaaactagcgagaccctttgactcattaccggtgcgaaggtcaattcctttgagtctgaggtgttcggccgcgccctcttcttccaagccgacgcgctcctacagcatcactctcatccccggcgacggcatcggccccgaaatcatctcggtggccaaagacgttcttgtcctcgccggttatctcgaagggattaaatacgacttccgcgagatgcttatgggtggagctgcattggatgccacgggactccctttaccccatgaaaccctttctgccgctaagcaatctcatgccgttctccttggtgccgtcggaggttataaatgggataggaacgacaaacatctcaagcctgagactggcttgcttcagatacgtaaagagcttggagtatttgcaaatcttagaccggctaccgtatactctccgttagttgatgcttctactttgaagagagaggttgctgaaggggttgatatcatgcttataagagaactcactggaggtatctattttggagaacccaggggctttggcaccaatgataatggtgaagagattggctttaatactgagatttatgctacacatgagatagatcgcatagctcattttgcatttaaggttgctcaaaagcgtcgtcggaaactttgctctgttgacaaagccaatgtactagaggcatcaatgtttatggaggaagagatttttggcaatagcacaagaatatcctgatgttgagctctcacacatgtatgttgataatgcctcaatgcaactaatccgcgatccaaaacagtttgacaccatggtgacaaacaacatttttggcgatatattatcagatgaggcttcaatggtcactggaagtattgggatgcttccttctgctagcctgggggcttcgggacctggactttttgaacccatacatggttctgcacctgatattgctggacaggacaaggcaaatccatttgccactgttcttagtgctgctatgcttttgagatatggcctaggagaagaaaaggcagctgaaagaatagagaatgcagtgatggacactttgaacaggggatttcgaactggtgacatatattctgctggaacgaagctggtaggatgcaaacagctaggtgaggagatactgaagtcagttgaatctaacgttcctgctggtgctgctgcagtgtgattttgaaaccaactcgccatagcattttgggttctggtttaggttggaggccactatgactgccaaagccgagaaagtctccctagtctattaagttctggcttccttctgtatcatgtatttcggttaacacacccagcctatgtatgattgaattttagaaagtagcaaggttgtttatcttgtattcttgtacccgggattctagtttcccttgcatgcgaggtcgcttgtaatggtggaataatgattaatggagtttgtcttgttaaaaataaaaaaaaaacacggggttactatatgcatatataaatgtaaccctttgcttaaagtaaaattaccttataattgttttgcaccactttcttcttttactaattttactggctaagacaagcatttttttaaaataccttttagtatatctggattaatattttaaaagtattgaaaattgtagttggccgttaaacaaggttaagtgaggtaccacggcgattcaataagggtgggagaaaactctctcattcaaatgaggactttgcctatacatgataagcccaaaccccaagcaaaaaggttttttctagtaatgacaatgaaattgagaatcctgaagatcttctttttgagtatgtggtacaggatcttatagttgtgaatcattggcaaaccaagatattagatcttgcacaccactatccaacacttgtcattgagaagttgtgacttattgtcagtcaattggaaatttgtgacatggtatcaaattgtaacttccaagttttgagtgaaaggaaaatctcttattctcgt

SEQ ID NO: 35599 - DNA, 500 bp, Glycine max
  Clone ID: PAT_MRT3847_13214C.1
gtctgtcgctggatgtgccagaggccgtcacaaacacaactgggccgtgtgactgaggaagaggacgaggaagaggacctatccgggcatgatgaagaaaaccaattagtcaggtcgcgtactttcgcacctacttaacgggtacagccacatcacttactgggggaagcggtggcttagggggtggtgtgtccatttggggctgcggcgcaagctaaatgtgcaaccgcagctgtgcggtctcggtacaacactgcgcaaacatttaaagaatcggtgacacactgcccagttaatgggccgccagttggcgatagccggttagaggattgcgcagcagcagaactcacggatttcatgacattgtccatatctaaaatgcgtgccttagggccggttacactgacccacctgttagtcttggtacggttgacaatgcgataacaagcagggcagcccgttaagattaaaccaatggccacaatgtaacaattgctgga

SEQ ID NO: 35600 - DNA, 2490 bp, Glycine max
  Clone ID: PAT_MRT3847_132150C.1
tttttcaaaaacaagtactattatttactgttattaattaaactacgaagtttgatattttacaaatcaattacaataatcatttgaactgatgatagtatgaaagcgtacaacatatcacgacttcacattacttgaaagtaactacaatttttttatacatgtaagttccatgtatcaaatgcagctagctatataccaccccctacaacaaaaaatgatccaacaatatataactacagttgccaaaaataataataaataaactaagagaaaagaatctaaaaattttctttgtgaaaatcaaacttggtgctggttttcctagaaaagtctagagaaagccttttcagttccccaaccaatccatgcgccccacagtaaaaaacaccaactctttggtcagggtgtttgatggctgcatgtttaaagacattgcgccagttgggtcttgcaaaatgggtcttgacccttgttcctgaaactatatccacaccatttttggcatggtgaagagactggagcatagtgatcaaagctgacctagcatctccttcttcatacacacttgggcaatagttgtgaagctcaatgactccttccttgtcattctcttccacctcattcatcacccctttaaaccattcaaaggaaccttcctcacgcgtaacccagtagaaataagctcgcttggtggcaaaaggttttctcttgttgtccttttccaccctctccttcttctacatctttatgttgcttgatgttgtttagcaacatctttgagtatgcttatcaaaggggtggcaccaattcctagccccaccagaaggattacatcataatttttgtagtcttgtgctggagctccataaggtccatcgattaatagccttggcattcttggtttgttgttgccttgtagcatatcagctcgtagaagaccgctttgaccgtcacttgctggttgacatgccttggcgaaaacacccttcagttgtgatgtccagtcacccaaagttcgaatgtgaacacttaagtaatcatctcccggagctgatgtaatagaaaagggatgccattcaaatggggagacatctgaacagttaacgtatatatactggccactagagtacttaaatccttgtggtttagacacatgcaatgctagcacatttcctgggtacacagcaaccttgagaatcctcacacttttgtagccagacctaaacgcacggagtagcctttcgcatccgtatagtatcatgggaacggcgagatacatccatgtcgttttcttgtaccatttcttgctgaggtataggaagtatccgtgaatgatgaaaagcccatagacgatgacaaaaaggtggtgggagtaccaaaaggcattgaaaccagtgagccttttgagaggtttggggagttttagcctgttccttcggaaccaaggttgagccaaagtgtaggctattgccataagcaccacaatggctattccggtccaaccctcggttcccttcacgaaccaccaataattgttgggcctctcatccccaaaaaattgtttcatgggctcatattcctcgtctgtggcatgtaacaaccttgggaagtcacacgttaaatgtgaaattgcatgtatcccaaccccaattgcaatgccaaaagctatcaccttgtgaaagttgatgttgtcatcaaaaggaacagccatgcctagtttggtcttacttctgagccaagtgatggtgtttctgcagacaggcaacaagatcaaggccatgttgaacttgagggtttcagcagcacctttggctgaagtcacacaatagcccatgacatcgaacacggcacggtgcttgtattggatgaacttccaagtgaaaagaccagcgcaaatggaaagccagagggctatgacccaaatccgtttccaattgtcctccacaaagtaagccagtgaccggaagccacgcttgatggggttgtactcttttgtagggactagtttctggcttagcatttggctcagtaccctgctatctgtggttatgtgggttgattgtgctggggcttgcagaagaagcatttccaagttgtataactcaatgtatccaaggttgtccggatccagttcctccatgataagggcagcatattcctctgcacgattttgtatttttgacagcttattagcggaagcgcttaaggcgataatctcttttacttcttcttgggtgattcttccatcggcatctttgtccaccatgtcaaaaaaggtctgaagccgtgaatcaaaactctggtctgtaatttgctcccaaaattcacgcaactgatccttcgttatggaagctgatgttatccctcgacgacgagctaatgcatcgaataactcaccggcaaactccttcgattcgttcatccctatgcactggctaaagcgagtcttggggagctttgcatcaatggccaactcatcgaagcgct

SEQ ID NO: 35601 - DNA, 590 bp, Glycine max
  Clone ID: PAT_MRT3847_132151C.1
ccacgcgtccgctctcactgcgctaacgcacgctcctaagcgcgcattacactgagctttttttttacactcttccgttcttagctttcttttacacacattgaatttctgggcgctgacgcgaaatatgagctctgaataacaaacgaacagagttggcgtcgatctaagggatgagagaggggtaaagaaaaggctggagtgggaggggccagagaacagcgtggtgtccggggcactcaagcaatgggtagagatggtttgggggggggatgtggctcttctacaccgttcttcaggaagcgacacaagaaaacacgggctccggcagggtagcgctaacagagtgcactatcataaggaagagggggggagcgacatcaaaatctcacgctagaggagggtacaagaagactaacacaaagggagctgccaatgactccttcaaggtggtgcctctcaagaagatgtgggagcagaagtagcatagatgtaccctcaatatcagtgggacagccacatgacagcgtaatgcaaggtgaaagggaggaaggcacatatgtagggcagacttgtatgtgtgctatggc

SEQ ID NO: 35602 - DNA, 530 bp, Glycine max
  Clone ID: PAT_MRT3847_132152C.1
aagcaaatactcacgcgtcctaatttttgtatgtatgaatgctcattatacaatttctatgtataatcataacaaaccttcttcactctatgaccgatccacctgatggtgattttttaaaaaggaaagggacgacacaaaggggaaggggtaacaaaagatcttcgtaccaccgtaaacccgtaaactacttggcgaagagaaaacagaggctaatacgtcaccgggagacacgacacattcttactcaccctcccatagatcaaagcgtaaggtcaaccttgaatatttaacagacaacaccactgttggcgacaggactggctccttggcccttacgcagctggatccgatcttatctattttcatgacaaccttcatcatctaggccacctgttcgaacacaaaccgctctacttctagccagtcggtcactccctcgcatatgaacaactgtgatcctggggtctcggtacccttgtacctcttggatacgatgcctggaccactgagctagattacgaagctct

SEQ ID NO: 35603 - DNA, 470 bp, Glycine max
  Clone ID: PAT_MRT3847_132153C.1
gtgactgcgatcatcgtagttaaatggtctcattgagcgcaaagcgcggaagatccataggatcattgctgctaccatctgacaacttggcagcatgggacgcagaaatcacatcatgggtgtcaacggagccctcatgcaagccgatggtggcagagaacccatcgctcacccattcggtatgatcactcttaaagttgactgtgtcagagaggccatctaacttcatacatctgacattaatgtgacaactgaaaaatgtgatgacgacctagctagctagacgctggtgctactaataatggtagaccgattattactatataatacgtgatatactacgtctagacatactgatgctactaatgatgatgatgcatgacatgcggacgagcttatattcgcctctcattaggttgtcaacataactccgactgataagaagtctatcactgactatggttcacccg

SEQ ID NO: 35604 - DNA, 433 bp, Glycine max
  Clone ID: PAT_MRT3847_132154C.1
cttccaacaatacatgcatcacgttcgaattataatctacataatcattgctagcggtggatattaaataacgtcaagtttataatgcaacacgccatgaggctcatgacataaaacggtgaacagtagatgaaacttgaaggatcacacatgtgaagttgaagctcagaggtacgtttcagaggctggaacaggagcatacgaacccacgaagacgtctacatatatcatgccggcctaacctgctacttaaatgggcctacccagcagatccagttagcaaccaagtatacactgaccacatatgggccgaatgagcgagctggttacattgaaccgaccatgaatgggcctgatgctaacatgttgacacccacaacgaacgcgctcgcaatgggtgcaatgatacccaatgaccccttatttgggtcta

SEQ ID NO: 35605 - DNA, 456 bp, Glycine max
  Clone ID: PAT_MRT3847_132155C.1
ggcggagccggtggtgcccactcacatgcatgtggaagctggttggcacggcttattatgtcacctacttgagaaccttccagggcgtcatcaccttccgggcttgcgtcattatgctcaaattgaatagtgaggggaatggggtcataaccttgagctcacgggaacaggcctacttaactcatgatgatctgatacatgttgactgttctgatagtagagaccatgatttcactgctctactggcgaccttagatggaacgagagcgataagtttcaaccatctgaagttgacccgggactatatctagcgtggctgagtcggattttgtaagctactgaagaaaaggcaccgcctgacgcgttgaaactctttacacgatcgacaggagttatcctgagccattccttgctggagtgtggattgatgtgtgggaccatatatctaggacccta

SEQ ID NO: 35606 - DNA, 676 bp, Glycine max
  unsure (1)..(676): unsure at all n locations
  Clone ID: PAT_MRT3847_132156C.1
cccacgcgtccgtacggctgcgagaagacgacagaaggggactccactcacaactgaaaccaaaactgaaaaaaaaaacaaacaataccataacatggcttcttccaccatcacctcctccttcctaacatcacccccttcatctctcttcaacaaatcatcatccccttccttccatgccacccctactctccgccccctcgcgccacgcgcctccatgtccgcctggctcggcggccaactcttctccgccatggtagtgcgtaagcccgcacacctcttcctagacgagctcaatgtggagtatgacgaacaagacaactatgcggtgatcaagcacgcagcattgttcacatccaccatcatgagcaagctcttggccaggccaaacgtgaagctcttcaatgccgtggcggcggaggacttgattgtgaagaacgggagagttggtggggtggtgaccaactgggccttggtttcattgaaccatgacactcaatcctgcatggaccccaatgtgatggaggctaaggtggtggtgagttcttgtggccatgatggaccctttggagccactgnggtgaagaggctcaagagcattgggttaattgatagtgtgcctgggatgaaggcacttgacatgaacaaggctgangatgccattgtgaggctcact

SEQ ID NO: 35607 - DNA, 375 bp, Glycine max
  Clone ID: PAT_MRT3847_132157C.1
attcccgggtacgacccacgcgtccgcaaattttcaaccctaatcaatccaacccaaccaaaattcaccctcttgcaatcgagtgagtcaagtgagggaacgagtctaactcagtctccacgcactgatctcacagcacagcgagcgagcacaacgcttgggctgaggaagaaggaagaagaagcatggcggtgcggtccacagtgtcgcgtttcccgatggacacggacgcgcgcgagggctccggcctgctctggggtgtcaccgtcacgccgttcgccgccaccgacgagaacacccgcgctccgtcgtacggctccggcggcgacctcttgccccggtgcgagaactgctgggcctacttcaacacctact

SEQ ID NO: 35608 - DNA, 609 bp, Glycine max
  Clone ID: PAT_MRT3847_132158C.1
tcccgggtcgaccccgcgtccggttctagatcgcgatctagaacccaaaactgaaaaaaaaaacaaacaataccataacatggcttcttccaccatacctcctccttcctaacatcacccccttcatctctcttcaacaaatcatcatccccttccttccatgccacccctactctccgccccctcgcgccacgcgcctccatggccgcctcagcgccgccctacgacttcggatcgttccggttcgatccgattagagagtcgattgtgtcgcgcgagatgacccgcaggtacatgatcgacatggtcacccacgcgggctccgcgggtctctcgtgcgcctacgagctctccaaaaacccctccatcaacatcgccattgttgagcagtccgtcagccccggcggcggcgcctggctcggcggccaactcttctccgccatggtagtgcggaagcccgcacacctcttcctagacgagctcaatgtggagtatgacgaacaagacaactatggggggatcaagcgcgcaggattggtcacatgcaccatagtgagcaagctcttgggcagggcaaacgggaggctctgtgatgccgggggggggggg

SEQ ID NO: 35609 - DNA, 1143 bp, Glycine max
  Clone ID: PAT_MRT3847_132159C.1
ccacgcgtccggccacttgttcaatttgggatttttctttttaatttttttaaggatgataaaatttgagattgatggtgctccaagaatggtaaaatttttaccttttgatattcatagacacttcgtcttttttgagaattgagattgctttctttggcatagacatagagatactttatgtgatgggttcaacagcaaactaggactgaaaaggaatttaaattggttgcatctatatattttggcccatttgataattagaagaggagagaagtaaacttgaccatatatgaaaaagaagaaaatcttggttaattgttttcatataatataattctctagtttttttttttatatactgtaacttaactggttcggaaaacaattaatgtcttttttcaaaaacagtttttttttttaaaaaaaaattgtttatctttgttgtacattcaaaagcgtttttgtcttttgagtacattactactgttttttaaaatatttgtctgtccagtatttgaacagaactcttgaagaaaatagaaaaatatgtgaaaatatctcctaatttttgtttctagacataaaatgaagtatctaattgtttgagctttgttcgattgtgaaggaagggtccaacatttggagcaatgatgatttcagggcaaaaagcagcccatctggcttgagatcattgggacttcccaatgctttggattcagtaggaaacgttcatcctgagcttgtcctagctgctgctgaatccgctgaaattgctgaggcttaattaatgttgcaacaaatttaagttaaaatagtatcaatgcttgcaactagaaataataattgtagctcttagggaattaagctttgaaggtgttggtagtgatctattggggtggttgatgcgactctatgaagtttgttaatactatatgaagctttgagggtgttgctagggatctattgtgtcttactttcctcgaagcctaatttaattgggtcttttttctattataaatggagagggtggtgtaccatccataccttcgtctcaagtttcatgttttgttcaatttatttattattgtagtcattttatttgaaaaattcctaataaggaccttaaaaaggtattgattg

SEQ ID NO: 35610 - DNA, 861 bp, Glycine max
  Clone ID: PAT_MRT3847_13215C.1
agctggatcggccaaactgttaagtgttaacaaacattgctaaaactaaatgttatagttctgattctgatttctcactagtaaaattgaggatcggcattcagcaatgatgaattccacagaagaagagtatcgtggctgcgagattatggagaaagatgttcatgtcacgtttctcgagttaatgtactatttactcccatctccgtacgagtcccaagagatcaaccatctcactctcgcttactttgtcatctctggacttgacatcctcgactctctccacaaagttgcgaaggatgctgttgtcagttgggttttgtccttccaagctcaccccggtgccaagactgatctcaatgatgggcaattctatggctttcatggatccaaaacttcacagtttcctccagatgagaatggggttttgattcacaacaacagtcacttggcaagtacttattgtgccatttccatattgaaaattgttggttatgaattgtccaatcttgactctgaaacaattgtgacttctatgatggaacttcaacagcctgatggaagtttcattccgattcatactggaggcgaaacagatcttaggtttgtgtattgtgcagctaccatctgtttcatgttggataactggagtggcatggacaaggagaaaaccaaggattacatattacgttgccagtcttatgatctggtgcaaaatcctgttcctgtgccactttttgtgccttcgcatctctacgattcatgggcatcattggagattatattctttcaaggtgggcttaatcttctttgatagatgcacaattgctggttggctggatcttgcaaaagcaaggaaac

SEQ ID NO: 35611 - DNA, 2228 bp, Glycine max
  Clone ID: PAT_MRT3847_132160C.1
tttgttctagatcgcgagggccgcccttttttttttttttttttttttttgttttttttttttttgtttttttttttttttttttagaaaaaaaacaaaggccccccttataaattagatggaacacatgctaattatttttccaccttttttaatttgaagggttatcaaaaagaccttctgtcactttttttttttttataagcagctgcattggcggctagagcctagacaactactaataaaaaaaagaaagcagaggaaaatcaacacggctacaaaaggagctgcaacgcctatcagttgaagattagaaatccatgctaaccccttcctttaaaatcttctaccctttatccattttctactaccccatctctctccctttcccatctacttctaaaccttcatcaaacataactctcttcctagagaaacataaatatttttatagcataggacttatttgattcttgttaattcacaccacaaggataattgacatgggatcaagcttctctagttgttatgagggtgaatctgtgtctccttctccaaagccaaccaaagtggtggctacgaagggtggttcttcttccaacagggtctctataacggacttgagttttcctggctcaacgctttcggaggatctctccgtttctctagtggggtctaacctgcatgtgttttcactcgctgagctcaagatcataacgcagggtttctcttcgagtaactttctcggagaaggaggtttcggacccgtgcataagggcttcattgatgacaagcttaggcctggtctcgaggctcaaccggttgccgtcaagcttttggacttggacggttctcagggccataaagagtggttgactgaagttgtgtttctgggtcaactaaggcatccacatctcgtgaagctgattggatattgctgtgaagaagaacacaggcttctggtatatgagtatttaccacgaggcagcttagagaatcaactatttagaagatatacggcatcgttaccatggtcaacaagaatgaaaattgcagctggagctgcaaagggtctagcctttctacatgaagcaaagaaaccagtcatctatagagattttaaagcttcaaacatcttgttagactcggattataatgcaaaactttccgattttggcttggccaaagatggtcctgaaggagatgacacacacgtttcaactagagtcatgggcacacaaggctatgcggccccagaatacatcatgacaggacacttgacagcaatgagtgatgtgtacagttttggagtcgtgctcttggagcttctaacaggacgaaggtcagtggacaaagggcgcccacaaagagaacagaacctcgtggaatgggccaggtctgctttgaatgattcccggaaacttagcagaataatggatccaaggcttgagggtcagtattctgaggttggggcaagaaaagcagctgcattggcttaccaatgccttagccacaggccaaggagtagacccttgatgagcactgtggttaatgttctcgagccacttcaggactttgatgatgttccaattggaccctttgtttacactgttccagctgaacaacaacaatacaatgaagtcgcaaaagagagtgaaacacctaaggagaggaagagggaaaatggtcatcatcataaccgacgtcatcatcatcatcgccacaatggtcataggcatcatccacttaaatctcctaagacaccaatgccatcagatcagtcacagaatgatgaacaccgaaatggtagaaaaagtgggtctaattcacctgatacattcaatgcatcagaagctcaacgaagcatgggttagtagacacatatagatctttactgtacataggtgaattattagagttacatagtgtgccacgtactagtactaagtgcaacgagccttcaaggcaataagaaacaggaaaaagatgaaaaggaaaaggaaaagaaaaagagagtgccatatgtaatggtccttgcatggaaaacatgattgagttctattttttttttttaatttgtttatttgttccagaggaagttaattattttgaattgtgtatacaatgatgaattttttcccttgatgaaaaaaaacaaaagaccagttcaatattaatataaaaataataaaaaaaaaaatggttgactttatttgttggttttttta

SEQ ID NO: 35612 - DNA, 244 bp, Glycine max
  Clone ID: PAT_MRT3847_132161C.1
cgtgctacgacaggcactgcacgcgttggtgcaaaggaaccttcgcgacaatcgctcgcgctctcagagcgctttctgcacatcggacaattcatcgccaaagggcacaacaggtacacggagatcggaggcggacattcacgaagcgtatcagccgcctcttcgagtagaaggatatgcgaattctaatggatagacttgatgctgctggtaagaccactagcctctacaagctcaatctcgg

SEQ ID NO: 35613 - DNA, 458 bp, Glycine max
  Clone ID: PAT_MRT3847_132162C.1
tattaaaaaacatgcaaaccgctttattacaagggaaagaataacctagaatatatacacacatgggtcgcccttgaatacatgcaggatgcacaccatattcagacattacaactaccacatgtgatgattatcgaacaccctcaataaacgatatttctacgatgagaggagattcaaattcagctttaacgctcattcctgcattgattcattcctaaatcgtggatataactgcactagacaaagagagaactccacgagatggatttgatcttatgcatgcgtgcacactattaagaaacatgcacctcactgatttgttggtgaccatagagcttgatctcacgcgccttgatcatgatattgtgaggcacgctgaacaactgaaccgcgccaggagggtactttccggtgatccacctgtagatccacgccagcaccgtgatcgctgtaca

SEQ ID NO: 35614 - DNA, 1291 bp, Glycine max
  Clone ID: PAT_MRT3847_132163C.1
atacggcatcgttaccatggtcaacaagaatgaaaattgcagctggagctgcaaagggtctagcctttctacatgaagcaaagaaaccagtcatctatagagattttaaagcttcaaacatcttgttagactcggtaagtaatcaattactagtcactttctctgacatactctaattaatgcaccgtttggacaatttcactccttaattaatcaattattaactcactctttttaattattcttccaggattataatgcaaaactttccgattttggcttggccaaagatggtcctgaaggagatgacacacacgtttcaactagagtcatgggcacacaaggctatgcggccccagaatacatcatgacaggtaaataatttcacatcaagaagtaaaaaacaatgacaggttgacttggagtttaatttttaactcattgctagctcaaatctcacacgtgtacatttttttcttcttccgtataggacacttgacagcaatgagtgatgtgtacagttttggagtcgtgctcttggagcttctaacaggacgaaggtcagtggacaaagggcgcccacaaagagaacagaacctcgtggaatgggccaggtctgctttgaatgattcccggaaacttagcagaataatggatccaaggcttgagggtcagtattctgaggttggggcaagaaaagcagctgcattggcttaccaatgccttagccacaggccaaggagtagacccttgatgagcactgtggttaatgttctcgagccacttcaggactttgatgatgttccaattggaccctttgtttacactgttccagctgaacaacaacaatacaatgaagtcgcaaaagagagtgaaacacctaaggagaggaagagggaaaatggtcatcatcataaccgacgtcatcatcatcatcgccacaatggtcataggcatcatccacttaaatctcctaagacaccaatgccatcagatcagtcacagaatgatgaacaccgaaatggtagaaaaagtgggtctaattcacctgatacattcaatgcatcagaagctcaacgaagcatgggttagtagacacatatagatctttactgtacataggtgaattattagagttacatagtgtgccacgtactagtactaagtgcaacgagccttcaaggcaataagaaacaggaaaaagatgaaaaggaaaaggaaaagaaaaagagagtgccatatgtaatggtccttgcatggaaaacatgattgagttctatttttttttttt

SEQ ID NO: 35615 - DNA, 1396 bp, Glycine max
  Clone ID: PAT_MRT3847_132164C.1
ccttccaggatcacctagactgcacgaccacgacacgaccggactccactcaccactgaaactgaaacaaacatggcttcttccaccatcacctcctccttcctcacatcacacccttcatccctcttcaacaaatcatcatcttcatcattcccctccttccatgccacccccactctccgcccccacaggccacgcgcctccatgtccgcggcagcgccaccgccgccctacgacttcggctcgttccggttcgagccgattagggagtcgatcgtgtcgcgcgagatgacccgcaggtacatgaccgacatggtcacccacgccgacaccgacgtcgtcgtcgtcggcgcaggctccgcgggtctctcgtgcgcctacgagctctccaaaaacccctccgtcaatatcgccatagtcgagcagtccgtcagccccggcggcggcgcctggctcggcggccaactcttctctgccatggtagtgcgtaagcccgcacacctcttcctagacgagcttggtcttgagtatgacgaacaagacaactacgtggtgatcaagcacgctgcattgttcacttccaccatcatgagcaagctcttggccaggccaaacgtgaagctcttcaacgccgtggcggccgaggacttgattgtgaagaacgggagagttggtggggtggtgacaaactgggccttggtttcaatgaaccatgacactcaatcctgcatggaccccaatgtgatggaggctaaggtggtggtgagttcttgtggccatgatggaccctttggcgccactggggtgaagaggctcaagagcattgggttgattgatagtgtgccagggatgaaagcccttgacatgaacaaggcagaggatgccattgtgaagctcactagggaggttgtgcctggcatgattgttactgggatggaagttgctgagattgatggtgctccaaggatgggtccaacatttggagcaatgatgatttcagggcagaaagcagcccatctggctttgagatcattgggacttcccaatgctttggattctgtaggaaacgttcatcctgagcttgtcctagctgctgctgaatctgctgaaattgcagacgcttaattaatgttgcaacaaatttaagttaaaatatcagtgcttgcaactagaaataatacttgtagttagggaattaagctttgaaggtgttggtagtgatctattggggtggttgatgtgactctctacgaagtttgttaataatatgaaggtttgaaggtatgggtagggtaccatccacacctttgtctcaagttttatattttgttcaatttattttattttaaatttttaaaaaagacaatgaagtaattgatgcgatattattgttctc

SEQ ID NO: 35616 - DNA, 1591 bp, Glycine max
  unsure (1)..(1591): unsure at all n locations
  Clone ID: PAT_MRT3847_132165C.1
gtcgacccacgatccatgggagccctttccaacccacaccacgttcctcttgtcatccaaaatgaaaacaaacatgcaacattcccatggcttcttccaccatcacctcctccttcctcacatcacaccctggtccgcatttcccggctcgacccaccccacccgtccgctgaaaccaaaactgaaaaaaaaaacaaacaataccataacatggcttcttccaccatcacctcctccttcctaacatcacccccttcatctctcttcaacaaatcatcatccccttccttccatgccacccctactctccgccccctcgcgccacgcgcctccatgtccgcctcagcgccgccctacgacttcggatcgttccggttcgatccgattagagagtcgattgtgtcgcgcgagatgacccgcaggtacatgatcgacatggtcacccacgccgacaccgacgtcgtcatcgttggcgcgggctccgcgggtctctcgtgcgcctacgagctctccaaaaacccctccatcaacatcgccattgttgagcagtccgtcagccccggcggcggcgcctggctcggcggccaactcttctccgccatggtagtgcgtaagcccgcacacctcttcctagacgagctcaatgtggagtatgacgaacaagacaactatgtggtgatcaagcacgcagcattgttcacatccaccatcatgagcaagctcttggccaggccaaacgtgaagctcttcaatgccgtggcggcggaggacttgattgtgaagaacgggagagttggtggggtggtgaccaactgggccttggtttcattgaaccatgacactcaatcctgcatggaccccaatgtgatggaggctaaggtggtggtgagttcttgtggccatgatggaccctttggagccactggggtgaagaggctcaagagcattgggttaattgatagtgtgcctgggatgaaggcacttgacatgaacaaggctgaggatgccattgtgaggctcactagggaggttgtgcctggcatgattgttactgggatggaagttgctgagattgatggtgctccaaggatgggtccaacatttggagcaatgatgatttcagggcaaaaagcagcccatctggctttgagatcattgggacttcccaatgctttggattcagtgggaaacgttcatcctgagcttgtcctagctgctgctgaatccgctgaaattgctgaggcttaattaatgttgcaacaaattaggttaaaatagtatcaatgcttgcaactagaaataataattgtagacttgtacttagggaattaagctttgaaggtgttagtagtgatctattggggtggttgatgcgactctatgaagtttgttaatactatatgaagctttgagggtgttgctagtgatctattgtgtcttactttcctcgaagcctaatttaattgggtcttttttctattataaatggagagggtggtgtaccatccataccttcgtctcaaaaaaaaaaaaaaaaaaaaaaaaaaaattacaaaaagggcggccgtatagaggatcncaagacttacgt

SEQ ID NO: 35617 - DNA, 2227 bp, Glycine max
  Clone ID: PAT_MRT3847_132166C.1
acacactattaaacaacaacaatctcaatcttcttcttcttcttctggggctcgagtatctctacctctctttatttgagataggtttgaatgcgagtcttggggaccttgagttttcggagaaatcgaagaaggaaaaggtgagaagcttgagtgctgttgccaaagcattatcaatgggttgccgtgtttctcactctcaaaaaccaaccaagaaatttaagcttcccataaagtttctgaaggactgcaatggcgttgatcatgcctctgttccacggaagatacgttcagctgtgaagaaacggggtcgcgaatccttctttggtgattcagaaaaggtgaaccataggatgaacggaatggaatctccccaaaaagatggcataaagaaatccaaaaaacaaagaaccccgggctggtccacgaggcaagtttcaccggggcccatcacaaaggatgaggaagaggttgtggagactctatatgccttggctggaatgttcccttcagataaggcctccaatgctgttaagagtgaacttgacagtgaatcattaccagaaaactccacggttttacaggaccaagaggagagtcagagtgctaatgttactcttgaagcctcgggagctactcaagatgctcgaaaaagatgttctagggggtgtcaaaaaatcagtttttggatgaaaccaattatcaagggttcacttgcagcagcctcattattatggtaccccgttacgtggaactcattatagttcgacagtttcctataaacaacagcagcaaagtttttgggcggtgcagctagcagctcaaggtgggtcttcttctatgaattgcagcattgtgagggcccaatatcctaattggcaaagtggtagacatgactcttctgtagcccaagtaatccttccccattcccctgcatctgcatctgcatccttagaaacacttggatccaaaatcacttcaatctccgagcagaacctattcagcttcgcttcatcaagatccagggcaaatgggcaaggcatttatcttgcttcgtctgtgtgtgatgaaagtaaaggtaggttccgtagtagtaatagtggtaccccatcactgcaattgttatgtgatgagcgtatttgaaattgaacacaaaggatatggcatagaaatatactactatatcattgggttatatgtgcatgcgctggtctttttgctactgctacacctgccacgttaatcaacgtggcacggaacttgccgtgccctcaaacaatagtacaccaagggtcaaaatgtggggtactaacaaaagcacacaacttgaattggatgagaagtggaaatagtcatgctactcaaacagtttattctgctacaacgagtaattcacgtgaaactaagaatggtattcttcaacatgacctttatcatgaggctcccccaacacctggggtgtatgatcctcaaaagcaatgtttcaacttcttgtccttgtcaactggagttagtgatcagttaaaggccaacgaaatttttaataaaggtgaaagtaagttggagccatattcaaaacagcaactgccttattttcagtcactacaactacagcagcagcagcatggcctcatgcccgttcaaagttctacgtatgcctcaactttcctagatcagcttccagttgcaggaccacaggttcggttgcagcagcagcatctgcctcattattatggtaccccgttacgtggaagtcattatagttcgacagtttcctataagcaacagcaccaaagtttttgggcggtgcagctagcagctcaaggtgggtcttcttctgtgaattgcagtattgtgagggcccaatatcctaattggcaaaatggtagacatgactcttctgttccccaagtaatccttccccattcccctgcatccttagaaacatttggatccaaaatcacttcaatctctgaccagcacctcttcaccctcgcttcatcaagatccagggcaaatgggcaagacattcatcttgcttcttctgtgtgtgaagaaagtaaaggtaggttccgtagtagtaataatagtggtaccccatcactgcaattgttatgtgatgagcgtatttgaaattgaacacaaaagataaggcatagaaatatacttatttcattgttgtaaaaaaaaaaaaaaaaaaaagaagtaggctagtgagctggtgata

SEQ ID NO: 35618 - DNA, 372 bp, Glycine max
  Clone ID: PAT_MRT3847_132167C.1
gcaaaaaagaacaattaatccgataccaattaaagggtttgctcactactttcaaaggggttgcgcccaactgtcaaagaaagtacacccaaatgttccaaaaaaaaatgtggtactggttgccaaaaaattatgaagtgtatgcatagtgttatggacgaggggtttttatatcatcacacaaagatatataaaaaaaaaaaactatctcgtgcttaaacatatgctaatttgcccgaatacatatgagaattttcccgatgaaaaagcatgaatctaacactcaagaggcatttgaagaaaacccaattttcatgaagcatgaccctaatccttatgctaaatgactctaaaccctaaacttaagatcta

SEQ ID NO: 35619 - DNA, 430 bp, Glycine max
  Clone ID: PAT_MRT3847_132168C.1
ctatgccaagccgagccagagctacattgagcgcggcgtgttgaaccatcattctggactggcttctacaaagccctataccttctctaactggtactcacctgatggaaaattagatcgggccgtaaatggataacagctgtataagctgtggtaatctgtatactttggattcctaggctacgacactccactaacatagacttcatccgacttgttagcgaatgctgactgatgatccacatgtgcctagggttaactcacttgagaaggatgctccaccgaaatcctgtgaatctggtgattacaaggggaaagagcacctaaagctactgctatgccacacttggaacagatgctatttcatcatggttagagcacttgtactttgactaggagcaaattgagtcatgattgcaattttaagggc

SEQ ID NO: 35620 - DNA, 179 bp, Glycine max
  Clone ID: PAT_MRT3847_132169C.1
aaactagctaatcatattaaatggtcatttgcagagaagacaattaattagtacaagctacttcaaataaatttcagtgactacagtaatcaaagttaaatcccatggttccaaaaacttcctcaagtgcaagcctgtgcagttatagagatagccggacgcgtgggcggacgcgtggg

SEQ ID NO: 35621 - DNA, 114 bp, Glycine max
  Clone ID: PAT_MRT3847_13216C.1
gggtcgagtggatacttacagatttttcatatccggcacgacaacctctgccatgcaggggcggggccccataatgatgaccaacacgacaacatccgctacatcaccacttat

SEQ ID NO: 35622 - DNA, 219 bp, Glycine max
  unsure (1)..(219): unsure at all n locations
  Clone ID: PAT_MRT3847_132170C.1
ggaagtttatagaactctacgagaccccacttctttaaaatttacttatgatctttcanagctctctcccnccgttagcttttatatacttgcctgaacggggaaacttttactttaantaagttatacaatcaccatatttcttcaactgatcaccattttctgtcttctctaatacttgtactttcttctacgacttacatataacatttcatttta

SEQ ID NO: 35623 - DNA, 3316 bp, Glycine max
  Clone ID: PAT_MRT3847_132171C.1
cctcggcccgaggctacgcgtccgatttatgcattccatttcagttccaaagttgcaacagaagagagaggaattttatggatattcgaataactccttctcggggtgcggatcctcctaacgcagtaaggtggtttcgtttaggctatctgatttttctgccttatttaatgaagcaagtcatagtcagagttagaaactagttctagtgtaaaatataggttccttaagagttttactgggagatggaaatttaggtatgtggatccataagcatatgaacgtgaaatatactgacatgtttcacaaaacattaggggatatgtttagtaaattacttgctagttatgacattgaggttgaaggaactatgaatttgtagattcacagtgatccttatgtatcaatatcagtatccaatgctgttattgggaggacttacgtaatgagcgactgacaaagttcagtttggttgatacatttctaggtaagtattccggatcttgctgctgcagtgcactttcttggtaaagacaatgactttgtatgttcatagcttattggaattgtggcaaatcaaatagagcaaatatactcaggagcagtagttgaaggaacctttcctatcctgaataataatgggaagccttgtaagcaaggtgctgtcctgaccctatccattcagtacatacctatggagaaattgtgcatttatcaccaaggagttggagcagggccagaatacattggggttcctggcacatattttcctttgaggaggggtggaaccgttactctgtaccaagatgctcatgttccagatggcagcctccctaatgtgttgcttgacagtgggatgtattatgtgaatggaaagtgttggcaagatatctttgattccataagtcaagctcggcgtttgatttatattacaggatggtctgtgtggcacaaagtaaggttggttagggatgctgctggttatgcttcagattataccttgggtgatcttgtaaagtcaaagtcacaggaaggagtaagagttcttctccttatctgggatgatcctacgtcaagaagcatttttggttataaaacagatggtgtcatggcaactcatgatgaggaaactcgtagattttttaagcactcttcagtgcaagtgcttctttgtcctcgcagtggcaaacgacatagctggatcaagcaaaaggaagttggaacgatatatacacatcatcagaaaaccgtgattgtggatgctgatgctggaaataatagaagaaaaattatagcatttgttggtggacttgatttgtgtgatgggcgatatgatactccccaccatcctctttttagaacattgaatacaatacataaggatgactaccacaaccctacttttacgggtaatattggtggttgtccgcgggagccatggcatgatttgcattctaaaattgatggtccagcagcttatgatgttttaactaactttgaggagcgctggttaaaagcttcgaaacctcacgggattaaaaagttgaaaatttcatatgatgatgctttgctaaggctggaaagaattccagatgttattggcatcaatgatgctccaagtgttggtgaagataatcctgaagtttggcatgttcagatatttcgttcaattgattcaaattccgttaagaggtttccaaaggatccaaaagatgcaacaagcaagaacctagtatgtggaaagaatgtgctgattgacatgagcatacatacagcatatgttaaggccattcgtgctgcacaacattacatttatatagagaatcaatatttcattggctcttcatacaattggagtcaacataaagacctaggtgctaataacttaatcccaatggaaattgctctaaagattgctgaaaagataaaagcaaatgagagatttgcagtgtatgttgttattccaatgtggccagaaggtgttccaacaggggctgccacacaaaggattctattttggcagaataaaacaatgcaaatgatgtatgagacaatttacaaggctttggttgaggcagggcttgaagctgcattttctccacaagattatttgaactttttctgtcttggtaatcgagaggccatgaatttgtatgataatgccggtgtgactggagctcctcccccagcaaatagtccacaagcagccagccgaaatagccaacgcttcatgatttatgttcattcaaaaggcatgatagttgatgatgaatatgtgatattggggtctgcaaacatcaaccaacgctccatggaaggaacaagggacagtgagattgcaatgggagcttatcaacctcatcatacgtgggcaagaaaacaatcttatccacatggacaaatccatggatataggatgtcactttgggcagaacatacaggaacaattgaagagtgctttttgcaacccgagagccttgaatgtgtaagaagggttaaagcaatgggtgaaatgaactggaaacaattttcagctaaggaagcaacagagatgaaagggcatctactgaaatacccggtagaagttgatcgaaatggcaaggttagaccccttcaggactgtgaagagttcccggatgtgggaggaaaaatagttggatcttttcttgctatgaaggagaacctaaccatttgatattgagtttattacttattagtttgagtgttttcacattatgctagccaataggatatggtgtatgtatgtacattacaacatagaaacaattttgaaaagcatgatagttgaagaaacaattaccaacccaaaatccaaccaaataaagacaccatactgaaaaagaccaagtgaagatgatgtacaaatatacagctaagttctattgatctttctttcatgggacgtttacaagctttgcatgtctactacttccactcggagaccaagtgcagcaatttcaggcacatcagcaactaccctttggttctcatcattgttttgtcctccaacatattcctcacagaccatatgcctcattctctcagaaaaggattagtttatcagtaacacactgctgcaataacaatagagtttcattccaatgctggattttgtcttgtgcatgcttccttctttctatatgcacacttgccaatttatatatattgaaattaaaaatttaagggggcaacttagttactaaggttgccagtgggagagacaaactgagtggacttgaactgaggaaatgtcagagaaaaactcataaagggcctccttcattgtcttttgcaa

SEQ ID NO: 35624 - DNA, 420 bp, Glycine max
  Clone ID: PAT_MRT3847_132172C.1
aattcggctcgaggaggtgtgattccccttaggtgcgctcaggcaatgtgtgagtggagtgcttgtcaccctggggacgtctgacacaagcttccagctgatcatggtcagcctttagctttctcaactcctattcatgtcgtcgctctatctccgtgatgcgattttggagttgttaaagagtatttgtgtctgcatagttgtcggatgaggatggaagcttttgaaagaggtctcacttttgaggctagaccgagtgctaaccatggatgaacaagagagaattgacaagaaactgcgggatacattttaccacgacccacggtgggcactaaatgtacttaccaaaatccagaattgacacatgttagggtgggtgtggctaaagttggctcccgaacttcacatgtctgctttgag

SEQ ID NO: 35625 - DNA, 1938 bp, Glycine max
  Clone ID: PAT_MRT3847_132173C.1
aaaatcggcactcatgagttattattagggtttgcaacctttaaactctgaagctgcaatagcacagcacagaatggggcgcaaagagaagcagaacgcgaaggcaatagatgaggaacacgacgtagtaaattttaacggcgcttcaacgccgtccctcgttttcagcagcgacgacgatgaagccaaccaagatctcagcctcaagatcgtcgaaaaggccatgcgaatgcgcgccgccaaacacgccccaaacgacgacgtttcttctccgttttcgcagaaatccgaactcgcagtgcccctaaacgacgtcgtttcggatttgcccagcgcaatcgctgattccgaagtgacggaaaagaagaaaacggccaagttgaagagggaggcggctggggatcaaagtgttgttatagcggaggagcaagagatggaggagacaagcaatgctacagagaatcacgagtttgtggaaggaagcccggttctgataggccacaatatggttctgcgaaagctgcttcggggtccaaggtattttgatccaccggatagtagttggggagcatgtttcaattgtggtgaggatggtcatgctgctgtgaactgttcagcagcgaagcggaagaaaccatgctatgtttgtggtggtttgggacacaatgcaagacaatgcactaaggcgcaagattgctttatctgcaagaaaggtggtcaccgtgctaaagactgtctggagaagcacacaagtagatcaaaaagtgttgctatttgcttaaagtgtggaaattctgggcatgatatgttttcatgcaggaatgattattcaccagatgatctcaaggaaattcaatgttatgtctgcaagagagttggccatttatgctgtgtcaatactgatgatgcaacaccaggagaaatttcttgttacaaatgtggtcagctgggtgaagctgacagaaggggttcaaggttgcgggatgagattacaagtggagccacacccagttcatgcttcaaatgtggtgaagaaggacattttgcccgggggtgcacaagttctatcaagtcagggaagaggaattgggaatcatcacacacaaaagataaaagatcccaaaaagaaaatgattacatgggaaatagatctgcatctaatgatatggttggggctcgcagaaagaaacgttcacctaccgaagaaagaggcttttcaactcccaagaaatcaaagagtagaggtggttggacggcggagtatcctaccgaagaaagaggctttacaactccaaagaaatccaaaagtagaggtggctggacaacagagcatcctactgaagaaagaggctttaccactccaaagaaatccaagaatagaggtggctggacatcagagcatcctttggaacaaaaagactacacaactcccaagaaatccaagagtagaggtggatggatgtcagagcatcctgaagaattctttcctcccatgtcctcaaggagcaatggttataggtctctagggacaccatcttctagaaacaataaaattcattcatttggtggtggaagtcacactccaagttataaatcttccaaggtatggaatgatcatgcaggaacttcaatgtctcaaggatcagccaggtcaaatcatcatagattttcagcatcaaggtttggcaactctagtagtgacggacatggtagaaattacaactggtggtagcgatcatgtatatgctgacattatgttctctatatttccttttgttaacttgtaaaacagcacctgcaagttttctaaattaatatttaatttttcctttcagatatctattcaatgatactgtcgtaattctttcaaatttatggatctgttttaagggtatccaaattccctgttgaacttccgaaaaaaaaaaacttcaaaaa

SEQ ID NO: 35626 - DNA, 696 bp, Glycine max
  Clone ID: PAT_MRT3847_132174C.1
ttcctttttttttaaggataaattgtgtttcaagttggttaaaattaattttagtccatacattttataaaggatagtcctaatctttgtattttttttaatccagtaaattgtgttcctgactctatatatatttcattttaatcagacaaggaacacaatttactaaaggcctccggtaaaaaaaatatggagactaaaactatcatttttaaaatgaaaggaataaaatcactttgagtcaagaaaatttacccttctaataatcatgcaagtcaactcattgctaaaggacttggatcaagtgttgcacaagtgaggagttcagtatttgcttccaaatgagtcatgtcctcctcatccaaggtaacccaagcttctatgccatctcccagccttgtatccactaggatgatgagattcataaacattgaaactgaaccaattgaaccaacaccactcacccaagtgggctttccccacccaaaatcagcctcataatacccaaaattgcaccaactactaaacccaacataatccactacttcaccctttgatcccttctcacttattgccccaagactctccttcataattgaccttcccttatcacctctcatttcttcaacaaatttttcatcaacttgtgatattgatttcctcaactttcccaccaagtcctccaaccccatctca

SEQ ID NO: 35627 - DNA, 257 bp, Glycine max
  Clone ID: PAT_MRT3847_132175C.1
tcttttttttttactgcacgcgtaataggttaattgaaggactgactctcaattggaggggggttgcgggacccatatcaaaccaacatactatgatagggtcctaaaccgaagtatagcgtgagcacactcgacgtacagaaggatggcatgttccctctttatccagagatagcatcgagtactagagtttgtgaactaactaatgagtcaccgagccctccggtgggatttgtgttaagtgtgaactatgctat

SEQ ID NO: 35628 - DNA, 507 bp, Glycine max
  Clone ID: PAT_MRT3847_132176C.1
caaacaaggggggggacaaacaagctggcaccagcagggaagcatagaattggctgcaaacaccttgctttccacatgattagaatgtgttaaatcacatatagttgggtctgattacacggaattaaacattactattttagatatctttatcattgtgctgtttattatctttgaacaaatactttgaaagggcttattatgatcatacctgggaaaaatctataagaagacatcttttactttataacgtaattctggtatagggaatgcaaccttttaatataacggctaaaaggcaatgaaacgagacgttcatgagactgcctcatttattcatatatatccattgcctctgagggcaaccctttgtgtataaaaactttgattatatgtccgaatgcatgctggatcaaataaaattttctctgcttaaaaatcaccccaaacctttttgagctatatcaacccttttgtttctatcaagctttataagcgtgtccctat

SEQ ID NO: 35629 - DNA, 198 bp, Glycine max
  Clone ID: PAT_MRT3847_132177C.1
ggtgttgatcgggcatttcctccatttttttaagataacaatatgttgcagattggagctttgcaacatgaagggtgtattacccgatcgttgcacttatctatgtaaaggataccttcaggaggagatgctatttggggtgagagagattgggaaccaaaagatggcgttagccctggccaaatggagcgcttatgt

SEQ ID NO: 35630 - DNA, 722 bp, Glycine max
  Clone ID: PAT_MRT3847_132178C.1
cccacgcgtccgtacggctgcgagaagacgacagaagggctctgatgatgatgaaaaatataactttcgttcttccgatatttccatgaggaaaacgtttggagacctgaactgaagaggctttcttatgcttgacttcgtattccttctgcccaaagagggtgacctgttatttgtcacaatattcaagtgttttatgttttgttgtatagatattttgttgtttgctcgtagctttatctacatatttccacttttatttggcatcaagtcttatatgttttcttgtatagatactatgcacgtcaaagctagttctagcttaagtatcaaatagccttttaatgtgaatttttggggtggaagatgcagttccaatcatgcacttagcctctgaggatgatcagaaaaatacctttccgaattgtttatgaggaaaatacatggagacctgaactgaagaggcaatggctatgtagtggcttcttatacgtaggcattctggcttcaaaatattaacatgtacgtctaatgtttgtatggaatagtttcaaaatgtgtagttctttatgttcttgttcttttgtccttgtgtaattacgctggattatttattattgtagaatatagatttggtccatccaaattagatgattattggagactatcaattcactttggaagtgaagaaagcaggcccctatgtttgcccgtgctgctcc

SEQ ID NO: 35631 - DNA, 821 bp, Glycine max
  Clone ID: PAT_MRT3847_132179C.1
tcagatgtggacatagagggtgtaacttgtgctcctacccatggtattagcattggaagcctaggagtgcacaattctcaggcatgtgtctcaaacttaaccgttcgcaacaccatcataaaggaatcagacaatggcctgaggatcaagacatggcaaggaggaacgggctcagtgacaggcctgagatttgagaatatccaaatggagaatgtgaggaactgcatcatcattgaccagtactattgcatgtccaaggagtgtctcaaccagacatcagctgtgcatgtaaacgatgtgacatataggaacataaagggtacatatgatgtgagaacaccctcctatacactttgcatgcagtgacactgtggcttgcactaacataacactctctgagattgagcttttgccatacgaaggggagctactagatgaccctttttgctggaatgcttatggaactcaagagaccatgactattcctccacttgattgcttaagagaaggtgagcctgatacagttgtggagctctcagcatatgattgtaggagttaacatgtcacattaaattcatatatcatatagtacagttatagagcagagagttagagacacattgttgtgggttgtgattgtggtcttatgttttgttacttaggattcgtccctatttggggtttcccctagtgtgtgatgagttacgagatatagagtttagtctcttttttgggacctacattgtaatagcttgattgtaatagctacatttatatatgatgataggttttaaatatcatattaggtttcatttcaaaaa

SEQ ID NO: 35632 - DNA, 275 bp, Glycine max
  unsure (1)..(275): unsure at all n locations
  Clone ID: PAT_MRT3847_13217C.1
gaaaaagacacgantatctggtaacaaaaacttcatagatggaacgaacacttatagaactgccactgtcggtatgtcctcttttcgtgattatcaacttaattaacttactactcctatgcatttgagtaaaaaaaaaaacttaataacttatccaataaatttattaaatgaaaccttattcatgactcagactgtgaagcttaccaaaatgagattaaaaaaaactaaatttatnactccatgtgccatttgggtaaaaaaaacataattag

SEQ ID NO: 35633 - DNA, 294 bp, Glycine max
  unsure (1)..(294): unsure at all n locations
  Clone ID: PAT_MRT3847_132180C.1
gaaagcgagagaagccagcttggaatctatgtgacagacactgaacaacacgcacacaatgtcaaagcctctgttcaaaacctctccaaaactcctcgatcaagcaacatccacaacaacctctccacatttatctcctccgttagtctccgctctatcaggtcacatgatccacctcattgcgccttagtcagggatccaatggatcggaaacattctctctagatcggaagttcgagttcgggaatcgcatttggagcaccatgatncacgcacgatgttctcaaactgtat

SEQ ID NO: 35634 - DNA, 352 bp, Glycine max
  Clone ID: PAT_MRT3847_132181C.1
tacggctgcgagaagacgacagaagggggagcaaaaccctaatccctatttttcttccggagtggtgtcatttacgcttctcttctctgcagcgactatgcctaaccctaaggtcttcttcgacatgaccatcggcggtcaatctgctggccgcatcgggatgggactttacgccgacgtcactctccgcaccgccgagaacttccgcgcgccttggacccgccaaaaaggccttagggcggaccggaaagcccttcaattccaggggttcggccttcaaccgggggatcccaagtttaatgggtaaggtgggcgactcaaccgccggaaacggaccgggggggaggcgatt

SEQ ID NO: 35635 - DNA, 331 bp, Glycine max
  Clone ID: PAT_MRT3847_132182C.1
atgctgctcctaagcaaccaaaaccaattaagaatagaatgtctgctttaaaagatggaaaacttagagagacaagttctccaataagaggcaatcgcataaaggttggtggtgtttagacccataatatatattcttagacagtgttcatattgcccaatcccattttttgagcttatgatttgattccttttttttatgtgctactttttttccttttaatttcatcttctgttttttcattaagaatttctttttttttcttcttggaggtgtgtattttccattttctttttttctatttctatttctttattttcgtatcttttat

SEQ ID NO: 35636 - DNA, 703 bp, Glycine max
  unsure (1)..(703): unsure at all n locations
  Clone ID: PAT_MRT3847_132183C.1
cacgcgtccgccttgatgacccttatgcttctgctatcagaaattgtgaccctgaagggcccctaatgctttatgtgtcaaagatgattcctacatctgataagggaaggttttatgcttttggccgagtcttctctgggaaggtgtcaactaatatgaaggctagaattatggggccaaattttgttcctggggagaagaaagacctgtatgtgaagagtgttcaggggacttcaatttggatggggaagaaatatgaaacagttgaggatgttccttgtggaaacacagttgccttggctggtttggaccatttcatcaccaagaatgctactataacaaatgagacagaaattgaagcacaccccattagagctatgaagttttctgtgtcaccattggtaagtgtagctgttaactgcaatgctgcatcagatcttcctaagcttgttgagggcctaaaacgtttggcaaagtcagaccccatcatgatgtgcacaatttcagaaactggagaacacatcataggtgctactggtgagctgcatcttgaaacatgcgtaaaagacttgaaggacgattntatgaatgggattgagatttcaatatctgaccctattgtctccttcaggagacagtgctggagaaagtctgccacactgtgatgagcanatcacctaaacaacacaccgtttgtacatga

SEQ ID NO: 35637 - DNA, 264 bp, Glycine max
  Clone ID: PAT_MRT3847_132184C.1
aatggataaagggacccggattcggaacaccagtctcattcttcaaccctagtgccggggagccaccctttgtccaccgggggcgctgatgaaggaggtcggcaaccgcaaggtgcagccggaccaggtgcaaaacaaaacgtgatcagcttgggaaaccctagcgcgaggcaacatcaagtgtagcaaggggtgatggccataagttgaggggccaaacctgcaacaacgtggggggtggagattgttctgatggctttttct

SEQ ID NO: 35638 - DNA, 321 bp, Glycine max
  Clone ID: PAT_MRT3847_132185C.1
aaaaaaaaccttcccttttttttttttagactttttggatggaaaaaaaccagggtttggttttgggacggcaggtataaaatggttatggccattggggaaaaaattcggaaaaaaaaaaataggggtcaaacgggggtttttatgccaaccgggggtaaattttgaaattcctaacacggtgttttggaaaatgaatgtaaaagggctgcctttttacattggttaagcaggcaaccggttgtaaattttggaattttacattggtccacgtgagggggccgatttttaataaaagccaactttgattgggccaaccaa

SEQ ID NO: 35639 - DNA, 385 bp, Glycine max
  Clone ID: PAT_MRT3847_132186C.1
gctcgggagagggtaaagcctaattagggataaggaatgaatgcgtgaatcggttttaagggttaagccactcaggaaagggtaacgcttaatagaacaataaaagaaagaaatcattgggttagcatgacctaatgccccaatgcccatgctttagcaaacatctaaaatgtaatcttaatgcatcttagttattgagtcttcgcaaaagacatttggaagataggtaattaaggtaggcttgttatcgtgaggcatcaggggcaagtagaaggatagatgtggggcagaattaattcactggtattgataacagacaaatcctgaatccatatatctaggctaattagacttgtcaggttttaacgattttaatatatagatt

SEQ ID NO: 35640 - DNA, 110 bp, Glycine max
  Clone ID: PAT_MRT3847_132187C.1
cggtacagctgtacgaagacgacaaaacggtacgggtgtgcgaagacgacaaaacgatacggctgttagaatacgacaaaacggcacgggtgtgagaatacgacaaaacg

SEQ ID NO: 35641 - DNA, 409 bp, Glycine max
  Clone ID: PAT_MRT3847_132188C.1
tttttctagtccgaacaaactgcttattcattaatctgcgtacaaactatgacaagatacatgacaggcacgtgtaggtaaatacacgtacttagtaataacatatgatatatagtacagttgatccataaattaatccacatgatgttgtacggtaattaatattaatattaattatatagtacagttgatctgatccatatatataaacgaatccacgtgatgcagcgatatatatatagtatagtaagtatgagggagatgaaatgcgtgagccaggcgctcgccggctggcgggcgatgaagatgatgggggttgagagagttgtaagtgagcggaggagtggcagtggcggcggtgtgggtgtgcgggtagtatcctttacaagggacgtaatggagatacttt

SEQ ID NO: 35642 - DNA, 3090 bp, Glycine max
  Clone ID: PAT_MRT3847_132189C.1
atggctggctcgcatttccacttcccacgtgactcagaagagcaccggcctcctactcgtcaatctgcatcaaaagtgtgtcgagtttgtagtgatgagattggctatggtgaagatgggaagctgtttgtggcttgtcatgtgtgtcgtttccccgtttgtcgaccctgttatgagtatgagaggagtgaagggaaccactgctgccctcaatgcaacacccgctataagcgtcataaaggttgtcctagagtagctggtgatgacgaggaacattctgatgcagatgattttcatgataatcctgacgagaaacatgatgttaatcatttggaaaataaagactacaaggaacagcagtggcatcccaatggtcaagctttctcttcagctggaagcgtggtcggtaaagaatttgaaggggagaaagaattcttcagtaatggagaatgggaagaaagattagataaatggaaagccaggcaagaaaagagagatcttcaaaacaaagaggaaggaaaagatgaccaaggtgaagatgactaccttttggctgaggcaaggcaaccgttgtggcgtaaggtgccaatatcttcaagcctaatcaacccatatcgcatagtgataatcatgaggctggttatcctagttttcttcctccgtttccgtatcttaactccggcatacgatgcatatccactgtggcttgcctctgtgatatgtgaaatatggtttgcactgtcatggatacttgaccagttccccaaatggttccccataactcgtgaaacttacttagatcgcttgtccataaggtttgagcgcgaaggggaaccgaaccttctagctcccgttgatgtttatgtgagtactgtggaccctttgaaggaacctcccattatcacagcaaacactgttctttcgatcctcgctgttgattaccccgttgagaaggtgtgctgctatgtatctgatgatggtgcatctatgcttctgtttgatacactgtcagaaacttctgagtttgcaagaagatgggttcctttttgcaagaagtatagcatagagccaagggcacctgagttttatttttctcagaagattgattacttgaaagataaggtgcatcccacctttgtgaaggaacgaagggccatgaagagagaatatgaagaatttaaagtgaagattaatgccttagtggcaaaagcacagaagaaaccagaggaggggtgggtaatgcaggatggaaccccttggcctgggaacaacactcgtgatcatccaggaatgattcaggtatatttaggtagtggtggtgcattggacgtagaaggcaaggaactgccacgaattgtgtatgtttcacgtgaaaagcgtcctggctataaccaccacaagaaagctggtgctatgaatgctttggttcgagtttctgctgtgctttcaaatgcacctttcatgttgaatctggactgtgaccattacatcaacaatagcaaggctataagagaggctatgtgctttttgatggacccccagctagggaagaagctctgttatgtccaatttccacaaagattcgatggtattgatcggcatgatagatatgctaatcgcaacattgtgttctttgatatcaatatgaaagccctagatgggattcaaggtccggtttatgtcggtactggatgtgtgttcaataggaaggcattatatggatatgatccaccagtatctgagaaaaggccaaagatgacttgtgactgctggccttcatggtgttgctgttgttgtggaggttcaaggaaatccaagtcaaagaagaaatcaggaggaggagggggcctatttagtagattatacagcaagaaaaagaaaacgatggggaagagttatgttaggagagggtatgagtccatgtttgatcttgaagagattgaagaagggcttgaaggctatgatggactagagaaatcatccctcatgtcccaaaaacaatttgagaaacgatttgggcagtcaccagttttcattgcttccactctaaaggaaaatggtggaattcctgaaggcaccaatagccaatcactaattaaggaagctattcatgttataagttgtggctatgaagagaaaactgaatggggcaaagagattggatggatttatggctcagtcacagaagatattttaacagggttcaaaatgcattgtagaggatggaaatcagtatactgcatgccaaagagaccagctttcaagggatctgccccaataaatctatcagataggttacaccaggttctgagatgggctcttggttctgttgaaattttccttagtcgccattgcccattgtggtatggctatggaggaaaactgaaatggctagagagatttgcttatactaataccattgtttatccattcacttccatccctctacttgcatactgcacaattccagcagtgtgtcttcttactggaaaattcatcatccctactttgaccaaccttgctagtgtatggttcatggctctattcatctccatcattttaactagtgtccttgagcttaggtggagtggggttagcattgaagacttgtggcgcaacgaacaattttgggtcattggaggtgtttctgcacaccttttcgccgtattccaaggtctcctcaaggttcttggaggagtggacaccaatttcactgtcacagccaaagcagcagatgatgctgaatttggagagttatatctgttcaagtggacaacacttctcatcccaccaacaactcttataatcttgaatatggtgggagttgtggctggagtctctgatgccattaacaatggctatggttcatggggtcctttgtttggaaagttgttctttgcattttgggtcattgtccatctatatcctttcctcaaaggtctcatgggaaggcaaaacaggactcctactattgttgttctttggtcaattcttcttgcatcaattttctctttgatttgggtcaggattgatcctttcttgcccaagcaaactggtccagtgctcaaacaatgtggagtagaatgctaa

SEQ ID NO: 35643 - DNA, 432 bp, Glycine max
  Clone ID: PAT_MRT3847_13218C.1
acttggccgtcggtgcaactgtcggttacggtaagttcatctgaagaccacacgacaactgctacaacaattgttaattgcacatatttggacaccttggtggatgattatacaatggctacataacctagagaatttgtaccacattacattaggtggcccatgaataccttgctgacctacattctcacatctgttatcactggtgatattaaatataagccgaatcatagtaatattcaaatttccagtttatgttacgacaggggatccaaattgtgaactaaacactagaaaaatcttgctctgacataagaagaaaagacggtagtgcttataaatagaggcatttctgctgacagttctgcaaagcgagctaatgaatttcaaaaacatgctgctcatgacagtgccaaagatcatattcctgat

SEQ ID NO: 35644 - DNA, 424 bp, Glycine max
  Clone ID: PAT_MRT3847_132190C.1
cataaaaaatttttctttcttaataccatgatgccccaaaaccgcaatgggggatgtatatttacctagttcacacaaaatacaatcgcatccccaccaaccttaacgggtgatcccatatccaacactatgacgtactccacactccattccatttccatcccgtacataccccacaacataactctggcgcaatatatatccatgtgcttcctgttttaaatgtgtactcccaacaactacggtgcgatgcagccgtatctatagatacacattagatctctcccagggttgctgccttatatgaacaacaaatatgtcttttccaacaagacatccttccccatactgtgggcaaccaaactttctctccataaacaacccacctgcccaaaaacgttaaccatgttgttcaccgaaaact

SEQ ID NO: 35645 - DNA, 1155 bp, Glycine max
  Clone ID: PAT_MRT3847_132191C.1
cacgacacgagggaacctcttcttttctcatctcacgtgtaaaaataaatagttgctcagatccgtgttactctcccgagacccaattgcgtcaaattcacgatgatcaccatcatgatggtcgccgacaccgtcgccgtaaccgccgccaaaggcctcggcgtccttcgggcctatcaatccacctgtaacttttccgtcgccgatcagatctccgccatgattcagacttacgacgccgtcgcgccgccgccggtcaagcctactacctacaggctaagacgccgaacgctcctccggagaaaacaacttaccaaacgcagattatcaggtgacgactccggggacgccgggaacgaggggttcctcttcggtgacggcggagacggtccttttggaggtggaggtgacttcggtggcggcggcgtcggtggtggtggttggaatttcaatagatttgggggtggaaacaattgggatgaaccgtcatcttcggttccggaccctgcgttcgatttcgtgtatcaggtgctgtcgtggattatgctctcgaattgcttgcatttttcgttcaagaggattgttcgaattgttgcagcggggtcgattgtggattccgatagggaaaaggttcccgccagattggttccaatttgctgatttggtacccttttaagccggttcatggatcaaatcatccataattacgcattgcatccctgtttaaattgtgcatttgctgtaaataatgttgtatataataatttatcatttaattgactaattccaaggtaattattttgctgtacttatggtttgtcttagtgaattgtttataatttgatagatagtttggacccatagactcgtttatagcctaagttataccctttacatgtttagtggaagaaataagcgtctaggttgaatgattaattcccgcatcatcatttggggaagtactgcattgaaggcaatgtattatccctctcacatgttttttatattaatcctgtagagtggctaggacttttatggatgtttcttgataatagcttcaatcttccaattcgaggtcacatctttttttctgtgcctattcggtgttggtgccaacaatttacaatttatgttgtaaaaattctgatttgtttt

SEQ ID NO: 35646 - DNA, 3463 bp, Glycine max
  unsure (1)..(3463): unsure at all n locations
  Clone ID: PAT_MRT3847_132192C.1
atgacattgaactccatggctggctcgcatttccacttcccacgtgactcagaagagcaccggcctcctactcgtcaatctgcatcaaaagtgtgtcgagtttgtagtgatgagattggctatggtgaagatgggaagctgtttgtggcttgtcatgtgtgtcgtttccccgtttgtcgaccctgttatgagtatgagaggagtgaagggaaccactgctgccctcaatgcaacacccgctataagcgtcataaaggttgtcctagagtagctggtgatgacgaggaacattctgatgcagatgattttcatgataatcctgacgagaaacatgatgttaatcatttggaaaataaagactacaaggaacagcagtggcatcccaatggtcaagctttctcttcagctggaagcgtggtcggtaaagaatttgaaggggagaaagaattcttcagtaatggagaatgggaagaaagattagataaatggaaagccaggcaagaaaagagagatcttcaaaacaaagaggaaggaaaagatgaccaaggtgaagatgactaccttttggctgaggcaaggcaaccgttgtggcgtaaggtgccaatatcttcaagcctaatcaacccatatcgcatagtgataatcatgaggctggttatcctagttttcttcctccgtttccgtatcttaactccggcatacgatgcatatccactgtggcttgcctctgtgatatgtgaaatatggtttgcactgtcatggatacttgaccagttccccaaatggttccccataactcgtgaaacttacttagatcgcttgtccataaggtttgagcgcgaaggggaaccgaaccttctagctcccgttgatgtttatgtgagtactgtggaccctttgaaggaacctcccattatcacagcaaacactgttctttcgatcctcgctgttgattaccccgttgagaaggtgtgctgctatgtatctgatgatggtgcatctatgcttctgtttgatacactgtcagaaacttctgagtttgcaagaagatgggttcctttttgcaagaagtatagcatagagccaagggcacctgagttttatttttctcagaagattgattacttgaaagataaggtgcatcccacctttgtgaaggaacgaagggccatgaaggtaggccgtgaagataggacaaaaagttcttttagagaatatgaagaatttaaagtgaagattaatgccttagtggcaaaagcacagaagaaaccagaggaggggtgggtaatgcaggatggaaccccttggcctgggaacaacactcgtgatcatccaggaatgattcaggtatatttaggtagtggtggtgcattggacgtagaaggcaaggaactgccacgaattgtgtatgtttcacgtgaaaagcgtcctggctataaccaccacaagaaagctggtgctatgaatgctttggttcgagtttctgctgtgctttcaaatgcacctttcatgttgaatctggactgtgaccattacatcaacaatagcaaggctataagagaggctatgtgctttttgatggacccccagctagggaagaagctctgttatgtccaatttccacaaagattcgatggtattgatcggcatgatagatatgctaatcgcaacattgtgttctttgatatcaatatgaaagccctagatgggattcaaggtccggtttatgtcggtactggatgtgtgttcaataggaaggcattatatggatatgatccaccagtatctgagaaaaggccaaagatgacttgtgactgctggccttcatggtgttgctgttgttgtggaggttcaaggaaatccaagtcaaagaagaaatcaggaggaggagggggcctatttagtagattatacagcaagaaaaagaaaacgatggggaagagttatgttaggagagggtatgagtccatgtttgatcttgaagagattgaagaagggcttgaaggctatgatggactagagaaatcatccctcatgtcccaaaaacaatttgagaaacgatttgggcagtcaccagttttcattgcttccactctaaaggaaaatggtggaattcctgaaggcaccaatagccaatcactaattaaggaagctattcatgttataagttgtggctatgaagagaaaactgaatggggcaaagagattggatggatttatggctcagtcacagaagatattttaacagggttcaaaatgcattgtagaggatggaaatcagtatactgcatgccaaagagaccagctttcaagggatctgccccaataaatctatcagataggttacaccaggttctgagatgggctcttggttctgttgaaattttccttagtcgccattgcccattgtggtatggctatggaggaaaactgaaatggctagagagatttgcttatactaataccattgtttatccattcacttccatccctctacttgcatactgcacaattccagcagtgtgtcttcttactggaaaattcatcatccctactttgaccaaccttgctagtgtatggttcatggctctattcatctccatcattttaactagtgtccttgagcttaggtggagtggggttagcattgaagacttgtggcgcaacgaacaattttgggtcattggaggtgtttctgcacaccttttcgccgtattccaaggtctcctcaaggttcttggaggagtggacaccaatttcactgtcacagccaaagcagcagatgatgctgaatttggagagttatatctgttcaagtggacaacacttctcatcccaccaacaactcttataatcttgaatatggtgggagttgtggctggagtctctgatgccattaacaatggctatggttcatggggtcctttgtttggaaagttgttctttgcattttgggtcattgtccatctatatcctttcctcaaaggtctcatgggaaggcaaaacaggactcctactattgtagttctgtggtcaattcttctagcatctattttctcattgatttgggtcaggattgatcccttcttgcccaagcaaactggtccagtgctcaaacaatgtggggtggaatgctaagactatgtggagaggccatgttgatgtcccaatgagaagagtaaatggcacttgtgtgcgtgcttttttattgtcttactggcattgagtggtttgccttaatgagaagattaatctgtgtacattgacttaaaggggaaaattgggtctgattggaatgtcttcatttcaagatacaacaaaaccatatactatagccattgtcattgtttgggaaaacatgttcttagttttggtgctactggatgatttttcatctactgaaacttgattcttgagaataagactaatattttttgccaacaaaatgtcnnnnnnnanaaaa

SEQ ID NO: 35647 - DNA, 874 bp, Glycine max
  Clone ID: PAT_MRT3847_132193C.1
cccgggtcgaccggctcgagctcaactcaaagaaacaaatagtttctcagatccccagacccagttgcgtgaaattcacgatgatcaccgtgatgatggtcgccgacaccgtcgcagtaaccaccgccaaaggcctcggcgtccttcgcgcctgccaatccacctgtaacttttccctcgccgatcagatctccgccatgattcagacttacgacgccgtcgcgccgccgccggtcaagcctactacctacaggctaagacgccggacgctcctccggagaaaacaacgaaccaaacgcagattatcaggagacgactccggggacgccggtgacgagggattcctcttcggtgacggcggagacggtccttttggcggcggtggtgggttcggtggtagcggtggtggttggaattttaatagatttgggagtgggcacaattgggatgaaccttcgtcttcggtgccggaccctgcgttcgatttcgtgtatcaggtgctgtcgtggattatgctctcgaattgcttgcattttgcgttcaagaggattgttcgaattgttgcggcgggctcgattgtggattccgatagggaaaaggttcccgccagattggctccaatttgctgacttgacccttttaaaccagttcatcgatcaaatcattcctaatacacattgcatccctgtttaattgtgcatttgctgtaaataatgctgtatataataatttatcatttaattgactaattccaaggtaattattttcctgtacttatggtttgtcttagtgaattgtttataatttgatagatagtttggcccaaaaaaaaaaaaaaaaaaaaaaaaaaaaagcggccgctctagaggatcca

SEQ ID NO: 35648 - DNA, 663 bp, Glycine max
  Clone ID: PAT_MRT3847_132194C.1
atgagtgaagcttgcgttcgattcaccagtttgcttcactctgcctttcctttccattcccttcatagcccaaaccctaaacgccgttggttcttcccgccggcaaccgcacattgccaaatgaggcctacaatgatgcttagggctctaaccaagcagtttcttggaattgtaggcgatacagcaaacactgttgctaagaagccacccccacctcctcctctggtgtcacgcaaaccggcgttcattgatgcattcttgtataagatgaagaagaatccaaatcttttgttgaacaagaccatttggtcacggagatcgactatcttgccagaatttgttgatagcactgtcaagatttacaatgggaaaaccactattcgttgtaggatcactgagggaaaagtgggtcataagtttggagagtttgctctcaccaggaaacgcaagaccagagaacaagccaattccaaaaatgttaaacaacttaagaaaaagaaggcgagtcctggtgcagcgcctctttgcatatgcaagggtaaggccgcgtacaacatccctcccccataccttcgcataattgtatttgaagacctaatagttttccctgcgagaatattggctacaaggattttgatgaaatttgaccgtgattgtagttga

SEQ ID NO: 35649 - DNA, 735 bp, Glycine max
  Clone ID: PAT_MRT3847_132195C.1
gctttcgataccagtttgcttcactctgcctttcctttcccttcatagcccaaaccctaaacgccgttggttattcccgccggcaaccatttcagtggcttcttccgccgtcgccgctcattgccagtgctccattttctgatcaggaagaatgaggcctacaatgatgcttagggctctaaccaagcagtttcttggaattgtaggcgatgcagcaaacactgttgctaagaagccccccctgcctcctcctctggtgtcacgcaaacctgctttcattgatgcattcttgtacaagatgaagaagaacccaaatcttttgtcgaacaagaccatttggtcacggagatccactatcttgccagaatttgttgataccactgtcaagatttacaatgggaaaaccactattcgttgtaggatcactgagggaaaagtgggtcataagtttggagagtttgctctcaccaggaaacgcaagaccagagaacaagccaatgccaaaaatgttaaacaacttaagaaaaagaagtgatatttatcttctgtacttttggacaaaaataattttgcagatattttattttctgcaattatttacatcaatctgtatgtttcttaggttctctagattgtatttgaagacctaatagttttccctgtgagaatattggcaacaaggattttgatgaaatttgaccgtgattgcagttgaatcgcttctttgactatctg

SEQ ID NO: 35650 - DNA, 283 bp, Glycine max
  unsure (1)..(283): unsure at all n locations
  Clone ID: PAT_MRT3847_132196C.1
ttatgacctgttaatgaccatggcttctaggtagaacttgtaggaaaaggaattttagcttgacttttgtcccagcatgagtctttctgttgcttttgcacatntgacatgccatggtgagataacttaatataatttccccttagacatcataaggatactactntgtggtgagaggaagcactgaaagagcttgggagtaaggtggggcagtttgtgtaccaaaacatttgttcaagagctgcgatgggtagtgcattctcctaaggtctattcttgaaat

SEQ ID NO: 35651 - DNA, 1104 bp, Glycine max
  unsure (1)..(1104): unsure at all n locations
  Clone ID: PAT_MRT3847_132197C.1
acgagcagacacacgttgggatccgtcaagttgttctgtgctgtgtgtgttctactatggcaaagaaacctgtgaaatactttgtggtagatgcattcactgagtcagcgttcaaggggaaccctgcagcagtgtgtttgctagaggaagagaaggaggactcatggatgcaaggggtagcgaccgagttcaatctctctgagacatgctacttgactcccattgctgagtcggagagatccgatatttcgctcaaccgtttccgcctcagatggttcactcctgctacagaggttgaactttgtggccatgccacgttagcatctgcacacgttcttttctcatccggtttggtgaaatccgatattattgaatttgtgactctgtctggagttctaactgccaaaaaggtctcaggaatcaatgatggagaaggtgcctcagaggatgggcttttcattgaattggatttccctgctgatacagttactgaattcaattctgctgacatttcacaaatttcggcggctttgaatgatgctcctattattgatataaaaaggacaaccgttggagatcacctcttggttgaacttgcttcaggaaaagatgttgtagaactacagccagatattggtgcaatagcaaaatgccctggcgggggcatcctggtttctggaactgctcctccagagtctggatttgattattattgtcgaaccttctttccaaaagttggaatcaatgaggatcctatcactggaagtgcacaatgtgccttggcaccttactgggccaaaaagatggggaagtgtgatctcagtgtttatgcggcatcacctagaggtggagttgtccatgttcattttgatgatcagagcaaaaggatattgatgcgtggaaaggctgtaactgtcatgaatgggtgtgttatgatttgaactcgtgtataacattgcaaatattgattgactaaaaacctgaaattggattaatcgccaggaattggatttcgatacctgaattctaatctcaagttggtgattgacaatacttatgttattttccnnnatttgatatcaataaagtatanngtcacaatac

SEQ ID NO: 35652 - DNA, 327 bp, Glycine max
  Clone ID: PAT_MRT3847_132198C.1
gttgtgtgctcgcgtacgtcggctacgaattctgctcgtggggttcgggggaacgcgagtgagttgcttctgtttcactcaaagggctcagattgcgggagcgaacgcggttgctgacgctgttctgaacacctgattccaccttggaggtgcagctcgatcgaccatcaccgttcttcaagtgggaacagacacattctaacattgtacttgccgatctaagctcttcaacccggagcgctcaccccgtcgacatgcgttctcgcaccatatgttagagtgcgaatcctatgagtcacgtgggacgagtcattagcggacacttcc

SEQ ID NO: 35653 - DNA, 373 bp, Glycine max
  Clone ID: PAT_MRT3847_132199C.1
gcaacaccaaagaagaattggatcacaacatattgcaactattacatgatccatgaccatacacttttcaaaataattagtatacacttttcaaaaacaaaacaaaaaaaaaagtatacactcattccagatatagaagagagaaagacagctcatccgaaccctatgcatctctttcaacctttttaactttctaccactacttaatttaaggggctagaagccaattttaattagttcatcaatttatacttcataaccaacatagcctataaccaaatgtaatttccaatggtgaaagcatgtagatatttcttcatatatgtgactgggaacaatggagctgatagacgagtccaacacaactcctttg

SEQ ID NO: 35654 - DNA, 254 bp, Glycine max
  Clone ID: PAT_MRT3847_13219C.1
atacttttgcgcatatccaatttgaccgagtacggctgagcgtcaaatccgcgctctcgccaaatcatttcgcggtcacgtcctcagaccactggcgcaatatgttggaccatacaatacccaactatctgttcatccgcggcgttatctttggcttccaagcagtcacacccatatgcatcttcatcgcgtccttcagcatagccgagccgccgcaatcgcccttccgccgatttctcctcgtatggagtctg

SEQ ID NO: 35655 - DNA, 1218 bp, Glycine max
  unsure (1)..(1218): unsure at all n locations
  Clone ID: PAT_MRT3847_1321C.1
ctttgctgtatgtatctctattctctatcattatcatgtgactgatagattcttcttcacactgcaaacactgagtcattactcaaaaggactaaaaacttggttctatggagaaaggagcaatggtttttccttttccaatagcagtttcttgtctttttattatcgtccatatttttgctaattctgtttcaggtagcctagttttcaacttctatgcagcttcatgccccacagcagaactcattgtgagaaacacagtcagttcatcttcttcttctgatccttcaattcctgggaagctacttcgcttggttttccatgattgctttgtggagggatgtgatgcctctttgatgctactagggaataatactgaaaaaagtgatccagcaaataggtctgttggaggattttcggttatagaatcagcaaaaagagtccttgagttcctttgtcctggaacagtttcttgtgctgacataattgctttggctgctagagatgctgttgaaattgtcggtggtcctatgattgaaattccctacagggagagttggtggaatggtgttcagttgcttcaaatgtcagacccaacatatgggacaagttgcttcaaatgtcagacccaacattccttggacaccagttttacaattggatgagatgattaaccgcttctctgataaagagttgtccttgtttgaccttgtcatcctttcaggggctcacaccatattcacagctcattgcagctcattcagagataggttccaagaagactccaaaggaaagctcacactcattgacaaaacccttgacagtacctatgcagataagctaatgcaagagtgtcccttaagtgcaagcccttctgttcaagtgaacaatgatcctgaaacatcaatggtctttgacaaccagtactaccgaaatcttctaaccaacaaagggttgttccaatctgattctgccttgctaagggacaatagaacaaggaaatttgtggaggacttggcaaatgatcaagagtttttctttgaaagttggggccagtctttcttgaagctcactagtattggagtcaaaacaggtgatgagggtgaaattagacgttcttgcgcatcaactaatgcataaatatatgtgtcaggaggaattaacttacttcaaaagtaacttttgcattatggaaaataaanaacaggcacaaagttn

SEQ ID NO: 35656 - DNA, 210 bp, Glycine max
  Clone ID: PAT_MRT3847_132200C.1
ctttgaatttggctttagggttagagtgttgcatttttaaaactatatcataacttaggattttcttttaatgtgtaacccttgtgtgtgagtctcactctgattcttcccaaaaattttatatcttagtactgctggattttggatgaccaggttgaaaaaaaaaaaaacagaaaacaaaaaaacaagaaaataaataaaaacaaatgg

SEQ ID NO: 35657 - DNA, 541 bp, Glycine max
  Clone ID: PAT_MRT3847_132201C.1
taatatccgcggtgtaccatgtgaacttatttacagtatttcattataggaacttatatcatcaagcatgtaaagattatcaatgaaagaaccataaccaaccatgtttgaattttggtagagactaactttattatttccaaatgaacaagaaaattcaaatttgtccaaactagaaatagaaataaaattccatctaaaagacggtacaacaaaagtctcaaataaatccaaataaaatcaagtttttaactgtaatctaaaagttctaatagcttccactgcaacctttttgccatcacccacaaagatgaatctttaatcatcacttggcagtcgactccacaggcaaccctttcttcacacgccatgcggcatacttggaacactctttcttcatgtgtcccaacttcttgcagaagtaacaggtaaattcctcatccttattttgcttcttttgctgagaagtcccttccgcagcacccttagtcttctttcttttcttattctgagaggtcgaaagtaagtgagctttttcagt

SEQ ID NO: 35658 - DNA, 322 bp, Glycine max
  Clone ID: PAT_MRT3847_132202C.1
cttcggctctacaattctcccagtctctccatctgtattttatatcctgtaaattttatggctgccgtggaactacaagaaatagaccacatggatattcacccgacaaacattttgcaacatgtatttgagaaagctacccctctatctatgtttcgagaatttcaattctcaacgagtgacaaggatagaatggaaatagatgataacgactttcaactgtttctggcggataaaccatatgtttcagatttaaatgaaggatattttgcagtgctcatgaacgacttgagaaaagagatttggtctcggttaactgatg

SEQ ID NO: 35659 - DNA, 130 bp, Glycine max
  Clone ID: PAT_MRT3847_132203C.1
ggaaaagcttcagatggacttgcatgatgaagccagtatgcattacttccaggatctaataaaagacagtgagagtgcattattccgtcaaatggtagaaactatacatcgatgggctcaatattggcgg

SEQ ID NO: 35660 - DNA, 415 bp, Glycine max
  Clone ID: PAT_MRT3847_132204C.1
gcctcgtacagctcctaattaggctggatgctggtgctctgtggtgattatcagttctcgaaactatcagggtcgccattggaccgacaaagacgtgttgaacctctgtttcgcccttgctcggtctgaatcatatgatgctcatgaaactgccgcaggatcactatggaatcatgctctcagtgctagtgatagctctatcattcaccagaggaaggtggagctttctgctcttgttgacctctgttcttcatcaccatcccaacttggcaccattcatgtttacgttggcattggcttacatgtttgacggcagattggatgactatgctttaattagacctttatctcacagtatacctaacactagccagctcaagattgacctatatcgatggcttaggcacacattgac

SEQ ID NO: 35661 - DNA, 303 bp, Glycine max
  Clone ID: PAT_MRT3847_132205C.1
gaacgaccgacccgacggctcgatacccacacccatgacacattcgtgtttactgtttttagcaccgtactaatataatggggaatagtgcaaaatacatgggtattgggtttacaaatataacttgaccttgtatgatgaatggattaacaagatctattgcaccatcactgaccatgactcttaaatattacatacaagcaaatttctattctctctaacattatacatttgtgatgaagaaccctgcccaaacaggccgtaacacaaacactcttgccgatcgatagctaccacacatac

SEQ ID NO: 35662 - DNA, 307 bp, Glycine max
  unsure (1)..(307): unsure at all n locations
  Clone ID: PAT_MRT3847_132206C.1
cccccgcgggaccggcccggaactgattaatggctgggcgcgctcagttagtttggcgggcggcctgtcctttntttttttgtgttttgttttngacttcgggggaaaagaaaatgacagttgtttacatcacattaccagcacgccctcactcgcgggctgggtctcttcaggttgcacgcataggattacattggcccatgacgctatgcatgttccacgtaaatggaataattagtaagctaacctttacatttccaaggcttctacactaaatttcatcttaaacttaaaagcatttcttgtt

SEQ ID NO: 35663 - DNA, 596 bp, Glycine max
  Clone ID: PAT_MRT3847_132207C.1
tttccctttttttttttttttttttttttttttttttttttttttttttttttttttttttttttttttttttgggaaaggaaacaggaagggatcccccttgggcccttggaaaaaagggttaaaaacaaaattatgaaaaaaacaaagcttaggggggggggggggccccaactttcgttttgtagattttacccctaccaaactaaaagcaaaacccaaattttagttaaagggggggaaaacccaaaaattgcacagccacaggggtttaaaaactcaaaaaaaggtttttttaaaagggcccaagggccataaatttccttgggggggaacacaggtccggaagggatttccaggttaacacccgggtttggaaaaaaaccgggttttcccttaagggtaacaccaggtccaaaccaaacatgggcgggcacttttaaacgggcaagctcaacaaaacgggggatggactggaaccgggtcaaaaaatgggaaaccttcttaaattggggccccaattcaagggaagggttttcaggaatggccctaaacggggtcctaaaaaccaatccctcttggaaaggggaaagggc

SEQ ID NO: 35664 - DNA, 612 bp, Glycine max
  unsure (1)..(612): unsure at all n locations
  Clone ID: PAT_MRT3847_132208C.1
aaggctacgggatgaaaacatggacactattccccttcgaaaaccattcttaaaacgaggcgtaatgttacataacctttatccttaggtannnncgtgtttatagttataaacaaaacttggccctctcttgaaataaaggtaccaaaaacatgtgtctgtgtgcccctgttataaactgagaagctannatagacaatgtttctggtacgaaantgncngactacgggaccagttttccgtgtcacatgctggacccaaagccaggctgaggctgcaccgtaggctggtgcacggtacccatagccaaacggcgcctggggaggaactgcaacgctgggtcctgttnncaccatcaggtggggctgaccataaacaataggttgcgcctccgaacctagttcttcctcttttctcagtgattctgaaccatctaatttatccacctttgccaagtnttccttcatgacnnggatgaagtagggcatggcaaaatccatgatattgggcctccatgcagtttccaggacaacatctggcctnnnnagatcnnannaggtaaagagacatgctccaagnnctctcttttttcttcctgcaaaaaccactgta

SEQ ID NO: 35665 - DNA, 406 bp, Glycine max
  Clone ID: PAT_MRT3847_132209C.1
ggctcgaggattgctaaagtgaatgtaagggtatcacatgaatacctatagcaatcagcagtctgttatcttgatgagcttattaagccttgtcctgaagccatatgaaatgatattggaatctcttggtgaattccagttccacatttttaagattaatcgaggcactaacgatcctatatgaattggaagtctttgttaatcttattaggcctatcctgtatcctatggaaatgagatcggtatatctcggggaattgcacttccacattttcaagatataacgatgcccatatgttcatttatgaattggaattattgggattcttattaggccaattctgaagccactggatatgagattggaattcctcgggggtaccgagcttgaatgccctattgtgag

SEQ ID NO: 35666 - DNA, 295 bp, Glycine max
  Clone ID: PAT_MRT3847_13220C.1
ccttcccccccctttttattgttcttctcacttttgctctttactttttttttttgtttctttttttttttttttttttttaaaaaaaaaatttgggggtttttttttaaaaaaaccccttttgggcccttggtctttaaggggggtgttcaccccctttccattgttctttttacattcttttttaccccccctctggacttacaagtttccgagggctggttaaaaaaaccattttaccttttaagtttggaaacgtgttaccaacgacccttcttgggaaaaacttctcccc

SEQ ID NO: 35667 - DNA, 211 bp, Glycine max
  Clone ID: PAT_MRT3847_132210C.1
gtctttaaatacgtttgtggatattgaactcaatctgtatactagatttcagactggacagtgagatgacatcaataatggcggaacacagatcaatcaagttacaagtatagaatggcaaagcttactggcatcataacatgatatgatactttacctgcgtgagaaggtttttgagcattaatagtcagtcttcacttacacttctcgc

SEQ ID NO: 35668 - DNA, 318 bp, Glycine max
  Clone ID: PAT_MRT3847_132211C.1
cgtacgcgtccgcggccacggagccagacgcggggaatctttagtgccgctttgctggttgtgcccaacatgaccagaaggttattgattttgattaccacaaccacggatgacccagttcatggaacctaactcccaatggccattgtgggtgctacatgtgcccttgttgcagagattacaagcaacatgtcgaggtccaatgataccaagtggtgtgcacaacgtcatccggctggttgtggaggaatctaggaggatgctttacatggcgcatccgattaagccaacgcaatagaaagggttgagagtgggaat

SEQ ID NO: 35669 - DNA, 332 bp, Glycine max
  unsure (1)..(332): unsure at all n locations
  Clone ID: PAT_MRT3847_132212C.1
aggtcnnttcgtactataaaaatttttagtctaaagatagaaacnnacctggcttacaccggtcttaactcaaatcatgtaagattttattggtcgaacagaccattcccccaatttttttctattgggatattcttaattcaacatcgaggtagcatttaatttttttgatttgatctctaaaaaatttttgctctgttatccctaaggtaacttttttttcttattaggttaaaatttcttttaagaagttaaattaaaaaaaaatttttgttttcttacttccccagtaaaatatttttgttttttggtttatttctcgtgccgaattc

SEQ ID NO: 35670 - DNA, 265 bp, Glycine max
  Clone ID: PAT_MRT3847_132213C.1
tggaagttcgggccggacgcacgcacccgtacgaacagacgacagccagagacttgtttttttttattcaactcatataattgggagcagaggtcaatgccaaattgaatttccattaacggtggcgttgtggttagaaaacaacagaactccaaaagataacattctagcgttttgctattttgagaattctaagctttcgatttgaatatcataacacattgagggatatttgtactaacttccacctaggcagctgtcaata

SEQ ID NO: 35671 - DNA, 318 bp, Glycine max
  Clone ID: PAT_MRT3847_132214C.1
ctccgaaactcagtcttcaccttctaaacaatctcctttgcaacatggcatttcttgcttggaatagaaaatactgcgcttgctaatcttccaatatatggcaactgagagttcaattagaatctttgaaactgggattaaatggccctcttttaaggaagctgctacttttggctcgccattccgtcacattgcaacaaaagatcagggtatatattttaaaaggccatcagtttcatggcattggaaaggattcattacccaatcgcattggcaatgcaccttccaacattgcaagctcatttctgggcatataaa

SEQ ID NO: 35672 - DNA, 380 bp, Glycine max
  Clone ID: PAT_MRT3847_132215C.1
ctggtggttgtgtttttgggaacacaaacggcagggaacttagggcatttggaagcgctaagcaactgtgttgtatgcaaacaaacaggatggcttcaactttttatttgaaaaccaaaattttgacctttttcaaaggggaaaatctcaagttttaagggtccactgggggaacctgtggcccttccccatcaacgggtttctttcacaatgtcacattgttgttcccatcaaccacagccaatatggttcctgtcgaggacctggagacccttcaaacgggggtggttgaaggattcaaaaccttgcctttccactgagcccccttttttgccgcgggccatataatgactttaccggcctgtgatgcgctaggaatg

SEQ ID NO: 35673 - DNA, 576 bp, Glycine max
  Clone ID: PAT_MRT3847_132216C.1
gtccggattcccgggtcgacccacgcgtccggtggcttccacttcaacttgctttccctttctcctggtttcaagggaaacaagtggaatcattgaaaccagacaacgagttccagcaccttgattcaacagtaaaacttgatcatgctactacagtcctactttaccacaataccaattttcctactcctgcttgtgtttcctcacactaaagctgatgtacattcagaaaagcaagccctccttgattttgctgctgcacttcatcatggtccaaaagtcaattggaactctagtacctcaatctgcacttcatgggtgggagttacatgcagtcatgatggttcccatgttctttctgtgaggcttccaggtgtcggattgcgcggttctctcccaccaaacacacttggtaagcttaatggcctcattagtctcagtcttaggtgcaacagcttgagggggaaccttccaactgacctactgtcccttgcttctctgcgctttgtatatctgcaacacaacaacttgtcaggtgaaattgctgattctctggcaccggggcttatctttgtt

SEQ ID NO: 35674 - DNA, 913 bp, Glycine max
  Clone ID: PAT_MRT3847_132217C.1
caaatcagcaacccggtttaaacatcataacagaatacataattggttacatgtatccagagcgtcctgtggctaacatgtgctttaaggtctacggctacatcagcatggttcaagcattaacctttttgcaagacttcaaacttggacactatatgaagattccaccaagaacaatgttcatggcacaggtggtaggaacaatcttatcagtatttatatacacagtaacagcatggtggttgatgagaacaatccctcacctctgtgacactaccatgctggatcctgatagcccttggacttgcccaatggacaatgtgttctttgatgcctcagttatatggggtcttcttggaccgcgcagaattttcggagacctcggtgaatatgccaaagtgaacttgttcttccttggtggagctattgctccctttctagtttggcttgctcacaaggcatttccagagcaaagatggataactctaattcacatgcctgtgttgttgggtgctacatcgatgatgccacctgcaactgctgtgaacttcactagttggatactagttggctttctctcaggatacatagcatatagatacagacaagaatggtggaagcgctgcaattatgtgttgtctggtggtcttgatgctggaactgcctttatgacaatcttgctgtttcttgctttgaacaataacaacatcatgcttaactggtgggggaataaccctgaagggtgtcccttggctaattgtcctactgaaaaaggcattgtagttaaaggttgccctgtacattaatcattctcggacgacgagaaatgctagcaatacactttgtaacacactcttttcaacaatttcaacctatatcagaggctgcatcaataagagtgggtgtattactc

SEQ ID NO: 35675 - DNA, 359 bp, Glycine max
  Clone ID: PAT_MRT3847_132218C.1
tttgtggtcgctcttataatcctgtgtaacggagagcacggatccctgatcgtcaaagcacgcgtcatatgtaatctcttcctgtcaacaaaaatttttgggtaggttcaatataccatgtttagcatttcttaaggctctgaatatgccggtctgaaaccggcaaggtctccgggaaaaatgagcttttctaatactttgcagattggcgagtcacatacactaaggggaaggcgactttcggtgatcttacactgggaatgacatcttgtggagcacctgagacatcgtgtgcatctggctcaagcatgaactggttagctctcgaggtaaacaacgtggcatcggagaacctgaca

SEQ ID NO: 35676 - DNA, 1633 bp, Glycine max
  unsure (1)..(1633): unsure at all n locations
  Clone ID: PAT_MRT3847_132219C.1
cggtccgnattcccgggtcgacccacgcgtccgatccttcccgaaaggaccggctccacgtccggtcgaaaccgtccgcagcagctcctcctcttccaagcgctctctctcttcgccctctccccccaacaacaccaaacgatgcaaggtgtccgaggattcctcatccaccaccgtgccttcggttgctccggtcaacgaatctggaaccgctaatgaatccgccgaaccggagctgagaccctctgatctgcctgatacggcgtcgttgaaggctgttgatggctgtgatgcgatgtcgcccgataggtctccctctgcgcccgttgaaggcgaggccttggtgtcccctcagtgtcaaggtgacaccgcggagaaattgaagggggtgccgatggcggcggcgggtggtcggtcgaagaaacgcccttccaaattgagccccaaggttgcgtggggaaagcttctctctcagtgttctcagaatcctcatgtatccatgagtgatcttattttcactgttggtcaaggtcgtaattgtaatttatggcttaaagatcccactgttggtaatgttttgtgcaagttgagccacatagagcgtggaggctcgtctgttgcattacttgaaatcacagggggcaaaggttctattcaagttaatggcaagacatatcgaaagaatgcccgtctgattttaagtggaggtgatgaggtggtctttggttcttctggcaagcatgcttatatctttcagcagctcacaaataataatattaatcctgctgatataccttcttctgtgagtattttagaagcccaaagtgctccaataaatggaacgcaagtcgaagctagatctggtgacccttctgccgttgctggagcatcgatattggcctctttatctaatcttcctaaagatttatctctcctttcacctcctgctaaaactggaaagaatgtgcaacagaatgctgacatttcatcactaccttctggcaacggggatgatatgccagacagtgaaatgaaggatgccaccaatgatgtagcatctgaagttttctctgctgataaaactgttaataaaaatcctaaccttgacacagctgaagtcaacatcaatgtggatcccgatgttgggaaggttactgctgctacctatgaattgaggccattattgcgcatgcttgctgggtcatgtcctgaagttgatttaagtggtggcattacgcggatattggagcggcaagggactcgaagagaacttcttaaagatgttgataccccaacaatattggcatcaaccaagcgacaagcatttaaggacagtttacaacagagaattctcaaagctgagaagattgatgtctcatttgaaactttcccatattatctaagtgatacaacaaagaacgttttgattgcttctacatttattcatttgaagtgcaaaggctttggaaaatatgcttctggacctcccatcagtgtctccacgaatattggtatctggtcctccaggttcggaaatatattacgagactttgtccaaagcacttgtgaagcattttggtgccaggctactaattgtggattctctttcactgcctggtggatcaccatcaaa

SEQ ID NO: 35677 - DNA, 372 bp, Glycine max
  Clone ID: PAT_MRT3847_13221C.1
gccaacttaattgaattacaatctttacctcccacattacattatttgctgcaaattcaatacattaccaaaatcatacatacctgtaaaattactggtaaaaaacaaatactccaacaaaggattagaagtacactacccatcacaggatccatatttcgtacgtttctaaagaaaacgtgtcacacttacagggaaaacggaaaagatgcacatgtttgcaaacataatagcaacgttgattaatactaatcactgagacaaagtctttttattcgttgacgtatttttctcttttatttttagttgcaaagttttttcaaatgcaacttctatgttcaaggggagatagcaatagttcccaaaagagta

SEQ ID NO: 35678 - DNA, 569 bp, Glycine max
  Clone ID: PAT_MRT3847_132220C.1
ggctcgagaaacaacattcacatgatcgagctcaatcattcttagtcataacctgcgtttttctcatcttcttccccgaaaaaggacaccgccccagccatggtcgaaaccagacgcagcagctcctcctcttccaagcgctctctctcttcgccctctccccccaacaacaccaaacggtgcaaggtgtccgaggattcctcatccaccaccgtgccttcggttgctccggtcaacgaatctggaaccgctaatgaatccgcggaaccggagctgatgctctctgatctgcctgaaacggcgtcgttgaaggccgtcgatggctgtgttgcgatgtcgcccgataagtctccctctgtgcccgttgaaggtgaggccttggtgtcccctcagtgtcaaggtgagaccgcggagaaatcgaagggggtgctgatggcggcggcgacgacgacgggtggtcgatcgaagaaacaacgcccttcgaaattgagccccaaggttgcgtggggaaagcttctctcttagtgttctcagaatcctcacgtgtccatgagtgatcttatcttcac

SEQ ID NO: 35679 - DNA, 785 bp, Glycine max
  unsure (1)..(785): unsure at all n locations
  Clone ID: PAT_MRT3847_132221C.1
taaaaaaaaccaccgatttccataaagnatgcagtgttgtaagtagatatcagaaagtctagttttttctccaacttagggcatgaactaactgcaaatagcatacggcaggagggcaaggccatcaatcgccattagttcccctgattccaaaacctcaaatgacataagataaaatcctccaaactacatgtagaaaattagaaataaatttttaaaatagttttttttcatgccccctttccccttgttctactaatttattgctcaaagattgtgatctgtcacaagcttttgggtggtttcacctttactagaattgtattccaggttcctgcatggtcttgttcatgggtctcaacaattcacattacatatatgctggactacggaatggttctgtcttggtgtttgatatgcgccaaactgcaggacccatgaaatctctagttggtttgactagcaaccctgtgcatactgtacatgctcttgcacaaacttcaagtttgtcttctggtgttaaaaccatcctatctgcatctgctgttggcctttgtcagtggaacattgattctgaagagcgatggacttggaacatttccctgcatttaagacggccgcttatggttcctgaaactgataatcaaggagtctgcatatcccttgcctattgccctagcagtgatgacattgttgcttcataccgaccgaaatatgacatgtccatggatctgcgtcactctcaaccatcgcccactcctcctagtacgcaacacggagtacag

SEQ ID NO: 35680 - DNA, 430 bp, Glycine max
  Clone ID: PAT_MRT3847_132222C.1
ttttgacaagtttctccatggttcaactttagaggaatgctattcagctgttgcttcggtggcaaatggctggcttgatcttcttgataaccagggaaaggatattgcagacagtgagttgcttgattatatatcagaatcaagtaccatgagcaaatctttcgctgattatggtctgcagaagtcttgtgctgttgccactgctagacgtctggctgactttcttggcgatacaatggtcaaagataaaggtcttcgatgtcagtacatagtagcaagtgaacccaagggcacgccagtaagtgagcgtgctgttcctgtggcaatatttgaaactgatgctgaggtaatgaagttctatgtccgaaaatggtgcaaggtctcatcaaatgttgacattcgatccataattgactggtcctattacaag

SEQ ID NO: 35681 - DNA, 232 bp, Glycine max
  Clone ID: PAT_MRT3847_132223C.1
gttgtttgggattacctcaagagcaacttgaagcacattaataacgtaaacagaatcgctcctgacgacaaggcaagaatatggtaacaacttcctacttttttgtgtacgaatctgtaagggaaagaaagtcactctgtgagctgggcacagactgtgcgagtcatttatttttccactcttagtggattcgctgaacactctactatttgatattggactttcttgtcag

SEQ ID NO: 35682 - DNA, 421 bp, Glycine max
  Clone ID: PAT_MRT3847_132224C.1
cccacgcgtccgtccactcgtccggttattgaagaacttagctacaagctaaggaaggatcaaagagaatggctcaagcaatggcatcactgactagcttacgtggctcctctcaggctgagtaggaaggatgcctagactctccacccttacaggaggagattagaatgatgctatcattgaaaaaactaagctaatggaagagagggataagacagaatatgacagatgggagacaagcgggcaccagttagaagaatgataaagaaggagggcgcagacatgatatgcttacaagagacaaagaaagaagctgttgacaaagctatgtgtcaggcattatggggggatgtggaggtttgttgggagatgttcccagctaatattatagtaggaggtgcattacgcctatggagtgaac

SEQ ID NO: 35683 - DNA, 727 bp, Glycine max
  Clone ID: PAT_MRT3847_132225C.1
ggaagcactcgcttcgcacactaccaccaccacgccctctgcataaattctctttattccttcgttgctgccgccgccgccactagctaggtttcccctctcacctttctcagcttctcctcaccaccccaacatagtttcttatttttaagtgaaaaaaaccatcatcacgtcacccttggtaagacctatatatccttcactattcttccgacaaatgtttcagtgattcacactaatccacccctgcaactaaacaaaaaacatcctaaatatctgtcttattgttctttatatttttagtaaagaaaaaaaaagaagagaaaaccctattcactctgaaagtggcgaagatgagtttgggaaccgcggaggaggaatcgggttccgaaatccacatcccggcggaaatcgactggcacatgctggacaagtcaaaattcttcttcctgggtgcggccttattctccggcgtctcatgcgcactctatcccatggtggtgttgaagccgcggcaacaagtttcctcctcacgtttctcctgcctcaacatctcctgcgccattctccgccacgagggattccgcggcttctacaagggcttccccacctccctcatgggcacccatcccgcgcgtgccctctacatgtcctccctcgagttcaccagaccaacgttggcaccgctttcgtccaattcggcttctccgaaacctccgccgttgcg

SEQ ID NO: 35684 - DNA, 556 bp, Glycine max
  Clone ID: PAT_MRT3847_132226C.1
ggaaagttggaaagcaaacatttttggaaggtcttgttacctcccttccaaccttgggagcaggccaatctgcattcaatgttcattttgaatgggacagtgacatgggaattcctggagcattttacattgagaactttaagcaagttgaattcttccttgtcagtttgactcttgaagacattcctaaccatggatccatccacttcctttgcaactcatgggtttacaattccaaaaaaatacaaaagtggccgcattttctttgcaaacaagacatatcttccaagtgaaaaaccgggtccactagtgaagtatagagaagaagaactgaagactttaagaggagatggaacaggagagcgcaaagaacatgaaaggatctatgactatgatgtctacaatgatttaggtgatcctgactccaatgccagattggctcgtccagttcttggaggatccaccaccttgccttaccctcgaaggggaagaactggtagaaaaaaatccaggaaagatcctaaaagtgagagtcgcagtgacttttgtttacctt

SEQ ID NO: 35685 - DNA, 534 bp, Glycine max
  Clone ID: PAT_MRT3847_132227C.1
gggggggtttttttttttttttttttttttttttttttttttttttttttttttaggccaaaaaactaaaagccctatggtttatcccaattaacccaaagggacccaaacggggttagtaaggcaatacaaataaaaccttttaataaaggggggggaggggggccccccttttaaaagtttaatttccaacctcaaacaatacaaaaaaacccttaacagggggaaaggttttactaacaaagccctgggggggaaaacctcaaaaactcccttctggtccccgggacccttggtttttatgggctcaaaaaactggggggccccacccccagtaattgggttttaccaaactgcagacccccggaaaggacgaagccccttttttttttttttaaaggccctcaaaaaatccacttttttttcatgggcaaggtttttaaaaaaaattaactcagcccccccttggggggggaaaaattcttccctcttttggggggccatttgctcaaaccctgctattggggcttccct

SEQ ID NO: 35686 - DNA, 3770 bp, Glycine max
  Clone ID: PAT_MRT3847_132228C.1
caaaatccacctcaacacataactcaaagagaggagaataccaattttcaattggcgcccctaaggtgtccgaaagggtgttcggtcctgcaactcgcagcaacccatttggacctgatacagcccggggttgaggctgctagtggttcctcgcattgccatgtcgctcatcaacagttcgagaacctgagttccctttcacttccagcttacctccaatctcatcccagtgatcaggtgaaagctgggggtatcttagaaacggaggatgccaggaactcttctgctatgagtgtgaaaaaggtatcgggaagctcttcacggcaccgaaaatctatgaagggatttccgggttcaactccatctagaacgcaaagggaaacttggtagaggtgcaattcctcacacaaaaatttaatttcagagaaaatatctcaatctggattaagggaaaaagcaaatgatggaactactcttgaggggcatactccgaagctgattgttaagatccaaaaccgaggtcgaagtcctgcacaaagtgccactgcaggttcttctgatgatccttcaatcatgaacagtcgagcttcatctcctgctctttcagagaagcacgatcagtttgatcgctgctcaaaggaaaagagtgatttttatcgagctaatattggtgcagacatttatacagaatcgtggcagagtaacgatttcaaagatgtattgactggttctgatgagggtgatggatcaccagcagccattactgatgaacagtgtaggactggtgaggattgtaagaaagtatcagatgtatctaaggcaacttcttcatcacctgggaatgaaagtagagccaggaatttgcaggatgcttcttacagctccatcaatgctcttattgaaggtgttaagtacactgaagctgatgatgttggaatgaatcttcttgctaatgtggctgctggagagatctcaaaatctgaattgggaatgccagttggatcccctgaaaaagacaccactactattgaacagtcatatgcaggtgatgctgcagtagtcaagtcctctgaagagtatcttgttcaggataagtgctacactaatgttgaacattcgaagcaggattctagacctggtgatttaggggcagatgatgatattcttgcatctgaagggaaagctacaggagaacacaatacatctagtatggatttatgggttactgaaactagtttagaaagcaaaggaaaattaattgaaaaatcatctggtacatcatctgctggcattcctgaaagcaccattcaagaagtccgagatagtgactctagcaaactggtaaaggaaaagaaggttgttgtgagagtggatgcagttggtaatgttgatgttaaggtcaatgttgttgcaagcgaaagtgaaacagaggcaattgaaaatttttcgtgcacctgtgaagtagttgatgtcaagtgtgataaccgtgcttctgaaggactaagcggtgacaaagagacagctggcaagtctcctgccattcgcatgtcgtctgactatgtaatagcaacagatgagaatgcaccccaatcatctggtgacattgttgataaggttcttgaacacgtaaatgaaagggaatctgaaaaaaatgatgatatggctgctcaggatcatgctaagcagtctttgaagcaaaaaaatgagtctgaaaatgatgctattatggtgcccgagaacagaggtttatgttcaggtgcaactggtcttgatgctgaatatgtggaagagaattcaggtacaaaagaggtttgtgaccaagatgcaggagcaggacagatactgcacacagatttacctagctttccttcacgagaaatggatcagcattcaggtcaaagggattcaaaattggctgccatggaatcagaggaagcagaggaatgcacctctaccactggagatacctcttctgcgtctgttgctggtgtctcagaagtggacacaaaagttgaatttgatttaaatgaagggttcaatgcagatgatgggaaatgtagtgagatgcctgggtctacacctgctgcaagattggtcagtcctgttccattttctgcttcatccatgtcttttggtattctctcgatcacagtagctgctgctgcaaagagcccctttgtggcacctgaagatttattgaaaagtaaaaaggagcttggttggaagggatctgctgctactagtgcatttcggccagctgagcccaggaaagttatggaaattcctcttgatatgtcaactacccctattcctaatgatgaagctagaaagcagagccgggcaccattggattttgacttgaatgtttctgatgaagtaatacttgatgatgtttcttcccaaaattgtgctcgtcagactgattgtggaactcattcagacaatgggcatgatccaaataaatcaatggcctcacatgttagttgttctggaggtttaggtcttgacttgaacttagtggatggagcttctgatgtgggtaactgcaccttaagtagtagtcataaaatggatgtaccacttatgcaggtgaaatcagcagccagtggtcctccaaatggagagatgagtttccgcagggatttcgatctgaatgatggacctgtagttgatgaagtcacctctgaacctttgatgtccacacaacccgctaggaatagtgtaccatctcaaccacccatttctggacttaggatgagtaatgcagcagaagtaggcaacttctcttcatggtttccttccactgcgaacacctattcagcggtaacaatatcttcaattatgtctgatagaggtgataggtccttttcaattgttgcccctaatgggccacaaaggatgttgggtcctgcaactggtagcaatccatttggacctgatatttataagggggcagttttgtcttcttctcctgcagtgccatatcaatctgcaccatttcagtatcctgtcttccctttcaattccagctttcctcttccatcagcatcattttctggtggatcaactccttatgtagatacaacttcaggaggtaggctttgcttccctgcagtaaattcacaacttataggttctgttggtaatgtttcagcccattaccccaggccttacgttgttagtttcccagatggtagcaatagtagtggtgctgagaacagtaggaaaagggcaaggcagggtttagatcttaatgctggacctggttcagacttagaggggagagatgagagctcacctcttgtaccacggcaactttctgttgctagttcacaggcccaacttgaagagcaagcaaggatgtttcacttaagcagtgatgttcttaaaaggaaggaacctgatggggggtgggatggctacaagcaatcatcatggcagtaccataatttgtaatcttagaatctaatgacccacagatgcctgtaagtttttagttttgtaaattcaactgttgtttgtaacatgtaggtgcccgaggggaggatatttcaaaatatatcctgtattgtgctgatgtaatacagaggaggggggagaattttttcgttaagcaatttttatttttaatgatataggaataagtgctattgcagttgccctgtgagttttctttcccgtctctatgagaaatcctgtatctttgagtgcatttaattcttcttgcttggtttttttaaaaaaaaattaaaaaaaaaaaaaaagacgaa

SEQ ID NO: 35687 - DNA, 264 bp, Glycine max
  Clone ID: PAT_MRT3847_132229C.1
aaaaataaagaaggtggagggggagaatggttttgttttgaaggaagaaatccatttaccgtgcttaaaaacctttttttttttggcggccaatggtttaagcgtttacaattgcaaaggccaacttttgttcaaagttgacttttttggccccgccactcccgacaaaaacaaactccgtctcatggatcctaccggacgtggcctcctaaccgttcttcaaaagcggccaattttgcttaaacgttggaaaggtttcaaagg

SEQ ID NO: 35688 - DNA, 589 bp, Glycine max
  Clone ID: PAT_MRT3847_13222C.1
ggctcgagctcgagccgaatcggctcgagctgattgttcggaatgcattgaggtgaaggtctctcctgcgcatgaccaaaggattccgttgatgagatcaagaagaggaggacggcggcggcgcggcgacacgtgggtggtgtcggtgttcgtgataatccagatcggggttttcatcgccaccatgctcgtcaacgattgctggaacaattctcacggcgattgcgttcttcaagccctcggaaggttctcgttccagcctctccccgagaatcctctcttaggtccttctcagtccaagttggatgaaatgggagctcttcgacgtagccttttgacagagcatcatcaaacatggcgtcttttcacatttccatttttgcatgctggggtcttccacctgctgctcaatctctccagtgtcatctatgtcggagttagcctagaacaccactttggaccaataaggattggtatactctatgcattgactgcttttgtgggttccttgggggcttctattttttttcaaaacatgcccgctgatggtgctttcggtgctttatatggattattgggaacattgctt

SEQ ID NO: 35689 - DNA, 835 bp, Glycine max
  Clone ID: PAT_MRT3847_132230C.1
tttccttgtgattggcctggcgcgcgtctcgggccggcattcccttggtaatggggttctcaaagggtgtggaagcccgaagggtgttggaatcaggaaagaaaatgatcatagtggccaacatgggtttttcaaaggaagagaaatccaaaaggctgttgaggggtgtgaagattgtgttcttcttgatcaccatggttatatcactgcttcttttctctgccccggttctcttggttattgccgatgcacttgttccttcagctctactctcagctttttcaccatcttttctcttctcccattttgagaactacgattttggctactctctcattgacatacctctagtatctattgcacgatcacttgtcatcttctgtgtgtatagtttctgtgataggccaaggctttcacatgggccttatttgggagtcaccatgttgtgctcagtgatgtctttgacatttgtttgcttgaaagctgtttacgtgttgagcttaaacacaaatgttagtggaagagagtcagggtatgatagaagttcccagatagttctgttcgtgtggtcgtgtgctttggcagtggggcatgtcgttgttgcctacagaacaagttgcagagaaagaaggaagcttctcgtttacaagattgacattgaaactgtaagactcttttctcccccactttatttcctaccaagacaaaatagaaaggaagaaaaatgatagtatttgcttatcttctggttaattattgatcgattggtacataccataaagttttgaaattactaggtgttttaaatgaaaaagttcaaaatgattttcccttt

SEQ ID NO: 35690 - DNA, 386 bp, Glycine max
  Clone ID: PAT_MRT3847_132231C.1
caaaaaaaccgtggggggatcttaaccatttcaagaaactacaacttttttggggaatgtgggacaccattccaaagtaaattgccccccttatttttttttaaccttacctgacttttccaggggaaaccccccaataaataaaaaaaaaaaaggtgctttctttcttttcagaaaaaaattttttttggaggagttggcccaattttttttatttttgggggcccccactggaacctaattaaggccctaaaagcttcctgataataaagaaaaacttagggggttgtccaactttggcccaaaatttccctaccttttagattgttttcccccttgtcctccctaaacattcaacctgtttaaaagttggcagaaaaattggg

SEQ ID NO: 35691 - DNA, 446 bp, Glycine max
  Clone ID: PAT_MRT3847_132232C.1
aaaaaaccaattttttatatataacaaacaaaagggggctaataagggggtggccgaaagaaatggaccaaaaaggtaccagtcccgggagggaaacccccttaaataaaaccccttcacccccctaacttgtcctcccccccgggaaatttgtttgggtggtcccaaaaaaaagttccccaaagaaaaaaaaaggggggggccctgggaggggcccccacctggtttttttcccaaaaaaaaaattggcgggaaaatttttaaaacgggccccccaaaaagccaaaaatcgggaaagttgtacctccccccacctttgggcagtttccccagaaaaaaagggccaaaacccatgcccaacccccccccccggggaacttttttataagggaattttaaggcgggggaacaaaggcccccaccaaagaatattatacatacccccc

SEQ ID NO: 35692 - DNA, 250 bp, Glycine max
  unsure (1)..(250): unsure at all n locations
  Clone ID: PAT_MRT3847_132233C.1
gctcagattagtaaccttgtatctgcagctnagggtanattttcttggtgtcaatngttctagaacagtttgtacagnagattttattagttanaaaacatatgtgcaggtaaanaaacaganatcattttagagcncatttatttatgtntttaggcacctttntgaganggttcggccttttcttctattcgtnctttcacgcttgctttaggtggggctacataagatttcttcngtaacatttgtt

SEQ ID NO: 35693 - DNA, 417 bp, Glycine max
  Clone ID: PAT_MRT3847_132234C.1
gccgacgcttttattcctcttcaaaatttcgacatctatccaagcgatagacactctggtctatggaactagtagcggagtgcgaacgaactctgtacccatacattactggatcctctgtacttcctatcaaatacaaagatggtattctaatgaccgctgacatgagatgttcctatggatctaccctgcggtataagactgtctagcgtatcaagcctattataaagcattctcttctaggtgctacctgtgaaataagttactatcatgaaatattccgctaccttgacgagcttatcctttatgacaacatgtacaacgatcgtaattcattagggccgaatgacgtgcataattatgtaacccgtgtcatgtataatacacataacaagttcaatccattgtccaattcac

SEQ ID NO: 35694 - DNA, 511 bp, Glycine max
  Clone ID: PAT_MRT3847_132235C.1
gtgttgaccacgttctatcatgtcttttgcagcgctctcaatcccatatgcagctgggctaggcgcatgcgcttttctctactttgttgtatatccggtcatcgaatattttcgcgatgttaacggtcttcgacgctatccgaacatgcacccgctctcgggtatctcttcgataccgttcatggtgcttgcacacggcggggcacggtccacatacttagagaagttacatcgaaagcatccagtcatccgtgttggccccaacttcctgtcatacggcgaccttcgagctgtaaaggatatctatggccataacacgccctgcaccaaggacggatcgtacgtgattactgcgggctctcattaccatcttgccgatgtgatagacaagcacgatcatgcccgaaagaggaaattgatgagctccgcgtatgctatcaagaacctggagggctgggaacacaaagtagccgacaagacgcagaagctactgaagcacttcgacgagtgc

SEQ ID NO: 35695 - DNA, 326 bp, Glycine max
  Clone ID: PAT_MRT3847_132236C.1
ggggaaaaattctctttgtttttttttttgaacatttaactaatctctttttcatttgaaaatatcaaattacaatgggccgagctaccatccatatattgctttaaaacttggggaccaactctatgggccttttttcactttgttgtgacttattatttggcttttaaatgagaggctcatgtttttatccttcttccaaactgttatttaaaacacgcttcccattgttgagatcgcgtatagcactaattgttttgcttccaacaaaaatccaataccgtttggcaccctggggttatcattaccttcgggaactattttta

SEQ ID NO: 35696 - DNA, 773 bp, Glycine max
  unsure (1)..(773): unsure at all n locations
  Clone ID: PAT_MRT3847_132237C.1
tggatcttgtcttgaaggatcttgntcaatggtcgttcatcattcatggatcaaaaaatgaactaagaataagttagattgaatcggttgctttacctccacaaaagtgctgaccgtgggtttcttccttcagacactgcatcctcaaaacttgtatttctcatcagcatatgatcttcgccatcatcatcttctctcatcgatagaagaaccattcgaagcatgcacaagaatggctggtcactgtctaatagctggtacagagcagccatccctcccattcctgtacctgaccctccacctataccaaggccaccaccaagcccagactcatctagcaataatgcttggagcattgccaccgacttcttcaccaaaggaagctcaatccagtttccattggcatctttctcaagagcagacttccaaaaatcccatccactcccaccaccaccaaatggagcttgacttggagaaaggctgacaccataccacaaacggctcctatatttccagccatcagctaaatccttagcacaggacccatatgacacaaaagcacaagaaacagattcgtaaggctcngctgctgctgctgcagcaagcctttccatcactgaagtaaggatctgaccacttccatcagccattgnnnnnaggacatttaganngactcccccggagtcactatctagtgatctgcgatcatccacaacttctnnngattcnnnnnnnnnccaccatggatnngagtgattatnnnnnnnatacac

SEQ ID NO: 35697 - DNA, 343 bp, Glycine max
  Clone ID: PAT_MRT3847_132238C.1
ggaggaaaaaccctgattaacaccccaagatttttcacctccccccttttttagaacagaaggaacacgtttccccaaaggccctcatgaataatccttcctttttaaatagggaccgggactaagttggagcttaaaacatcgatttgcaaagtttttggcgccaaaacccttgggggggaaacaaaaagggccccccccgccagaaaaccaagttgaggccccgcccaaatagccaagccaggcgttccgccagggtaaacattaccggggggaaaccaacccttgggggcggaaataggactggaaccatccacttttgccccggttttgggtacaaacg

SEQ ID NO: 35698 - DNA, 466 bp, Glycine max
  Clone ID: PAT_MRT3847_132239C.1
gaaaatcatgagcatacacccccaaaatggagtgtatgtatgaaaagaagagagagagaaaaaaaaatagatatgataaaattatgtcattgatgtgatgggaaataaaagaaagagataataaaaaaatgggatgaaagtaagatgcaataataataataaccccatactgcaaatatttgcaaactgaaaatatgaaccctattactacaagtccatctcatttaaatatggatcacttcttcttagtggtgttaaattcatccttggtgcattaaatatatagacttgtccaaatagttttgattgggatatgggactcattgaaacgtcatgtgatgtgattgtcaaattacttgggatcaaatgtcccgctatacttgaaggaacatcatctgatccctgcatgtaattccccctctacagctgcaacctgcagcaattaaaatttgctaggccaatattg

SEQ ID NO: 35699 - DNA, 262 bp, Glycine max
  Clone ID: PAT_MRT3847_13223C.1
gagagactcatgacaaagctggcttgagattttcacatgatgaattatttaccgcttggtcaactcacgtgcgtactgcaactactatgttggctgatgggtgtacatatttgtgtgcaatggtgcatgatatctcaaactgtacactgccaggggatgttgacattggagctcagatgccatccataaacaataggcgcgcatatacggctcaattctgaaccattatgatgtccacatacgggcaccatgactaacaaca

SEQ ID NO: 35700 - DNA, 651 bp, Glycine max
  Clone ID: PAT_MRT3847_132240C.1
gctcggaattcggctcgagcgagaaagtggagggaatgaaatgaaacactgaagaaggaacggtttaaggcaaaaaaacggaaaacgcgagacgcaagcgcaaaagcacggaataggagcgattaagcgaatctcaatcttgattatcgattaacagtggtcgatgatcgatgccaaagatgaagcacctgctgagaaagcttcacatcggtggtggcgctgccaccatcaaccccagtcccaatcacaacgcattgtcgtcgcacgctcacaatcacactccccctccctccacttccacgctcccttcccccaccgtcgtttcggatcggagccccgtcgtcgtcgaggcgcaaaacgaggtcgccgatttcaatttgttgcaggaggaggagtttcagatgcaactcgcgctcgcaatcagcgcctccgattccgatcgccgcgacaccgccgaatcggcccagatcgacgccgccaaacagatcagcctcggttactctgcttccctcactgacactcatgccctagttcagtttcaatcccttcgatattggaactaccatgtgattggctatgatgagaaagtgatggatgggttttatgatggttatggagttacctcgaattttgttgagcgggggaagatgc

SEQ ID NO: 35701 - DNA, 384 bp, Glycine max
  unsure (1)..(384): unsure at all n locations
  Clone ID: PAT_MRT3847_132241C.1
agcggcggngggctcagcctgannaccatttttttttcttttttgtacacaacanagcaccaaaacgctgtatccttataaagggagagggccaaacctaccttttcaccacattcacctttctccatttacttactaatcaatcaatctcctcttttcttccattcatggcctccttgctcagatctcttcgccttcaagatatctattcctccatcctattcatctatttctcattaacttgcattaccaaaccagcatttttatctcacaactggtcttattatagttgagaccatttatttcaataccatctgtatactatattattagttattaatttccgttcttccaatacatttcttccctcttttcttatgaaat

SEQ ID NO: 35702 - DNA, 460 bp, Glycine max
  Clone ID: PAT_MRT3847_132242C.1
aattcggctcgagaaaaaggcacggtcattccttgtttatacgagacagagcattcaatcgtagctaacagaccccaaagtacacataacacatgcaatgcagttattattttatcttatacgaatattttcattttcattctctctcccaatctcacaagcaaacatcccctttgattctctcttccctcttcaaaccttgcgtgtctctgtgtccttttgcatgtctctgcgtgtacaagccaaacacactgtgagagagaacataacaacacacatcactctcttgttttctttcaagtcagcaaaaaaaatataggaaaaaaagttattttctctgtttctgctctgcattaaaacagagtcccctgtttttggtatttattgcaatgaagtatattaggagcaacagcttgaagaggctcttttcgtttgggagacacgggtttggggaagaaaa

SEQ ID NO: 35703 - DNA, 175 bp, Glycine max
  unsure (1)..(175): unsure at all n locations
  Clone ID: PAT_MRT3847_132243C.1
aangttccnanatccaaacacaatncnctctccccatgncgttanacaatggcgnccccgccaacggcaccnggcctcatcgtcagantcggtgagatgatcatcgacttcgnncccagncgtctctggcgtgtccctgnccgaggcacctggcttcntcaangnnnccgncggc

SEQ ID NO: 35704 - DNA, 619 bp, Glycine max
  Clone ID: PAT_MRT3847_132244C.1
accacgcgtccgggaggctggaggacttgatgctgggccacgcctggtgaaaaaattagttggctttggagataataggacatctaagattgcggctagaattgctgatgaggaagttgcacatgtagcagttggtgtctactggtttgattctatctgtgaaaaactgaattgtgctccagatttcacttttaaaggttgtgaagtctggttaatatctgcttatctgctcacatacactgatacacacatattgaaggcatgcaatcttcaacataattttctgtaaccatgcagacttactaaaggaatacaatgtggaactaaagggtcccttcaattattcagctcgagataaatctggtattcccggtgattggtatgatgatgcatcatccgcaagcactaaggacaagaaagacaaagatggcaatcaaaaacagctctctgcagtaagtgacaatcatcctgctcattcctgcaacttttatgagcttaatttttatgtactggccatgtaaaactcaagtactcaactaataagaaattataatggatatgattttcaaaataattattttagatgttaacaaacttattatatattgatgattttgtg

SEQ ID NO: 35705 - DNA, 1125 bp, Glycine max
  unsure (1)..(1125): unsure at all n locations
  Clone ID: PAT_MRT3847_132245C.1
gccgcgtacgcagctagtccgcggggggagcgaataatgtgggtctatacggctgcgagaagacgacagaaggggggattaaagaaaattcttttattgcttgttttcttacagaacttgtctcagctagcttctatcaattatgatctggtgattaagagctccaaggaatcaactcaatgactccaacccatctatttcaagatattgctaaagagggttataagtttctccaagcgattatatatatatatcaccaaagacaaggctctaaataggtggatttccagagtaaaaaagtattgtgcgcacacatgctgatgctgtagattgacgaagaagcagttggccaaccgcgataatctctacatattaatataatctttctcgtcacctgagagaaatagaaaatgtggagtcgcgcaagaacccttttccttcgcgtcctggtaatcttctattctcctttctccctctctctccatctctgactttggatattgtttcttctccactccaggaacctcctaatcacaacaacgcttcgctttcccaaacatttacccctggattctccttccacacgctctcgcacttccaggaaaaggatggcatttgccccaaaccgcttataacttttgttttaggaggccctggtagtggaaaagattggagcagaaccagatatggtacttttttttgattgtcctgaagaagaaatggtgaaacgtgtgctgagccgtaatcagggtcgaattgatgacaacatagatacaatcaagaaccgtcttaaagtatttgagtcattaaatcttcctgtgattgactattatgctaagaaagggaaactttacaggatcaatgcagtgggaacagtagatgaaatatttgagcatgttcggccagtttttgaggcatgtgagcacgaggctagatgaaagctgtttgaattggatgagagcactgtaaagttggctaaagtttggatttagtggggacccaacatagctaccagttgattacagaatctgatccaaattcatggctgatttgctttggaaattggtagttctctaaaactcatncactgaagtatttcaaattgatattacacatgcccaccat

SEQ ID NO: 35706 - DNA, 870 bp, Glycine max
  unsure (1)..(870): unsure at all n locations
  Clone ID: PAT_MRT3847_132246C.1
ccccgggnncgacccacgcgnnccaatgaataatgttggtctatagtgcgcacacatgctgatgctgtagattgacgaagaagcagttggccaaccgcgataatctctacatattaatataatctttctcgtcacctgagagaaatagaaaatgtggagtcgcgcaagaacccttttccttcgcgtcctggaacctcctaatcacaacaacgcttcgctttcccaaacatttacccctggattctccttccacacgctctcgcacttccaggaggccctggtagtggaaaaggtacacaatgtgcaaaaattgttgaaacctttggatttaagcatctgagtgctggagatcttttgagaagggagatggtttctgatagtgaatatggctcaatgattatgaatacaattagagaaggaaaaattgttccatcaggagtgactgtcaaattgattctaagagagatgaaatctagtgacaatcataagtttcttatcgatggcttccctagaagccaggagaaccgtatagcttttgaacaaattattggagctgaaccgcatatggtacttttctttgattgtcctgaagaagaaatggtgaaacgtgtgctgagtcgtaatcagggtcgaattgatgacaacataaatacaatcaagaaccgtcttcaagtatttgagtcattaaatcttcccgtgattgactattatgctaagaaagggaaactttacagggtaactctatttagtttcattaagtcttttttaggtttgacttgaatgaagattggtctcgggattcacttgtatgcttgttatactttatatatagatgtgatggcatatgccatggaaaatatttgaaaaaaa

SEQ ID NO: 35707 - DNA, 2256 bp, Glycine max
  Clone ID: PAT_MRT3847_132247C.1
tacggctgcgagaagacgacagaaggggggattaaagaaaattcttttattgcttgttttcttacagaacttgtctcagctagcttctatcaattatgatctggtgattaagagctccaaggaatcaactcaatgactccaacccatctatttcaagatattgctaaagagggttataagtttctccaagcgattatatatatatatcaccaaagacaaggctctaaataggtggatttccagagtaaaaaagtattgtgcgcacacatgctgatgctgtagattgacgaagaagcagttggccaaccgcgataatctctacatattaatataatctttctcgtcacctggcgacagtggatgaaatacttgagcgtgttcggccagtttttgaggcatgtcagctcgaggctcgatgcatgctgcttgaattggatgtgagcactgttctggtggctaaaggctccatgtagtcggctccctaaatcgctcccagctgtttccagattctgctccagatgcatggctgattcgctttgggatttggtagttctctaaaactcatccactgaagtatttcatggtgatcttacacatgcccacattgcacaggagactgctcttgttgccttttttcctttccttatgccgtcgaaagaatggcctataggtggagctaagctgtctctagcaacataggaactgcctataatgcgcagaatataggataaaaagtatatgttgtgtaacatttttttttaaataaattgaattctatatcttgtttagagcaatagaaaatgtggagtcgtgcaacccttttccttcgcgtcctggaacctcctatacacatcaacgcttcgctttcccaaacatttaccactggattccccttccacttccaggaaaaggatggcatttgccccaaaccgcttataacttttgttttaggaggccctggtagtggaaaaggtacacagtgtggaaaaattgttgaaacctttggatttaagcatctgagtgctggagatcttttgagaagggagatggtttctgatagtgaatatggctcaatgattatgaatacaattggagaaggaagaattgttccatcagaagtgactgtcaaattgattctaagagagatggaatctagtgacaatcataagtttcttatcgatggcttccctagaagccaggagaaccgtatagcttttgaacaaattattggagctgaaccgcatatggtacttttctttgattgtcctgaagaagaaatggtgaaacgtgtgctgagtcgtaatcagggtcgaattgatgacaacataaatacaatcaagaaccgtcttcaagtatttgagtcattaaatcttcccgtgattgactattatgctaagaaagggaaactttacaggatcaatgcagtgggaacagtagatgaaatttttgagcatgttcgaccagtttttgaggcatgtgagcacgaggctagatgatagctgtttgaattggatgagagcactgtaaagttggctaatgtttggatttagtggggacccatcatagttaccagttgattacaggatctgatccgaattcatagctgatttgctttggaatttggtagatctctaaaactcatccgctgaagtatttcaaaatgatattcattctttttttttttttcttttactcttttttatgcctgacgtgaatgattgtcgggattcatgcatactttataaatgatgaaaaaaaaatattttagtccaacctctatctagaggtgttgggggctcctgaccttagcatcgcagatactgtgaactagttggtctctcgcagtaatgggagagttggaaagccttttagaccccatggaaagccttctctaaacaaacttgctagtaagcaccaagcacacaaaaacgaatgttagacagggtatagagaagaacctccataggatgaagttgactgaagattaatatattgaaatttacgcatacatgaataactgaaggattctaaggttaccgctgcaatttcatcgggtttcttggcgtaagaagcgcgacttccgtcagtaacaactaaactttgtctcattgttatgcaggctgcagcctgcaggttgttacataaattaattgcgtgattgagttgtccaaaaatattaattttatcatttttgatagtatcccgaactatgtatgtttagaatgatactttgaataagattatcatttgattatg

SEQ ID NO: 35708 - DNA, 596 bp, Glycine max
  Clone ID: PAT_MRT3847_132248C.1
cactctgttcctctccaacacataggtctactggctggtagcacctatgcttctctgtcttatctgaccaattaggatatagtaaatgctagatcggtctcttgtgcttgctctgcctgtgcacattagatggcttggacatgttacgatctacagttgaagatgcacctcgtctgttgcacatcgagtacctcgtactgtgcatgaatctttctgtatatcgtcaagatgacaccaaagatcttgattatcagagagagatgtttcatgaatgtggatgtcagcattaccggagaagatccccatgtatgccccgctgctgagatgatcatgtttggttgccgccattgtcgcgatgaggcgtgcaccagtagatcattgaccaagaacatacacagctttttccccgccatctagttataacatggcgatatgtgctgtttgccatacgtaacatgacgctcaggctacttgattaactgcgtcgttgtgatgggcatgcacttctgtgtgacgtgatagctcctacatgatgatgtatctatgcagcagtatgatcgcaaagggtggggactatgcggaactggcgggtgtga

SEQ ID NO: 35709 - DNA, 367 bp, Glycine max
  Clone ID: PAT_MRT3847_132249C.1
acaaaacaaggtcacttaatggtgggaagccacaaaagagaaacctccctaaagaaatctcttacatgacttgataacccacctttttaacatacattaaaataagttcgcgcctttatttgaacccttcccattacatatatattgatcgtagcatgcttgattgctgctaggccaaagaactacttaatgtaaaacaggtgcttaggaatcttaaagggcctgctttcgtctctgtggcctcccaggagatcgctccatcggcttccatagatcccaacaatgtggcatccctgccttacaaaagtctttctaactgttagtttgtataaaactgcatttggaggggaaggatcttgccgattct

SEQ ID NO: 35710 - DNA, 480 bp, Glycine max
  Clone ID: PAT_MRT3847_13224C.1
tcgggtacggttgcgagaagacaacagaagggtggcttatactctgtctaattaacataataattctaatggataaaagggcatgaatgtttcccagtcatgggtcaagtttgtctagtgaatgaaagagtccgagggtacctgcattacaatgtgggtgatgggccaccatatacgcgaatgaaaacttacatgtaaaccttgtcgatctaaactttaatatctcacacattataatctatggcatcatatacatgttgtacataatactgttatgtattggcaattggtaaatggcaccactgtgtgtctgtaagacttggatgtgtgtcgctttaattataacttgattgttttaacaattagaaggaactgtgtgagaggggtagattataatatgggttggtggatggacacgattagttggatgccgaatgtgataaagtactagattagaatttaaaagtcaacccagatgaa

SEQ ID NO: 35711 - DNA, 465 bp, Glycine max
  Clone ID: PAT_MRT3847_132250C.1
acctccggaaattcccaggggggggggtccccagaattggaactaaaattaatcatccaattcccataataaaaattcccgggggacccaattaacttgaaacatagtttaccaagcaaaagggggtggccaagcttcaaaagggggtcataacaaatttaaagggaaacggtggacaaaactggcataaatcagggagggagggcatccaggagcttcaaggggaatttaagaagaagcacccctttgaagagggcccttttttttggttgggggcaaatgaggctcaacctccttttttaccgggtttttctttttaaataaaatcaactcaatggggcatggaaaagacatgtaaggggtgattcttccatgagctctggaggggggggggctttgcttctgggcttgattaacccggatatgagaaaaggacagagcattgacatccaaacctttcacttt

SEQ ID NO: 35712 - DNA, 240 bp, Glycine max
  Clone ID: PAT_MRT3847_132251C.1
ccattattagaaaatctcaagccaaaagctttttttttattgttttaaaaagcgcacctgtccatgagaaacccaaaatcctaactaatgaaccccttaataaacttttcccccaggcgcccttttggcatagccatcattaacattttttacatgacccctaatgcatgccttaccggcacaagcccataaatgcattactccattaatgcatcacacgggcctttttttgaaaatgaa

SEQ ID NO: 35713 - DNA, 270 bp, Glycine max
  unsure (1)..(270): unsure at all n locations
  Clone ID: PAT_MRT3847_132252C.1
agtaatgcccctcctacttatcctaaagtagancatggagttagtagatcagcaccattcagtgggtcttctggtggtcagaacacaggtttccgcaatccccaatttgnngcgtcaaggcccttgcaaaactcatatgctcgtccacctcagcagcctatgtaccgtcagccatctccaatgtacactaacaggcgccaatgggaaganatgaagctgcccccaggataattccaatagcagcattgaatccataccagagtatgtgga

SEQ ID NO: 35714 - DNA, 280 bp, Glycine max
  Clone ID: PAT_MRT3847_132253C.1
tattcgagctcgagcctaatcgtctcgagcggctctaggatttatagaaaggatttgtgtttggttggctgctgaattgaaagggaaatcaagcattaatgcgttgggagctatgagattgtattgattaacccgtggtgagccttaattacggtcggggttagatataaaaagccatttaattacttttaaaggctcagagtttacattcggagatcggttgtggggaaagaaaggcgaatgcttgactcttctaaagtttttatttcgcaacggaagt

SEQ ID NO: 35715 - DNA, 108 bp, Glycine max
  Clone ID: PAT_MRT3847_132254C.1
gagtctctctcgtctatatggcagggcacgtatcttttagctcttgttctgtcttatgatccatttcagaaggaacgagcataacatagaggcagcaggttctagaag

SEQ ID NO: 35716 - DNA, 1358 bp, Glycine max
  unsure (1)..(1358): unsure at all n locations
  Clone ID: PAT_MRT3847_132255C.1
cccgggtcgacccacgcgtccgcccacgcgtccgcccacgcgtccgtacgggtgcgagaagacgacataagggggggggtttcaattttcattttcaatttcgcgcgaagaagaagaaacaaagaaaggtggtgctgggtattctatggcgacacccaacaacagcaacattaacaacgcgacggcgaaaccaggaaccctaggcgttggcgtaggtgcagctcctactccgcccaagtcccagcgcggccacaacaagcccaagtgcaaacagtgtggcaatgtcgctcgttcaaggtgcccctatgaatgttgcaagagttgctgttctagaaatcaaaacccctgtcatatccacggttcgttccttatccttcttttttctttctcacatcacaaagaaacattcttgttcttcttcgctaccctaaaataatgatatttctgtgttgctttgtgccgtttatgattgatttatcatgctttaactgtctgacttattgtttgccatgatctcaccttcttgaattgtagttaagaggaaggaatttgttgttaacatgtcatttaattagttcagcaaaattagggttttgtttttacctgtctctgaactttctctctgtttataagcttttatcctactcctagtttgctttactctttgtttcgttgtgccttttgttgctgttaactcgttatagttatgccttagattaacagtggtcatgccgttaagctatgacttcagtgttattgataaaactgagttaagttttgagtactttttcactattagtagaagtaagctaaaaaaaaaaaaaaaaaaaaaaaaaaaaaagcccgaactgaggaggatttgaagccgtgcttagagatgaagacccaactcttcaatttggacgaaggcgctagcgtgaaaggccttcaagacaatgaaatgcatgagaatgaagctgttgtaactgatgtggtaccagcagaaggattggattattctttaccgaaatttgttaccaccactgagattgatctagaaactctcaactccatagacaagctcttttctacccaggatatagagcagttagtgagtctagatttcttaaacattgtgatttaccttgaaagaaacagaaatctaaatgttgtgctgttctaggaaaatgctctctaattagaattaggtagtcaaatgcaagccaaaaagntgttttagaaanctaatctggatgcttgaaccggttgaagtgtgaacagattatattcagtttgagcattattcaattcaattacggttcaacgcctaaaaaaaaaaaaaaaaaaaaaaaaaaaaaaaaaaaaagaaaaaaaaaaaa

SEQ ID NO: 35717 - DNA, 385 bp, Glycine max
  Clone ID: PAT_MRT3847_132256C.1
cttcggctctactcttgtttatggttatcaaaatattgcctttgtatgtgactaagaatggatatattgcaacattaactctcttacaagcatgatgatggtacacttcttttatcgtgtgttcttctatcaaaatctatagctaattaccatagcaagtaatgaccttaattacactctttaaatctaacttattagcatcagatcttaaaaacccatctttaatgccctaacagtcaatgctagatcattgactctattactactagcttgagtcatacttaactcagtctcaggtgaatgtactatgctagagcctcggctaacacattgttcatcctagtctttaggatgccagatacctaattggcgtcttccacttatg

SEQ ID NO: 35718 - DNA, 377 bp, Glycine max
  Clone ID: PAT_MRT3847_132257C.1
ccaagcgttgggggactcttggggaggacggggaatttcgggccggaacctggaggcgaaccaaattttcctaaagggagacggttaaaacctggggttatcaacagcaaaagggattgcagagcgaaaataccatccgctaacaatgacacacaacctaagaggcgacagcataaaacgtgaaaccatgagagcgtaaagagtgagcttagtcaacaaaatagggccgagacaacagacagcattacagtacagaaacatgaggtgcctgctgaattaaagaaacggacaacccgcagaaataagcggaatcccattgtgggtgccgggggcggtattttttttcaccaacgagaaaggcaacaggggattgtctt

SEQ ID NO: 35719 - DNA, 335 bp, Glycine max
  Clone ID: PAT_MRT3847_132258C.1
ttcaagtgatagaagatttacagcaggagttgacaagagaacctgcagatggtgaactagctgatgcaacaaacatgagcattacacaagtaaggaaagcaatagatgttggtcaagctgcaagaaataaactcataaagcacaatctccggcttgttttgttcgtgatcaacaaatattttacagattttgcaagtggccctaggtttcaagatctttgccaggcaggagttaaggggcttataacagcaatcgatcgttttgagccaaacaggagatttcggctatcaacttatagtttggtttggataagacatgctatcattcgttcaatg

SEQ ID NO: 35720 - DNA, 600 bp, Glycine max
  Clone ID: PAT_MRT3847_132259C.1
caaaaaatggttggatcaaaaaccccacaaaaaaagggggcaaacacacgctagcaagccaaattccagcaccgggaaaaaaaaaaggaaacaagcctggtgaaaaacaaaaaaaaaccatctttatgggaaaccaaaaacaaaaaatgaagggggggaccagaatccaaaaccccccggggaggccaaaaaaccaatttccctcctttcaccaaaaacaaacccttgtgattcatgcctgaaaacacccaaaaagggaacccccccaagccaaaaaaaaataaagcggcccaatacaaacccaaggaagagactccaaaacccgaaacaaaaaacaccctaagcatccaattaaacaaaacccctttggctgacaatacacggaaaaaaaattaaggggttttgcggcccaaaaaaaccaatggcaattgaaacgcaaacaaacaaaattggcttctatggccaccccccgacccaaaaacaaaggttcaaaccgggaacccttaacacgcgggaaaaaaggcaaccctttaggccaaaaagggaaaacgaaccatttgggaaaatgggcaaaaagaaccccctttgaaccatttccat

SEQ ID NO: 35721 - DNA, 735 bp, Glycine max
  unsure (1)..(735): unsure at all n locations
  Clone ID: PAT_MRT3847_13225C.1
gaagagaaaagcgagcaatgggtgtgaactcttactccaacagcatgaagatccaagccgagatacaaatgccacccttagaaatccacaaggttcgtttgccaccagaacgcaccaccttgcagaaactcagacacagactctctgagatcttcttcccagatgatccactccacagggaatcagctatgctaagcttgcaaacttgccacctattcttggattatattccagttttgtgcccccgttgatatattccctgcttggaagttctagacatcttggtgttggtccagtttcaattgcatctttggtcatgggatcaatgttaagcgagaccgtttcttatagtcaagatccaattctctatcttaaaatggccttcactgccactttctttgccggtttgttccaatcttctctgggtatattaaggttaggctttgtaattgattttctctcaaaggcaacactggtgggttttatggctggtgcagcgattattgtgtcactgcaacagctgaaagggttgcttggaatagttcatttcaccaacaagatgcaaataacacctgtactgatttctgttttcaagcaaagagacgagtggtcatggcaaaaccttttgttgggattcagtttcctactattcctgttgacaacaaggcacattagcctgaagaagncaaaattattctgggtttcagcagctgccccattgacatcagttattct

SEQ ID NO: 35722 - DNA, 432 bp, Glycine max
  Clone ID: PAT_MRT3847_132260C.1
ccacgcgtccggacccagatacaaacacattaaaaaaagactcccacgctgtcttgtttctccgacaatctctctctatcttcattagcacatcgacactcatcttccactctatctctgcacagtgcccctggccgatccaaaagctaaggctctgagcgcgctcgaacctcctagctatccttaacgctgtagctagcaagcacacctacaagagaccgccataccgagttcacagacaggacttcctaaaccgactaaccgacgacgccgaaaggtccgaaggcgccatgcaacatgtacaatcagagaacccttacggtctaggatgcactgaccaaaaacaataacgggtcaacgagactgtacaaaaagctagtggaggacatcaaagccatggggaaggaacgaggctggcaacacgatcgctac

SEQ ID NO: 35723 - DNA, 517 bp, Glycine max
  Clone ID: PAT_MRT3847_132261C.1
aaattttgttgtttagtttcttctttctgtgatcattagctgctactgaataatcatgattatcaggtgttccattattgtttttggtgtttcttcagttttatcatttctaatattgtatctgaatgaaatattgccaataattgggcttaggatgcattccttgtgaattcagaactcaagttttgacaattaggtgttgatcacttctcaatttcaagcaatcctctattccctaacagcctcttttttttttttacctatttatgtggtttaatagtttattttggtttataaatgtcaacgtgattacttatatgttcaagcagtcacattaataatttgttttttgaaattctctactataaatatagcttctctttttttagtcttctaactttttttcatctagtctgcagaaaccttgtcagaactcattgataccctatttgtaggtacacctatgagaaaactggttgataagaaaggcatcattgtgcgatttgttatcggaaga

SEQ ID NO: 35724 - DNA, 496 bp, Glycine max
  Clone ID: PAT_MRT3847_132262C.1
ccactccacaagggacatgctcggaggcttgggctgagacatacagcacttgctgggctgctatgatgggaccctaagaaaacatgggtggcacagggccgcgctccaaatctgtagcgagggggagctataatacttgggcaaccaaagcctgatccaccactggatcatacctgctatctggtccacacaggttatactattgggtgccgttgtatgttaccgtattgatagtgacctcatcggtgaggccactgatccaaactaccgcggatgcactttagagccggtgagccttgctgatgacctagacgcttttgcagagcttaatgtgagggaactcactaacggaccatagctcatgctctttatgtcacgttcctctgttcacgccattgttactagagaggatgcatggaagaatctcgcctatcacctggcgtgccgtgtgaataacgactggtacgcgtattccaccagctgcatacgcgcaaag

SEQ ID NO: 35725 - DNA, 315 bp, Glycine max
  unsure (1)..(315): unsure at all n locations
  Clone ID: PAT_MRT3847_132263C.1
ggtttgttaagttttttttttttttttttttttttttttttttttttttntaaaaaagggaattaattttttttttctgtcaaaaaaagaaccattttttttgaatggtgaatcctcaaaccttcccaattctgtttggcgaaaatcccccccttaaaaaacggtggggttaatcctttgggtggtccatgcttacaggtcaacaagcataaaccggggcccaactattgacttttttaaaaccataaggccataaaaccccccagacaactggtcccaaaatcagtttttacattcaatatgtttagcgggggg

SEQ ID NO: 35726 - DNA, 391 bp, Glycine max
  Clone ID: PAT_MRT3847_132264C.1
caacaataaggataacagtactgtcgataacggtgatgttagggctaaggataatagcggtaacgcctctgttcagccggtgccggaggatgggaattcagcccgtccgcaagttaattcgatgttggatacggtttcagatgactcctccagcttgaaccgtcctcaagatgaaccttttagtgttccaggcgtgggagagcggtcgccgggaccggagaattgtgtcaggatcagtttggcttcgcggtctaagcaggagaagcgggagctgaggaggaggcttcagggtgagcttaatagggttaggagtttggtgaataggattgaggagaagttgggggtgcttggtgggtatggtaattctgatatgatggtggatcgtgggatt

SEQ ID NO: 35727 - DNA, 309 bp, Glycine max
  Clone ID: PAT_MRT3847_132265C.1
cagactacaaaagagaaaaacagttcaacttatcctttcaaagaacatatgcctcacgaggcaccaatctgattctgtgttgaacaaacgaaaaatcatccatttgttccacaattgaatagcatgtaaaatcccgtagtgctttctgtgacttaaaggtacaatacacagcatgactaagatcggacaaggatcccttaactatcatgtgaagattaactatgaccacaatgccttgtcatatactgttggccagtgagggataactccgtgctgattctcagctactgaactagaacaacggttttg

SEQ ID NO: 35728 - DNA, 397 bp, Glycine max
  Clone ID: PAT_MRT3847_132266C.1
ctacgtattctggtcgagcgcggcgagatcatttccagtatctatatgctatattacccttgccccgggattacgtgccccagcctgctttcagactttcgcccttactgcatagataaccgggctctggctccattcactctctcgccaccggcaagatagccatcatctttggggataccggcgccttgactcctacttgcagcttgaagcacggttctggcttctttgagacagcccaatatctgaaacggaacggtggggaccacttaatctgtatcagggtgaacgatccatttgtgatgaacccatgggccaaaacattcccagagaacaaggatgttaaggtccttgctgatggggcaacccaatacaccaatgcccttggtcttgagct

SEQ ID NO: 35729 - DNA, 249 bp, Glycine max
  Clone ID: PAT_MRT3847_132267C.1
tccgtgtcacttccctcgtgttcttctatttttccattctttccgccgttttatttattgggatgagctgatgtaaccaacattgttaaactgagatcaatgcaatcaacgaatatggatctatttcattgattgcatagatctcagaataacaatgttggttacatgagatcatcccaattaataaaaggggggcatgtttggtcccttagttgaactcgagggacgtaactcggtcacgtgccgaaa

SEQ ID NO: 35730 - DNA, 272 bp, Glycine max
  Clone ID: PAT_MRT3847_132268C.1
agaacatcataatttttaaatttatgtaggttttaaaccataattccctgcatacaacacgacaactagtgtatacaccatattcaaagatagctaataactacttgactgtttaataaatattacacacacgtaaaggggcgatatatagggcaaatatttataaacttaatttattcacaaaaaccatgggtgtcaaggatatttattcacaatatgaaacaagaattttcttttgttccccatcattatagtaaaatgccttgaaaaat

SEQ ID NO: 35731 - DNA, 335 bp, Glycine max
  Clone ID: PAT_MRT3847_132269C.1
taacgggactatacgttcttcgagctacatggacgggagatcgagataacgctacggatgacacgagactggcgctggtgtgcggttcaacttccgtgactacattcctttctgacaagaacgttcgtatcacaacctctgcaaaatctccctttgttggctctcaattgccgcttacaaagctgacattatcttcttacgttcgaacccttctgacggcatcatcccgtgctcgttgccagcacgagtctactgctgctaacgctgtcgcacaagaagacccgcgcttcgcgtgcgtcgaacccgaacccagatttaaacgcccggacatttgg

SEQ ID NO: 35732 - DNA, 418 bp, Glycine max
  Clone ID: PAT_MRT3847_13226C.1
gataaattcaaaggcttgtttctctaaacatcctcaatggccggccaagagctttcgccttcgccaggctcgagagctaatgctgctattatccttccttggatgtctgagagttggctcattgtgctgtgaattgattattttgtctcgtatttcatttaatttttataagtattgtgatacatgttgttctcaccaattattcatttcggcattttgacacattgatccacgccaatgagtgataaatccaaatgcttagtgtatcaaaacattcgcagagtccggctaagaactttcacctcccccaggcttgtgcgctcgcgctgattgcttccttgcctggcagtctgaggtcattatattatctgtttgtcgaccattttcgtctgtggtagattgatgctgcaagttagta

SEQ ID NO: 35733 - DNA, 1477 bp, Glycine max
  Clone ID: PAT_MRT3847_132270C.1
ttggtccatgaaaatgctcatgttcttcttcatatatactattattattattattattaaatttttataaatttgttcctcataaaatgccaacaatctctgcttaggtttcgcggaaggtctaatctaattccattaattaatgattcatgaatggaagtggggaagtagcgctacgcagagatggttggcaatttaacttgttcgtcaaaaagagaaacaaacgaaagatacagggttattaaaacaggggaaagcctatatatgttttccataaaagagttgacattaaaggcgatggagaaaatctgagttggaatggtttgggtttggtagaagaagctgctcttgttcttcacttctactcttctttgacaaaggttccggtgaggaagagaccgaagagtcattggagctactatcacagctaaacgacacatccatcacgccgtttgggcttccaggaatcgaccctattccaaacttgcgtttcatgcattgcttcccctgctcctgctcctcctcctcgtaccctgaccacacctccaacaacagcttgcaacaagaattcaccttctcaggcttctccttgtcgattctgagaataccaaagagctggctcttgtattcagcttctagaccaggctccacgcttttcacaacgtgcatcatcgtagcagttgccaatacagaaggtagataactcataaacctcgaatctccaaggagggagagaagaacgccttgagacttgctgaggaactcccagaagagatgatccttcaatccaagtcttcttgtgaagtaatcaagaaaagagagagaggttggagggttcatcttccatccaagagtggaaaggatcaaaatctccatctttttaatagttttggcttcgaacaagtatctactctcatccacttgttgaaggtcaataagaaagggaacgtgcgtctcctcaactttggcagcgatggagaggcaagcgacggcagcgagctgaaccatccatggcttgtcattctgaaagcggaagctgaagagaaaacggtcaaagtagttgaccgaaagaacagcggtgagagcagagaaagagtaatgggagttgactttgagcatccactccacggcttcccggcgagcaaagtccaaggcagggttggtttggagacaggtgcttagagggttgtggtgttctttccccagcagcgatgtcaactcttgttcgtccgaaaacatgtcgctttggagcaagaaaggaggggacgcaggggaggagttgtttaggaaatgaccgtagtcctcctctgcttcggagcagtatagggtgtccaaaagggatttccggttggtgtggtcatgatggtggtaagccatcttggatgtgggactttattggagtgtggaatgccacgatggagccattctctgaacccccccttttgtcgtcttttcgcagccgtcggacgcgtgggag

SEQ ID NO: 35734 - DNA, 1533 bp, Glycine max
  Clone ID: PAT_MRT3847_132271C.1
gctcatatactactattatttaatatatatttttataaatttgttcctcataaaatgccaactatctctgcttccagtcctacagccatctcaagtctaatctaattccattaataaatgctttcatgaatggaaggggggaagtagtgctaggcagagatggttggcaatttaacttgctcgtcaaaagaagaaaaaaaagaaagatacgctgttattaaagcggggaaaagactatatatgttttccataagaaagggagggtagttgaaattaaattaaaggcgacggagaaaaactgagttggaagggtttggtagaagcagctgctatttttcactcctactcttctttgacaatggttccggtgaggaagagacccaagagtcattggagctactatcacagctaaacgacacatccatcacgccgtttgggcttccaggaatccaccctattccaaacttgcgtttcatgcattgcttcccctcgaactctgaccacaattccagcatcagcttgcaacacgaattcaccttctccttgtcgattctgagaataccaaatagctggctcttgtattcagcttctagactaggctctacgcttttcagaacttgcatcatcgtagcagttgccaacacagaaggtagataactcatgaacctcgaatctccaatgagggagagaagaacgccttcagacttagtgaggaactcccagaagagatgatccttcaatccaagtcttcttgtgaagtaatcaagaaaagagagagaggttggagggttcatcttccatccaagagtggaaaggatcaaaatctccatctttttaatcgtcttggcttcgaacaagtatctactctcctccacttgttgaaggtcaataagaaagggaacgtgtgtctcgtccactttggcagcgagggagaggcaagcgacggcagcgagccgagtcatccatggcttaatgtcattctgaaagcggaagctgaagagaaaacggtcaaagtagttgacagcaagaacagcggtgagggcagagaaggagtagtgggcgtttactttgagaatccactccacggcttctatgcgagcaccctccaaggcagggttgctttggagacagcaagtgcttagtgggttgtgttgttctttctccaacagcgatgccaactcttgttcgtcccaaaacatgtcgctttcgagcaacaaatgaggggaggactcaggggagttgtttactaaggtgctgctactattgctattactgttaccgtactcctcctctgcttggtcaaattcaccttcccctatccaatgctcttcggagcagtatagggtgtccaaaagggatttttgatggtggtaagccatcttggatctgggacttttatgggatggagagtgcggaatgccccgatggagaaggaggcatttccattctcagaacacacaatttgaggagttagaaaggaaggggtgagtgagtgaccactgagcccccttctgtcgtcttctcgcgcccggg

SEQ ID NO: 35735 - DNA, 595 bp, Glycine max
  Clone ID: PAT_MRT3847_132272C.1
tcgaccatctcctattctgcggccggcctttttttggtttttcttgttgaaaataacacactctctatacatttttaccacaaccaaaatacgggtgcaaattttcaaataagcctagcatactctgcaatagggttgatgacctaatttcctttattggatgaaactgcctacccaacgcaagatgaacacagtttccatatcatgcataagattccgcatttacagaatatccggcacctaccgggggaacaaaaaaagctggcctaagaggattaccaggagtttggaaatcttgacatattcccaagacactatcaaaaactgtaaactgtttgcgattgtcattaaggaaactaacatgccatgaaaatgcgattcgcccactcataactccaccttgcataaccattgttaagaccacatacctgtattgggaagatcaattcccataaatgaggttctgattctgtccacttacatgcattaaaatgctctgaactggagctgggggttaaaaacccttgaacctaggaggcccaaccactccttttgaccgctgcgtacccaaacatgacaaagttggaccattaaa

SEQ ID NO: 35736 - DNA, 2563 bp, Glycine max
  Clone ID: PAT_MRT3847_132273C.1
ctactttagttccggtcttgagccatttactttcctcaacttcaatttctctagctagctactagttcagtgttcagcatatgtgaaatgaaatgagaagaaccatgtcaaatgcatcagcatgcttctttttctttgcttttgtagtattagtagcacttcataatgctgaatgccgttctcttcggcctagtgtttctgatggggttgatgcagttcaattacctcaagagtcttcttatctacaactcaaagaccaaagtgttgttgtcgagtcttcttctgatgagcatttctgtaagcaaatgtacgggttcttgccatgttccaataacatacttggccatctcttcctcattttggtttatgagtacttgttgttccacggagaatcatatttggctgctgggggtgagcaaatcttcaagattcttggccctggggtttttggtgctagtgcctttgatattcttggtgctcttcctgagtcattaattcttggtgttactggactttccagcgataaggagagtgcacaagagtatgcttccactggagttggtttgttggctggatcatccattatgcttctgacagtagtttgggggacctgtgttttcattggcagacaaaagttgaaaaatgactctaactatggtggcacaaattcatcaagtggaggaataaaagaatcactaactggttatggtatcactatggatgtagatactagaaagatggcaagaatcatggttttctcagttataccactcctcataatgcagattcccagtatattcaacttctcttctattccacgcaatgtgaccttgatggttgctcttacagttgctgttgcttttcttatctcatacttcatttaccaggtctttaaacctcagattgagaaaacaagactggagtatataaaacatgatgacttaatattaagaatttttcaacgtgtcgaaaaacaaactctacaaaagatcctgaccgatgatgggactcccaatgtagctgcaataagtgggctgtatcatgaaattagtcaacgtgggggcaaggacttgttagcttctgaagtgaaagagttgttatttggaacaaaattaaatgacacaaatatcaaagaggaacagatagcagacatgttaaaagtttttgaccgaaatggtgaccaaattataaccaaggaagagtttgtcactggcttaacagaatacattaaccaatcaaagcatgctctggatagacaatacctccccaaagaatctctcaacaaaatgtatcagacttttatcaagccatggattgaacacgtgagaaaacaacgtgaattgaagggacatcttatatctgaagtcttgaagcatgctcagaatgatatggttggccggctgcgccaagatgatggcacacctgacaaaattgctatcaaaaggttgtttgaggaaattgatgttaaccaagataaccacatttcaagatctgaattggaaaaagtagtcaaggacatccagtttggcaaggctgtagaaactgaggaggcagttacaaaacttgttcaagatcttgatctcaacagagatgatgaaattagcgagaccgagtttgttgaaggctttacaaaatggatgaactcaaattccagccaagctgctaactcaaaatcttcgtctcacgaaattcgtcgaacctgggaagatgttgaaaaggtaatagaagagaatcaaaccaaaggaacatctgcatggttgacggctataggatatgtggtgttgggagttactatactggctcttcttgcagaacccttaatagcaagtgtccaaaaattctctgaagaagcaggaatttcatcatttttcatctcattcattttagtccccctggctacaaattttagagaagcaacctcagcaatcaaagaagctagccataagaagaccagtaatacttctcaaacaatgtatgagatttatggagcagtgttcatgaacaacattcttggctttgtggtgatctctatacttatatacatgcgtgagatcacttgggaattctccgctgatgtgctagtcgtggcaatagtttgtgctgtaacgggcctcactgctagttttcgacccacttttcctctttggacatctttccctgcatacctcatgtacctagtagcattgcttttggtcttcgtcctcaaagatgttctcaattatgtttagtgaccaggctggcataacaaaccatggatgtggattatgttgaatatcgtgtgaccgttgatgattctaatggggtcgttgatgccttgatggaaaacgaatttagatatacactgaatgcaaggaaaagtctaagagtatcaattgcacaagatgagttagtaacacacttgattggaaacctaaaaattcatgagttgacctcattggataagaaatcagacctataattttttgtaatttttaaaaaaattcagccataataaaagtacattagaaaaattatgctactaatatttcttatcaaacaataataaacccattcattgagctat

SEQ ID NO: 35737 - DNA, 610 bp, Glycine max
  Clone ID: PAT_MRT3847_132274C.1
gatcgagagtggggtgctcgcatgacaaaagcaggtctggttcctccagttactagaaaatatgaagtcattgaccaatattgcattgtagctgatgaggaggatgtgcgaaggaagatgagggtttcattacctgatgactatgctgagaaactgagtgcacaaaagaatggcactgacgagtcagatatggaacttcctgaagtaaaagattacaaacctagaaagcagctaggaaatgaggttatcgagcaagaagtttatggaattgatccttatacgcacaatcttttgcttgattctatgccagaggagttagattggtctttgcaggagaagcatttgtttatagaagacacactccttcgaacattgaataagcaagttaggaattttactggaaatggaagtactccgatgagctactcgttgcggtctgttattgaagatattaaaaagttcgccgaggaggattgtgatgcgagaatggttaaaatgtgccaaggtattctaaaggccatagacagtcgtccagatgacaaatatgtagcttataggaaggggcttggtgttgtttgcaacaaggaagaaggctttgctgaagatgatt

SEQ ID NO: 35738 - DNA, 377 bp, Glycine max
  unsure (1)..(377): unsure at all n locations
  Clone ID: PAT_MRT3847_132275C.1
acgaggttgaagagagttgaaagaaacaatttataatttaattattacttcttagaattaggcacaaagtaatcttggataagctaacactcttgtgagcttgccaagcatacacatttcccttgggggtcaattgtaggttaatggtttaattggaattgaatgagaagtatactatggatttgattatgaagccaactattgtcctttggactttgattattagattacataattattgaagtggtctgaagtgaactgtctggttaggatggctaggcatgcacttcaatcttctatttggtgttgtttgttttgatcaaatgcatttcacttgtaanttgtattacatcttttaactggatggaatcattaaa

SEQ ID NO: 35739 - DNA, 432 bp, Glycine max
  Clone ID: PAT_MRT3847_132276C.1
aaacagttctccaccgtgttgtttcaccagttatagcaccgtgaagttcatgagcatgaacatattggactgcacgcactataccagtgtgtttaacacggataatttgaagggtgttggccctttggactgggtttatgggatcaagctttctttcagtgtgcctgatactggatgtcaaagttgcaaagaatctggtgggacatgtggctttgatactgatacggaaggtttgctttgtctttgctcaagtttcgctaattcaacaagggaatgtgctgctggaagcataatatcaaaaggacagaacaatgctccttggacacacttcctactggttttgcttgttgtagctaattttctcacgaaagtgaagctcgtttgagagattaattttagttgtctgccactctattgttatagggcagcgag

SEQ ID NO: 35740 - DNA, 585 bp, Glycine max
  Clone ID: PAT_MRT3847_132277C.1
tgcgtaagttcattataatcaaatataacattttcaactgtcacaaaacattaattgatatttaacatcatttctattcaacaaaatgctgcaattttgaaaaaactcttcatacatataaaacacgagtggttctcaatcgagatcttcctgtctggtctccgagtcaaaattctgattcccccggtttccagagttcgattgcccaccattatttccgctactaccactattgctattgctgttgttgttgttgttgttgctatcattgttggcactcccaacattacttgtctcggcaaattgcctaaacggccacggcaaagacaccctaaatcttctcctctgcgaactatcaccgccactgccaccgccaccggatgaatccgcagaaccaccagcgggccccaatgccatgttccaattcacttgtggagctgccccacttccggcaccatcaccaccactaccgccaccgccaccacgacgagccctctgctcgtaatcaggatcatctgtgggcaattcataccgacaaacggggctcggttcgcgctctccccgccacggcaaaatgcaatctgt

SEQ ID NO: 35741 - DNA, 473 bp, Glycine max
  Clone ID: PAT_MRT3847_132278C.1
acggctgcgagaagacgacagaaggggggagtttattagcctcaacgttctctttcgtcgtctccctcttactgacactaaacaataaaaacaacaactctataagcgtatttcactttgttctcaacttttcacaacttatcctaagaatatcttccttctctctttctctctctatagcacaagccacaaacgcacaaagttgcatcaagatcaagatcacttattattattactatctattactattactttccacatcaacaaagaactgctcctacccctcgattgtttttgccaccatgtgtgtgaaggaccaagagaaagaccatgtgtgtgaaggaccaagagaaagatatgattgataacaccacaaccagttcatggcctttgcaacattgccaccttttgctcaagacccacatggacaaaggaggatcttctctcagaacttcatgtgatgatgacacaac

SEQ ID NO: 35742 - DNA, 1431 bp, Glycine max
  Clone ID: PAT_MRT3847_132279C.1
gggttgactgggatacttgtgcttatctgctgttttgttgcggaggaggtttcctctgcggctgccgccgccagattagggtccaggttctctctggttcccttcgttattgtggtggcagtttgcaccattttggctatgattgctaccttaccccttgctcagctgtttttctttcatattcttctcattaaaaagggaatcaccacatatgattacatcatagctttgagggagcaggagcagcaaggtattggaggtcagcagagtccccaaatgtctcctgttagctcccttactggaatgagcagtgcaagctcttttactacattccatcgtggagcatggtgcacacccccacgtctgttccttgaagatcagtttgatgtagtgcccccagaaacagcttctgtaagctcgctgggaaagaagacaatgagagatgagccggttaagaaaaagaataccggagcagtcaaaatcagtccatggaccctggcgcggttgaatgcagatcagctttccatggctgctgcagaagcaggaaaaaatcgagtgacctgcttcctatcaggattgttcagaggtccacaaattggactaatatgctcttcagtgctgatcagtacgagagaccttttgagccaaaatcatcatctagcgtggtttatagcagaaagttgtgaccaatttgggtgttaattagacaaaactattatcagattatattgatgggaattgttcattctttgatttgtgagcccaaaggtactctctcaccttcaacaacccttaactctctcaccttcttcgagtcaagcagtgtccagctcagcaggtattgttgcttgctctcctgaaagcagtttagactcgcctgacattcacccgtttcgtgtgtctacgaccgaagccgaagaagcaagaaggcttgctggtctttctgctgccgccactgcgaacctgaagggaatccctctgtcaaggtcaactagtgatggatatgaggcctctggtggggaggatagtgacagggttcccaccaggattgttcagaggtccacaaattggactaatctgctcttcagtgctgatcaggaggagagagcttttgagacaaaatcatcatctagcatggtttatagcagaaagttgtgaccaatttgggtattaattagacaaaactattttcagattatattgatgggaattgttcattctttgatttgtgagcccaaaggtacttgttcaacttcaacaacccttaactcacctcttgaggttgagttgatgcccctcaaagttttggaggtaggctaagtgggaagtgggaacccatgtacaaagttttaggtcacagtaactgattgagtttcccaattatattgttttctgctccctattttgttaaaattttaacccagcaaaaaa

SEQ ID NO: 35743 - DNA, 583 bp, Glycine max
  Clone ID: PAT_MRT3847_13227C.1
ccgagcgatgggtgtgaactcttactccaacagcatgaagatccaagccgagatacaaatgccacccttagaaatgcacaaggttcgtttgccaccagaacgcaccaccttgcagaaactcagacacagactctctgagatcttcttcccagatgatccactccacaggttcaagaaccaaacatgcctcatcaagctcctccttgcacttcaatactttttccccattttccaatgggcccctctctacaacctttcccttctccgctctgacatcatctctggtctcaccatcgctagcctcgccattcctcaggctgagtgctattaaatctttttcatatataaacctctttggtcgaaaccatgcagcgtgttaaaacatgatttaagattggctaagatcatcaatacataattaatgcttggattaatttctccttaacacccctcacgtgcatgtttctacgtatacttgagtgttttttatgcagggaatcagctatgctaagcttgcaaacttgccacctattcttggattatattccagttttgtgcccgcgttgatatattccctgcttgg

SEQ ID NO: 35744 - DNA, 354 bp, Glycine max
  Clone ID: PAT_MRT3847_132280C.1
gcacgagaaataacgtatgtttctggtcattcacattctcttcactcgattgaagtataatctccttcctctgtcattcgttttgcagtaatatatataaataagcagtgggatctaaaccatattatatcttgaattttgaagaatcttctctattcctgtatttgtgttgtatcataccgtgtacctgtactaagtttttgggttcttaggtagacctttatgccatgtgatttgatctcttggttgcattttaggtgtaacactttttgttcctaattagttatctataagtttagatgattagaaacctctcagttgaattaaaattttaaaaaaaaaaaaaaaaaaaaa

SEQ ID NO: 35745 - DNA, 454 bp, Glycine max
  unsure (1)..(454): unsure at all n locations
  Clone ID: PAT_MRT3847_132281C.1
gaagaatgaacaattcccatcaatataatctgaaaatagttttgtctaattaatacccaaattgggcacaactttctgctataaaccatgctagatgatgattttgtctcaaaagctctctcctcctgatcagcactgaagagcagattagtccaatttggggacctctgaacaatcctggggggaaccctgtcactatcctccccaccagaggcctcatatccatcactagttgaccttgacagagggattcccttctgtcgtcttctcgcagccgtacccttctgtcgtcttctcgcagccggacccttctggcgtcttctcgcagccgtacccttctgtcgtcttctcgcagccgtacccttctgtcgtcttctcgcagccgtacccttctgtggtcttctcgcagccggacccttctgtcgtcttctcgcanccgtacggacgcgtgggg

SEQ ID NO: 35746 - DNA, 573 bp, Glycine max
  Clone ID: PAT_MRT3847_132282C.1
atcataacttgcttattttatcaagattaaaaacttaacatacgtaagcctctcttttatctttatttgtatatattaattgtctatcacttttgatcatttttttaatctttatctctaattgaatttgaatagttttctattaagaaaattaattttaatggtaaaaaaatcatatataacaatttaaagtgttaattataaatttaaaatacaattcatatatttaaatatatttatttattatgggttgttcaaccagtggtctgagttcaagttttaaaaatataactatattaaatccttaaagaaaattttttattgtcaacaataatcttatctagtttgaataaaattacattaattccctaaaggataccaatgatctataccaaaaaacatacaatgtaatttatcatataccataagtgtatatatatatatattattgctttcacaactttatatttctagatgagtcactgtgtggagattttctagcttaattaattaataatttccagtcttttaacgggtatgatcatgcactaaatattctaggagagaaattga

SEQ ID NO: 35747 - DNA, 753 bp, Glycine max
  Clone ID: PAT_MRT3847_132283C.1
agtcaaaatcagtccatgtacgctggcacggttgaatgcagaagaggtttccaaggctgctgcagaagctagaaaaaaaatcaagagtcttcagcccgtgtcaaggcacaataacgagccattcacactggagagccagacggcaactctgtcagcagtggccggcgaatgagccctaggattgagaccaacagaagacggcccggtaaacggattcgcctgcctgccgacttgcctatggaggccataccaaaattttctgccagcaacattgacaaaggcttcattggaacatctagtttggcgcctctcccgcccaaagcacggagcgtgtttcaaccaagtcaagcagtgtcaagctcagccgggatggttgcctcctctcctgaaagcagtctagactcgcctgacattcacccgtttcgtgtgtcttccaccgaagctgaagaagcaagaaggctttccgatctttctgctgctgccgacgtgaacctgaagggaatccctctgtcaaggtcaactagtgatgggtatgaggcctctggtggggaagatagtgacagggttcccaccaggattgttcagaggtccacaaattggactaatatgctcttcagtgctgatcagtacgagagaccttttgagcacgaatcatcatctagcgtggtttatagcagaaagttgtgaccaatttgggtgttaattagacaaaactattatcagattatattgatgggaattgttcattctttg

SEQ ID NO: 35748 - DNA, 441 bp, Glycine max
  Clone ID: PAT_MRT3847_132284C.1
cccggaatccggcttaggtaacccttcccgttttttatttaaccaggcaccaaaaaattccctggccatggcctattaaaaaaaaaaaaccctttgctttatgctctaggggataaaatccacaccccctttaaaactagacccagggtacttgctaaaacaaaaactttgctctttaaaagggcccaccttattaaaaccccaccattgggccctgcccaattaaccctagttgaagcaaaaaacttttggccctaaaactctcctaaccgggggcccgaggctggtccctcgcccccaaaaggagccccaaacccacttgggggggtgggctcttgggggggggaaaatagagaaaatttttgggcggcggccttaaaggaaaacaccagaaaaagctgatttgggggcccacctagtgacctggccccccccccttgg

SEQ ID NO: 35749 - DNA, 424 bp, Glycine max
  Clone ID: PAT_MRT3847_132285C.1
gaaaggagtacactcattattgaaataatcactcatgatacactggtgcgggggtataacatataaatgtggcgtgcggtaaacacatgccccttgatatgtccctagagcaagatgttactttgcacctcacacacaaatgacaaatatgattgctacttggcataactggacttacacagattgaataaattacctaaggtaattgttcagggacaacggggtaagtgaatttctcaacgcgtagccatagacctgcagcagtactgactgctccttttattcctcttcactcactaactaaggttgcgagctcctctacaaagagcggcatgaccttagtgaatggcccttttacgagcctacacagaatgaggtgatcacgcagcacataccatgcatacaaagagccaacaatatgacg

SEQ ID NO: 35750 - DNA, 391 bp, Glycine max
  Clone ID: PAT_MRT3847_132286C.1
acaacttcccaatcctcaatactaccgcctttcggagaacaacgccaaacccaacaccctccttctccacaaccatgctgacgctgactacctgatcgttatccttaacggaactgccattctttccttggtgaacaacaaccacagagactgctacacactataatgcggcgatgccctgagagacccctcgcgaaccacatactatgtggtcaaccctgacatcacctaaaatctcagagtagtagcactcgccataccacgtaacaagcctggtacagtcgacagtttcttcctatctagcactgaagctcaacaatcctacttgcaaggattcagcaggaacattttagaggcctcctacgataccacattccaggagacaaacaag

SEQ ID NO: 35751 - DNA, 150 bp, Glycine max
  Clone ID: PAT_MRT3847_132287C.1
gtccgaacgagcttgttcccgaacataaggttttaactgaccccgaaaaaaaaaccttgcttgaaagataccccgtcaggaaactaagttacctaggattcaggtacagatccgtgcagaattatgatgaacggacaatgaagatatcgc

SEQ ID NO: 35752 - DNA, 342 bp, Glycine max
  Clone ID: PAT_MRT3847_132288C.1
aatcaaaatacaagctctgtcattttaagagaaccaaattgtgactggcgtggcgattgagttcaaccgaatatccttgctatcaccacgtagattggcgtttttaccatgtacaacaagaaagaatttcaatattcaacaaaaaacttgagtcggaacatagcatcaggtggcaggttcatgaacatcttattgaaaactcattactacctacatgcgaaccaacaggaaactgaaaatgtgtcccagaaaggagtgtgaacgataaactttaacatcccatggagctttttcaacattaagagcactaacctttccatttaccacatatgctgaccatat

SEQ ID NO: 35753 - DNA, 576 bp, Glycine max
  Clone ID: PAT_MRT3847_132289C.1
tggcttggaacctttgggctgattgatgtgcttgcatggtcgtgagaagatgatagaagggcatggtcgtgagaagatgatagacttggagcttttgggcaggcttatatacttgcatggtcgtgagaagatgatagaaggggatctatctacataacagagattagtccccgtcctcccgcgaatacggagacgaggaaactacgcggtcctcctcctccgtcttcttcttccgctcccgtcctttaggcggcggcgtagatggagggaagagcgcgcgagctataaagttatgggccttacggcccgcgcaacagagattataatcgcgtcccggctcgtaggaatgaaggccctcttggcggtaggcgtaaaggtccttgttgttgtcgtccccgtattaggacccgccgagactctactaaatatcatctccgttacgtaaaccaacaaactacagtcacgttaaacaaaccgtactcatctcccacttacccgggagtcagtcattataattaatctacatccggctaccggaccgtcctttcccggtcctcgttcccgtccactctctca

SEQ ID NO: 35754 - DNA, 380 bp, Glycine max
  Clone ID: PAT_MRT3847_13228C.1
tcgcccaggcgtccgatatgttgttctctagctcgtttactaggacataccatgtgacaggtgaggaggtccgtccggattcatgggcaatgacattcgggatgacgctcacgattgcacttgctgaatatggtttcgaatatgaggacttggagaacgacttgacgatcatgttacctatgatcttacatatgaacacgattcacaagatgattcccgatgtcatacacattggcgaatccattatcgatgccctcatcgttgatgaggacattgatgacggttggaatgacatgacttcatagccttattaaaaagcttacgatagagcttaggctggatactgggccgattatgttcacgttcttggacatgagatt

SEQ ID NO: 35755 - DNA, 380 bp, Glycine max
  Clone ID: PAT_MRT3847_132290C.1
ctaaaaaaaatattttagttttttgggcaaaaaaaatcgggacatattgccagatataggtaaccctgcaactggtcaaaaagaaagcaatgcgaaatttggccaaatgcggggaaaaatgtccacattccagaagataaaaccccacgttacggtccaaatggccatcaggccagttgacccagagggggacaaagggtccaaaattgtgggtgcgactaaccgacaaataaccgccaaattaaaaaaaaatggtgcgccaatgcctttgccagtttggccccgtcgtccaactaagtacggacggtcgcgcggttttttcagttgcacttggagccgattcgtcccaattgggaagccgttcatcgcctggatggcct

SEQ ID NO: 35756 - DNA, 175 bp, Glycine max
  Clone ID: PAT_MRT3847_132291C.1
cgggctgcctttttttttttttttggtcttaatggaaattggtaccattggaaaattattggttttggccattaccttggatttggaggttccttatttataccaaaggccaccccaccggtttggaccccaggattaaataatttcttttttttttaataaccatttttttttg

SEQ ID NO: 35757 - DNA, 276 bp, Glycine max
  Clone ID: PAT_MRT3847_132292C.1
acaatcttcccatgcacaagatgattaatacagatcttagcagaatcttgaaaagcccagagatccaaagagcccttcgagcaccacgcaagaagatccatcgcagagtcctaaagaagaacccactgaaaaacttgagaatcatgttgaagctaaacccatatgcaaagaccatgcgccggaacaccattcttcgccaggccaggaatcacaagctccgggtggataaggcagctgctgcagcagcggcactacaagccaaatcagatgagaagg

SEQ ID NO: 35758 - DNA, 291 bp, Glycine max
  Clone ID: PAT_MRT3847_132293C.1
acttacgctctttgattggaggatacatatctgcgcgcattggggaactctattttggtgaacaccttaagaatcagagtttgttataccactatcaggtttaggactattatctgaactggcatctgagtctactcagcgaccatttcgctacacgcagtcacctttaaaggtgctgaatttgacaaatctggcgagagattgcacagtggacgaacttactagacttgagactctatctggagacagttgtgaccacaatgtgcaatgtaagagtgagcctattaatct

SEQ ID NO: 35759 - DNA, 258 bp, Glycine max
  Clone ID: PAT_MRT3847_132294C.1
ccttgccgcactcggcgtctacatggccgccgtgaccgacgttccgaccccggaagccgtccgcgtcggcaagctgttcctgacgccgttcggctatgcgatgttcgtcagccccctgaagtggctgttcatgctcgcgccgctcgccatggtgttcgtggaaattagaaaaaaaacaaaaaaaaagagaagaaaaagaactaaatttaaatataattaaaacaggaattataattaaaagaaatgttaatgataaaa

SEQ ID NO: 35760 - DNA, 347 bp, Glycine max
  Clone ID: PAT_MRT3847_132295C.1
aacataatttatgctaggattcttggacaaaattataaaacttctcgaagagattttacactacaaaaatgtcaccccaactaacccaatgtacactacctactacctactcatatgcttttattaatacttaaaaaacaacagacacctcaatattctttgccaaatcaaccaactgacagtcatatccctcctattacttaagattgtcgattatcacaaaatcaatatgggaaatttatacaaccctgcttccctttatgatcccaatcaagcataagctcaacctttactccaaaaacaccctgtattattaagacatgtctcactacttattcaatgcaatc

SEQ ID NO: 35761 - DNA, 456 bp, Glycine max
  unsure (1)..(456): unsure at all n locations
  Clone ID: PAT_MRT3847_132296C.1
gcaacctaagcttggggttcggctcgagcggctcgagcggctcgagtacggctgcaagaagacgacagaagggttcattgatcactacataaattcatgattgaatctttattttaataagacgaaatctaattgaatttaatatgtcaaattttttaataatggaatttaagggatatgaattcattcatatatgtacttcccacccactccaaaataggcccccattatttatactagctagagaaatatgtagcccatgatgtgaaaaaagaaaaatgctgatgtggcccagctgaaaaaaataatcnaatgtattcaaaattgaaatattanttggctgaaaaaatgataatgaaaaaaagcgcccattgatttagctctccatcactttttgtctgttttcgatttcgcaccatacgcttattagtctgatggaaagagaaaagaaaagtg

SEQ ID NO: 35762 - DNA, 545 bp, Glycine max
  Clone ID: PAT_MRT3847_132297C.1
gatttacacattctttagaatattttaaagaatatgagagtttgtataaacaaatttagcttcggcgtaaagtgtccttggaaatatatgtgacaaagaaaggtgtaagaagagggaaaataaacaaaagggagaatacgatccaatgagaagttctgagttgatgacattcatttttcttaggtttccaaagttcactgacaaagaaactagaactacacgagcaattttcaaagggttttaattttaagggaatctaggtgtaagaaataaagatataataatcctcatgggtattacacagtgtgtaatgtgtaatggtgacacgttttctaaattaggaagtgatattatatttgagccaatgatactgttggatcatgtgccagcttggcagagacagccaatcagggcctcgacaatattaaggttgagatatatcagtaagtttttgacagattatgttactccaaataataacctataatgtattattttaattattaatataatgataatgatgatgaatcatttgtgaggtttat

SEQ ID NO: 35763 - DNA, 619 bp, Glycine max
  unsure (1)..(619): unsure at all n locations
  Clone ID: PAT_MRT3847_132298C.1
ccacgcgtccgcggacgcgtgggcggacgcgtgggcggacgcgtgggcggacgcgtgggcggacgcgtgggtcttgagccattgtgggtgcaaaaacccattataaaaggccatcagagagagagggagaaaagacagagagagaagacagagcagcatcctcagagaggccattgctctctcttacaaaacaacaaagaacattctctctctctccctccctccctctcttgctcttcatcattctctctttttttttttttttttttnaagnncaaccctttatttgctttggctctctcataataataacttgatcagtgttctccccttggaagaaaaaaaaagtggcatgcaattagcaaactaacactactcttccctcgtcaatntttttgatctctcattaatttcctcagtgttttctaagatccagagaggagcaagatggaatcatttcaaggttcaagggatgacatttcctaccaaatgggtttgatttggagccaagtgaaggagccagtgatcgtgccaatgctgagggtgtcagtgtttctgtgcttggccatgtcgttgatgatgctggtcgagagggtgtacatgggcattggcatttgct

SEQ ID NO: 35764 - DNA, 535 bp, Glycine max
  Clone ID: PAT_MRT3847_132299C.1
ccgcgacgaagctggatcctctagagcggcgccttttttccttttttttgcaagacccattctaatgaagacgtcctaaacagcaacgacatatctacagcgcatcctaagccagagatcctatctacactaagctatcgatagagactgaatggtttttcctaaacttatatcctatgaggaacgccttatctttaaagactacccgtcgctcaactcctgcatatgtgggagccgagatgccctactttactaccaccatgagaggaactagaacccaaaccctggctactgaataatcaaattccgcatatgcagatcaaaggggcgctagctctgcttatggcacctccttctgagtgtcactggccttgattgatttgcaccatacactcataaaggtaccaaagggtgcctactctctcctaggctgctcatatttgccatcatcaaacatcctaacataagtgcttctcggacgagctctgacacagcatacgtgagactgaacaccatgaatttcaatctaccagat

SEQ ID NO: 35765 - DNA, 542 bp, Glycine max
  Clone ID: PAT_MRT3847_13229C.1
ctgcttgggggggggggggggggggtagcaaggttggggaggcaacaaaacgagggataggtaataaaagataaagcaagcgtagtggcaaggctataagcaaagaatgtcaagcggatattcagacgagattagcgggtgcgggcgatggaacgcgacggtgggggttggtttttcagagggttagcgcggtaaggagagtgagagcatacggatgaaaaagataaaagcgtaaatgggatgactttaaagagtagataagccatagtggatcagataataatcgataaggggctgggcttgggtacaatgcggggtgccctgactaacggaactggcgctggcaggtaacccggcttggactaacttataagaacttaccagtaggttcgggtaatattaacgaactaggggttgggttaacaggcgtaaatagaatagtggtctgcaacttaattaaaaagacaagggttaacctactgggaggagggataagaggttgtgtaagcatgccaggacttggttcgaagtgtggcgagggg

SEQ ID NO: 35766 - DNA, 494 bp, Glycine max
  Clone ID: PAT_MRT3847_1322C.1
tacggctgcgagagacgacagaaggggttgacattggttgaaaaaatcctagttgacatctgtaaaaaaatcctagtcaaggtctgtaaaaaaaatgcctatacaacatcggttaaaaaatagtcctaaccgacgtcgaacaaaaaacctagccgatgttggccaaaacatcactgaccgatgtcaaccaaaacagtctgggcaacaacgacaaaaaaatatccctggtcaatgttgacaaaaattcccatgacccacgccagtcaaaaaatagtcctgccaatgtcaactgaaaaaatcctaactaacatcagaaacaaaaaaaatagccttgattgacttcttacaaaaaatcctacacgaaaaaaccatgaagctaatgaaaaataactcgtgtcaatgtcaacagtaaaaaccttggccacccctagttgtgagcatcgatataaagagagagagccgtgagcgataacatgagtgagagtaaacacttt

SEQ ID NO: 35767 - DNA, 134 bp, Glycine max
  unsure (1)..(134): unsure at all n locations
  Clone ID: PAT_MRT3847_132300C.1
atagaagagnnacgacgncgcatgcacgtactacaaattcgaatttcgcttcaaggccaataggttttcttaaggtcccttttagaacaccgggggaaggaacttggcaaggggttgatgtatggaatgccctt

SEQ ID NO: 35768 - DNA, 360 bp, Glycine max
  unsure (1)..(360): unsure at all n locations
  Clone ID: PAT_MRT3847_132301C.1
gcccgggaaggagaatttttaggattaagacggctatacttaaacaaggaggtgatatagtacgaaaggttcattcttgggcaaagcatctatcaacgctaaactaatggcacacacaaccatgagctgatgaaatacagtcattacacacattccttgttggtgtgacaagatcttcaaatagttctttgnaccatatattgattaacccttggaagggctccacatgatggttcccccttcatacaaaagatcttttcatgaattccaacgcaggggagtgattggaattatgatcatcgggaaccttccatgcaagggcctgctcataagacactggtcgaatcatacttgatacac

SEQ ID NO: 35769 - DNA, 415 bp, Glycine max
  unsure (1)..(415): unsure at all n locations
  Clone ID: PAT_MRT3847_132302C.1
ctattactagcatatagtaaaagtgacgagaggtgcaacatcagtcnttctcaaacaggtggcatggctgactacctatttatagctatcactagatccttagcagttgatagttcggatttggaactaccataagccgaacgtatcacaaaaacccaaaacctagcaaccatggagctttgattgctttgaaacatagtgtgcacactacactacatgatcgaacaaggatctgcacaaacacaaaccccacttctgaacactgatctacctctctatcacctactgtcaaaacctaccaagaggttttgctttttctttttaaattaacctaagcgacattaaccacgctgaaaacatgcagctaaaagccccaaagattcctatgatggattatttcccacctacgaacatt

SEQ ID NO: 35770 - DNA, 1067 bp, Glycine max
  Clone ID: PAT_MRT3847_132303C.1
tcgtacggctgcgagaagacgacagaagggggcattattttattgcactcattcaccgcagatgtctgataaggaccgaaagaaaattaaaacggcgtttcgataactgccacataaaagtacatataaaatcagaaaaagaaaactaacatacatcagtcactagtgtgtgaaaagcgacacaacacaacataagctttattctttgttgttctccccgtctgtgcagcactgttttagggtttggtcaattggtgacaagattgaagatgatagaccttgcgcgcgtgcagaaggagcttgtggaatgcagcaaggacgcggagggatcgggcatcaaagtcagccccaaaaacgacaaccttgttctcttgatcggcaccattcctggccccgtcggaactccatatgaagggggcattttccagattgatatcacattgcctgatgggtacccgtttgaaccccccaagatgcagtttaaaaccaaagtttggcaccctaatatcagcagccaaagtggagctatttgcctggatatcttgaaggaccagtggagcccagcactcactctgaagactgcacttctttctgtgcaagcacttctctctgctcctcagcctgatgatcctcaagatgccgtggtggcacagcagtatctgaaagactatcagacatttgttaacactgctcgctactggacagaaagttttgccaaggcttcgtctcgtgggattgaagataaggtacagaaactcgttgagatgggatttccagaagctcgagtaaggagcattttggaagctgttggtggtgatgaaaacatggcccttgaaaggttgctgtagatcatggtcaagtttaggaagacgtgtctccataatatgatggaaccatatagacaataggttttaaattgaatagagtcatataaatctacttggaatatcgtatagtccttttgttttacttttctcctccttggaaactacagttctcgactatttcctgattattatatatatcagctatgaaattaaataccttgttggcaaggtttctgcttc

SEQ ID NO: 35771 - DNA, 379 bp, Glycine max
  Clone ID: PAT_MRT3847_132304C.1
gcgtcacactgtggtacagcatgagagaccaacggttctgggagaatctcctcaccctctttttcaatgtggtcacccacaattgtcttgcagctctcacaacacatttctacaaaccaaactctgactggagatcaaactctagtttctgaagctggggtcttcgaactgggcttcttgaaggccaggtaattcctcaaactactacataggcgtgtgggacaaaagaggcaccatacaagacaatagattggggagcgaatagagacaaccctgtctctgataagagcactggcaagttaacaacatttggtggcaatttaaggcgtttagatgcgtctccaaaaaaagcatgggcgacaaacgttacttctcccat

SEQ ID NO: 35772 - DNA, 465 bp, Glycine max
  unsure (1)..(465): unsure at all n locations
  Clone ID: PAT_MRT3847_132305C.1
ttgtctagcgagtagattgtctcttctcgcgctcagcgcgcccagctcgctaagccgaatttcacttactctcgcttagcgagctaatctcgctaagcgagccttcagaagctgaaatgtccaagtaacctttaaaacacgaacgttggcggaaacaggggagagtaaaaaaatagagccaagagagaagctgaagcaacagaagtcaagtcaccaagagagtttatgttagaggagtgagattagagttctagaggttgaaggagacatcctcaatccttcttagccattttcttccacttaaactctgttcttccttgtattggacgttcatttcttgtaatggaaggctaaacctcttggttgggaagttctgttgaacccttgatgtaacattatttcactatctatntaatgttgtttttctgtgttaaaaaaaaaaaaaaaaaaaaaaaaaaaaaaaaa

SEQ ID NO: 35773 - DNA, 415 bp, Glycine max
  Clone ID: PAT_MRT3847_132306C.1
atagaatcccattccactagaacactgctttggtgacccaaccagctagccacatcgacgcatccacacgcatttcctctaccaccgacaccgctccctgtcactgaaggaggaggatcgtcgcgactacctcgcctgcgcacactccactggatcttgatggcaaccacatcgtgcccctcaccatatgcatgatcgacaccggcggcttcataggctcccacctatctcagaagctaatggccgatacgcaccacacacgtctcgctgttgacgactactgctacaagatccgtcaccttgtcgaccccgagccgccgtacctttccaggcgcatctcattccaccgccttaacataaaaaacgactccaggctaaaggtgctcattaatattgccgatctgaccataaacct

SEQ ID NO: 35774 - DNA, 391 bp, Glycine max
  Clone ID: PAT_MRT3847_132307C.1
aactttccctatacctttttagatactacccacttctaatctgctttgaaggttttctttctgtttccccctgcacttgaagtatggagaatcttctttgggatcatgatgcatgtggcaaacaagagaacgaaccgaaaggcaatttcactacctatttgcttccttcaagactactttgctcactttgtcaactgtgcctacatgtctccccccacagcttgacctctgcaacagctcgctctctttctgattcttgaggcaaaatcacatatgcttcttttggagattctacactctccattcctgctgaggtgactgggtctgatacttttggggtatatagcttggatcacaagaattctacagcttccactatatgacctgcact

SEQ ID NO: 35775 - DNA, 457 bp, Glycine max
  unsure (1)..(457): unsure at all n locations
  Clone ID: PAT_MRT3847_132308C.1
aacngaacngaacagacccgganccagagagngcncctaaacgacgccgnggcgcaagcatcagnaggggagncgcagagaatcaaancaagggagaagggaaagggagngangggatcgggaggacgaagaaggggcgttgacttctccgacaattccacttctcgcgagggggccgaacctcttttttttttaagccnnncncncgancaggacganncaacgcgggngggccggaagaaggaccccccccnccaacnggaaagcccagaaagcnngggaggnagcacaagccccnangaagaaaaagaaaanganggggnncangangngganggcnggnagcacagnccacnngnncagcanngggancacnnncncagcccnnnggcaacccancagngcccnacagagngncggaaagangnnngagcccnacaaagacaanaagggggag

SEQ ID NO: 35776 - DNA, 792 bp, Glycine max
  Clone ID: PAT_MRT3847_132309C.1
cacgcgtccggctttcatccctaggtgttggtgattatggcccatggtttgcagttcactacctagctggatgttcaagttgttcaaatattcttaaagatgaggatgacctgaaatatgttttgcagatgaataattattttgtcaaagagctggaaggtaatggacatgatcaagagcccgttctaccagcaaataagccatctgtacttctatttgttgatagatcatctgactcctcagaaactagggggaaaagtaaggaggctcttaaagcttttagagtattggcacaacactatcatcgtgtgaatcagactggtaacaagaataataacagtcatgacaaattttctattcgagattatcatggcttcaagagtacatctgaacatcctaggttaaagttgtctaggccagctcagaagattaaactaaaggagaagatttcttccatcatgattatgaatgagggtaagcaagttagtttggacaatattccttcggatcttcaagggagttctttgaatgatatattggcttatcttctccagcaaaagaaggatggaaaactaagctccctagcaaaggatttaggcttccaacttttatctgatgatattgatgtcaggttagccaatacacaacaatcacattcagaagttcagtcaaatcaatttccaacagaaacttctcataaaggccatacagatattgtgatgctggatggagatactattagatctgctggagagcttgaggaaaatcccaaatctactgagctatcttctc

SEQ ID NO: 35777 - DNA, 281 bp, Glycine max
  Clone ID: PAT_MRT3847_13230C.1
acctaccgttcagatcaatatgcaaaatattctatcatgtctctggagaaaatgtacaaaccgaaggtttttgtggaaccagaactaaggatacctttggaactggttgaacttaatggttataaatcttccaaggtcaaaacaacccttggttcaaaagatgaagaaatggtgccagaagattaaactgctacttctatttaaaaagatgggatttaaagaaaggataaggcttctggttaaggggtaacatgggttgtgaaaacacaatttatttgttc

SEQ ID NO: 35778 - DNA, 119 bp, Glycine max
  Clone ID: PAT_MRT3847_132310C.1
ctgcaccagctctctgagcatgcagatcaatgcatggctgtggataacgaacctctgggtgacatggggttgcgagcgcttaacctaaccactccaagctttgtggatctgcaccatgt

SEQ ID NO: 35779 - DNA, 1241 bp, Glycine max
  Clone ID: PAT_MRT3847_132311C.1
gcatgcctgcagattgcagaaggacaccacaataattaaaccaaatcgtatacaggcattatgaaactatgacacttcaatcactattaactgcatttcaactttaggaaatgcattattgtgtctctaatttagcttacagtagaggtgattaagttaacgattcctacaagatcttcatcttgaatatagaagccatagctattaataaagaagtaactccacagataacagattttacttgtaaaagatgtatccacaaattccttaaatgctgaaatcatgataaagttagcactcatgttacagctagagcagaagtcctcctcctctcctccatcccccccctcccaacaaaaaaccctctacctgcatataagctcaaccttgaaatgatgctgccaaatctaagcatgatgatgttaacaatatatggaaacaaaacagatttcataaagtcttggacataagcataaaataaaacatacattttcaagtctcaatgtaccgcacaagcaagctacagcccatacagataatgcatttgcctcttccaccagaagagcaatgtgtgcctgagattaacaaacaacaatgaagtactgtatttaccataaacatgtgactatcaaacaaaatgcttcctagaatactgaaatttcaaatctaaagagaaatggaagcaaacttatccactaaaaatttattatgacaacatacatcagctaatcccagaccagtacttgacgttttcaaatcaactgttgaaccagcaagacgtagaactgtctcagctgatctgtgatattccaagggatgcaagtgctccaaaggatgaaatgtaagtgatgagcccctggcagggcaacttaaacggtaaaactcgcttacaatttgtagtggtccgtggttattttccttggcccattcaagaatatcatttaagtcgtttaaatcctcttggccggagaaagatgcttcttctgtctcattatcatcaacatcactcctaaaatttcggtcttcacaaggcgagccttgaaaacagaagtaaaacaaaacttatttcttaataaaacaattaagctccagagacatgaacctgcaggaagattcagagctttcatactggcaatagcgcaggaggggcaaaatagcattaggtaaatgtttgtcttctgattgtttgttggttccaaaagcatctccatagtgatcactattttcagaatttgcagggc

SEQ ID NO: 35780 - DNA, 401 bp, Glycine max
  Clone ID: PAT_MRT3847_132312C.1
gttaatctttttgctcatgaaagtctcaaggatcaaatggctgcttttgacagggcgtattctactaaggataataagtatgcagaaattatgaaccttacacaaagtgttgctggagatcttaaacttgttactgatgggaagctgtatgagggtaagcatattgctgtatctaacattagtgcatgggaaaaacatgtagtgcaaataccactaatggcgcaggatgaaattttgtcttctaatgcaagcgattgtagaacctgaatggagagttaaaatagcacgccttaagctactgcaatgcatgtgggagctatagaaattatcatatgttgatttgcaagtaccgagtgcaacatatctggtgcaatgcttttggttgatacttattataccaa

SEQ ID NO: 35781 - DNA, 414 bp, Glycine max
  unsure (1)..(414): unsure at all n locations
  Clone ID: PAT_MRT3847_132313C.1
tagtgtttaccttactgattgtgtgaaccatgcagtttcatttgtctaataacttatatatccccattcttgtcaatcattgtttttaaacgttgagatataaatcaattcagttgaattttattttaggaactgcattttttcctttgcaaagctgcttgaaccattcatgttgtcctaatgccaaggctttcaaaagagaggaggataaagatggtcaagcaacaataattgcacagaggtccatttgtaaaggagaagaggttggtttatacttgtctacttgataccaatatctaataggccaataacttttaactaaatgattttacttagattttggtttttgatactgtccaatgattgatgatgtntatgacaccaagcttgaaaaagagacagcatatgtggaat

SEQ ID NO: 35782 - DNA, 291 bp, Glycine max
  Clone ID: PAT_MRT3847_132314C.1
agcgctcagccaacggtggctccgaatctgacggggaggagaacatcggctggagcacggtgaacctggacgaggagaagcagcagcaggatttctctgcttcctccaccaccatcctggacgaggaaccgatcgtgaatagggggctggcagctgccctgctcctgtgtcagaacaaagggctgctggagaccacagtgcagaaggtggcccgggtgaaggcccccaacaagtcgctgccctcagccgtgtactgcatcgaggataagatggccatcgatgacaagtaca

SEQ ID NO: 35783 - DNA, 410 bp, Glycine max
  Clone ID: PAT_MRT3847_132315C.1
ggaaggaaggtgccaataaaaaccttgtttccaattttttaattaacaaaatatctttcattgaaaaacaggggtttaattcccccactgatttattttcaaacactttggtcctagccgagacattttttacctcgggttctttttttttgaaaagaggtttattttaccagggcaaattttaggttatgttggttaaaaaacaaaattctgtgaagggggaacaatctcccctaataaaaaacaatggtgagaattttcaggcaagggggaatgttcaaatacctgcaaaccgccccctacttgctggtggaggggaaacttttgtttcaaacaaaaatttggggtaggggtttaacattccgcattgggggattaaactgatcacttaaatttggcgaagggggggg

SEQ ID NO: 35784 - DNA, 487 bp, Glycine max
  Clone ID: PAT_MRT3847_132316C.1
cccacgcgtccgggcattggagtcgccatacccctgagggtgctaaacttgaagctgagtggaatgccaagtttgcagaatatgagaagaaatacagtgaggaagctgcagagctgaaggctattattactggtgaattaccagctggttgggagaaagcacttccggtgagtaaactaacaaacttccaggtttctcttaatatttattctgggctaaatctccttattagttgaatgatgtctaatccaattttattggtgcccttataatgagaaaaattctgaatggtggtgatttgtttccatgatttgttataatcattagctttcctaattacagttaaaattcatattaagtagcatgtgcattgcatcttcactcatcatccctatttttgcttcatgataaaacttgacttccatcatttatttctggattattgaatacccttctgatttgattcaactttcagacatacactcca

SEQ ID NO: 35785 - DNA, 301 bp, Glycine max
  Clone ID: PAT_MRT3847_132317C.1
gcgccacgcccacgctttcgctatcgcagcaaaacggcagtcgcggggtgtatatatattttaaaaaccctcgccacatgcgagacactgttagagagcacagggcctgatctcaccaccctaaacatccacacatcaggacgcgcccaacatgccagcccccttgagccccaaacgccaaacacgtcaacaacaccaacaaatgcaagaccaccatagcaatctaactaacacccctcattagtgcccggccttgaacgaaggcaagagcatagccaccatctcctttccaagggcccca

SEQ ID NO: 35786 - DNA, 756 bp, Glycine max
  unsure (1)..(756): unsure at all n locations
  Clone ID: PAT_MRT3847_132318C.1
ccagcgtccggattactaacattagttagttacaagttaattattagtttagttaattacaaattagttattagtttagttagttactctttaaccagttatgttatataaaatactattcatgtaatgagtgacttttactcatttgagcattattcaaaataatatcaaccaatttttccttttttcatttttctctctttgactttttcattttcttcattttctctcttcgatttgcattcattgattcatggcacataagatttatcaaagatagtaggaaacgttaaataatataaataaataaatccccctcattgtggtggccaaaattagagacggaaaggaaggagccgacccctatctcaaattacttttcttgcatttgaatttttaggccacgggggaagggtggatggcatgaaataaaatgtgtgacagtgtgctcatgcatgtgtttgtgccatgagttgagagagagacggtttttgcttaatatggcgtggcgtggcngtgtgtgtaaccattaccattttctaatctttcntacattagcttacgttaccaccncaccgatcgatacatataaaatagatataccgtacgtacctagctacctaggttcctctctctctcccttggctcctcaggactcgtctaaaggtacccaactaccccattactcttntggatccatcatgttaatttttacataatcattctggaacacttgatcaagcatttttatataac

SEQ ID NO: 35787 - DNA, 352 bp, Glycine max
  Clone ID: PAT_MRT3847_132319C.1
gctgaattacgccaaagggcaagcattcttattcactatgcacgccattgcctgatatggatacgacctatgggccaagtaaacctactttctcgggagcgtatggcgcggtgtgctctgctatcaacaagaataccaatgcaaaagctccactgaatatgattggtcatatatctgagacatgcattgatgcattgcgaactttattgcagcctaagctggttaaacatattcggcatgagaatgttattgctttgagagatgtcatgattcctattcagagaacaagttttatggatgtctacctggtctactaacttacggacactgatctttatgaaatcactaagtc

SEQ ID NO: 35788 - DNA, 242 bp, Glycine max
  Clone ID: PAT_MRT3847_13231C.1
aatacaggtgtgagacagctgcagaaaggggaacaagtgaggatgttgatctatgttgctataaacagtgtcatgaaaatgaaagtcattgtgctcgtcgtgtgctacagctttggtatcatgagcatgccattcgtacgattcattccctcatccgaatgaccaccggccttggtgctcgtattccggaggtgaaatgcactaattggcagcttgcagttgaagcgcatagcatctttgga

SEQ ID NO: 35789 - DNA, 213 bp, Glycine max
  Clone ID: PAT_MRT3847_132320C.1
tagagacaaatcatatttttcatgtaaatatttcttttcctcgtggtttttcttatccaagtgcgtccaagttcaaataggacttgcttgtaacattcttaaaattcttaatgtcttatgatcaaatagaactatccaatttttaaattattatactatatttttcatatatcactgtttttctttataattttgagttatattttacacttt

SEQ ID NO: 35790 - DNA, 289 bp, Glycine max
  Clone ID: PAT_MRT3847_132321C.1
ggtgtcaaataatcaccgcatctcagatgttttatttgcgacactgaaagcacgagcagttccgttttggtttgtttttcgccgctgcaagagagtgccctagctacctctcgagcttgtcacctacgcaactgaaaaagccatttgctttttgctctcgcttttctattgcgaaacagcgtcgcaaggagaaagaactggatgacgggcaccataaatcgaggtaagaaaatcattaagtgaaagatggggattctaagaagagtgaacgctatcgtgaccgtgatag

SEQ ID NO: 35791 - DNA, 267 bp, Glycine max
  Clone ID: PAT_MRT3847_132322C.1
ggtacccgaatccgccgggtcgggcccacgccgtaccgcgttcgctttgagggcaccgagatcaggggcgggcgcacgcctactctcggctaaagagcatgccattcgtggctgcgggtgtctacaatacagatcctactcacttgcgcaccactgctgagggtgccgagcttctctatgtgtgcggcccacgaacggaaggagctactgttgcgcagcgatcgatagtcagaggcagtacactcggctattgagcactggacttcc

SEQ ID NO: 35792 - DNA, 275 bp, Glycine max
  Clone ID: PAT_MRT3847_132323C.1
ctttaatttctcattatcatcagccatgtgcaacaatctaaggtgttcgagttactcttgcctaagccggtcctacatggcgacaacaagctcaaaaccttgggccttttttctcatcttcggtttcctgggacctttttcttcctttcaaacacacatacgaaaggcctccttttttcttggttccttttggctttctttctttcttgggggcagaaaaaaatgggtattggggagaagagtccaagcaagaggttcaatctggaccatcacca

SEQ ID NO: 35793 - DNA, 776 bp, Glycine max
  Clone ID: PAT_MRT3847_132324C.1
tgataactaaattaccacgagatgcacaaaacattgttttaaatgagttatattcacaagtggctgattctgatgatgttgtccgcaaacccacactggtttcatggctgcagtcattatcttacctttgcacaaaagctacaaatcaaaatgcagccaaccgaaaaagtgaaagtgaagataatccaactttgtctagtattgcagacccatataacagtggaagagcaactgcacggctctaagagattcagatgtctagcaattaagaaggttgtgtatgctactactacaaaggaacctgcactatatgaagttcaggtttccttaaccaaactatggagcagaaaatgagagctgattactccctgaagtagctcctgtgaagcctgattgattactcccaaaagtgaagcagaaagtaaacgctggtccaaatgcctgattgttttaaaagccaataaatatcacaaccatatctctcgtgttaagggataaaggaataaagtcctccaagattctccttaatttctaaattaaaggattaaaacaagaaattactcgcgagtattccttaataatataccttaacctcgcaaaatatcaaacttatcttacaacatttcttttcacatctatcaaagaacataattgatgtataaaatatttagaagatcattatagtgttgcgggtatgtttaagtgtgaagtttcttgtcgttcaggtctccttttccaaactatggagcagaaaatgagagctgattactccctga

SEQ ID NO: 35794 - DNA, 253 bp, Glycine max
  Clone ID: PAT_MRT3847_132325C.1
ttctcgtctaaattccacaagccaaaatcatctgcgagacaccaacaaccgcaaccacatattctttatttattggtacagcctttatttatttttttcattgttgattaacatatatttctttttagaagaatcaaaggttgagcagaacctagaatatttaaaaaaagaaattgtttgagaaatagaaggtagtggtagtggagtatgtgtgtgtgttaattatgtgtatgcatggtggaagctagagtta

SEQ ID NO: 35795 - DNA, 301 bp, Glycine max
  Clone ID: PAT_MRT3847_132326C.1
cttcatccagttgccaattcctggttctcgaagttaggtaagcccgacactatgtgctgtgacctactttcgcttgttgcgattcggcgatgggggctgaaaagctctcaatacccgctcttaagcgtgagcagcttcatgaatccttgagttgtctatattttgcacaacgaatttttgaactgcgacttcttgcagacctcaataaccacgctgaatgtatgaaaaaatgcagcactgtaaaggggacatgaccacaatgatatctggggagttagaaggtgcttcagaatatattatg

SEQ ID NO: 35796 - DNA, 216 bp, Glycine max
  Clone ID: PAT_MRT3847_132327C.1
attattgatgaggtccttggaacttgtcaaatttttgattaaagtgtacttggcaaatcaaaggttcagtgttgttaatgaatatacatctggccaaacaaaaaacataattcttaatgggggaactaatcagctcataaatggatcaaaacgaaaattgcataatgcaatcatgagtgtcaggagagcctattaataattcaactatggtttgct

SEQ ID NO: 35797 - DNA, 502 bp, Glycine max
  Clone ID: PAT_MRT3847_132328C.1
ttgaatattgattctagcaagcagagcttttagtcaattttctattgaccttctcggtggaggaattttagtggacaatactggagattggatcacacttatacaaaattctccaattactaacttgttgagagttgctgcttggaagaaaggttggtcaatggtcaagattgtgatgtctgggaatgcagcactcaagaggagtgattgggcctcattggtacaagggcttctaacgaacagcaacagctcagaacattttgatgcatgtcagtggacatgatcagaaccacattcctgggagttaatcttgccaacagaagtctgtgggcctaataatggtcttcaaatgtggaggtctgattgggcaaatccacttcatggtattggagtttccttattgtcaataccaaagagtttaaagtgtttgatacttctcgggaatttcttaagaatttggaatttgctggaaaaacttttatatcaagcttttcttttccaa

SEQ ID NO: 35798 - DNA, 402 bp, Glycine max
  unsure (1)..(402): unsure at all n locations
  Clone ID: PAT_MRT3847_132329C.1
cggacgcgtgggctcgtgcacggaaaatccagcgtttcttgtctcagccattccaggtggctgaggtctttactggtcatttggggaagctggtacccctcaaggagaccatcaaaggattccagcagattttggcaggtgaatatgaccatctcccagaacaggccttctatatggtgggacccattgaagaagctgtggcaaaagctgataagttggctgaagagcactcatgagggggtccttttggcaaattaagcactcatcctccatggtgtccctctcctcgcccctaatccggaaatcgcagttttctctgtaggccacgtgagggccttgattgaagacattgtgttctgtctgaagaatatttaaggtttccaatannatgtatatccctca

SEQ ID NO: 35799 - DNA, 700 bp, Glycine max
  unsure (1)..(700): unsure at all n locations
  Clone ID: PAT_MRT3847_13232C.1
gtaataatgcaacccgatggcanagcccacaaaagtttggccaggcccaagaacttgaagcccagaccagaatcagttgagaacaccaaaacgaggtacatgaggagtagcaaaaggtagagaacgtaagcgagagtttgaagaacctgcagggaaagatacgtggaccgcgaagtagagtagaaaaacctgagaggttcaaggccagtgacgaaggaagaaagacagagaatggtgaagtagatggcgaggtaggcttggatgaagattaagagcttttggagtgagaaataggctttgattttgttgaagaggagtgagactaaaagcaaagggatcaaagcgaatgcgcaagagagtaaagtggtgatggtgggtgcgtacttgttgccaacgtagggtttgaaccctctcgtgatctctttgttggcttttgttatgtaggcttttgaggttgtggagattcgttccaggtcggggattagtgtttgttggaacttcattggtagatctttgaactccgaaaccaaatcatcgtccacctcgtcttcgaacacccaactaggttgcccttgttgttgtttcttgttgttgttgttagtcttcttactctgcttgtcggattcggtttgatccaaaaacttggttactttattggtaacttccttgtccttgttggtggcggtggcttttgtcgttt

SEQ ID NO: 35800 - DNA, 654 bp, Glycine max
  Clone ID: PAT_MRT3847_132330C.1
ccacgcgtccgattgacctgtccacagcctacaagagtgtgatgcgcgtaatacccaaactttcaccaaaatagttccaaattctgatggctcctcgcattgcaaaggtagggggaaggttattgtacgcggcctcccccttgcatatgcaaagagactgcttctggattcgaacccatgaccgaccagtcacaattggcaactttagggttgcgctagggctcgccctcacaccagatggaagaagtttgtctgaatagtgagccactttttgatgaacgcaatgaggttgatgttgaggggaactcttctatcgcagaacatgatcttgaatctttaaactcacaaacgaataactctccacttccaactgtgggtctggagtttgattcctttgatgaagtttacaacttctacaatatctatgcaaaggaataaggctttggtatcagagtgagcaattcatggtttagatcggaaaaaaaaagagtgctatagagcaaaacttagctgcagtagtgctggttttaagaaaaaaagtgaagccaataatccaagaccaaaaacaagaacttggttgtcctgcaatgatagtgattagaatgggttgagtccaagagatggagaatagtgggaagtttgagcttcaacacg

SEQ ID NO: 35801 - DNA, 669 bp, Glycine max
  unsure (1)..(669): unsure at all n locations
  Clone ID: PAT_MRT3847_132331C.1
ccggaataaccggtcgacccacgcgtccgcccatttttcgccaaatagatggaagaagccttgtctgntagtgagccctttttgatgaaagtgatgaggttgatgttgaggggaactcttctgtagcagaacatgatcttgaatctttaaactcacaaccgaataactctccacttccaactgtgtgtctggagtttgattcttttgatgaaggttacaacttctacaatatctatgcaaaggaacaaggctttggtatcagagtgagcaattcatggtttagattgaagaaaaaagagcgctatagagcaaaacttagctgcagtagtgctggttttaagaaaaaaagtgaagccaataacccgagaccagaaacaagaactggttgtcctgcaatgatagtgattagaatggttgagtccaacagatggagaatagtggaggttgagcttcaacacaaccatcaagtgagtccacagagcaaacggttttacaagtcacacaagaaaatgatcgttgaagccagcaaatcacaaccaccgtcagagcctgtgacggaagtacacaccattaagttgtgtcggaccactgtgatgggtggtgattacaatgggtactgcggttttggggggcggggcgggcgcgggtttgtgggggtgggggtgttgg

SEQ ID NO: 35802 - DNA, 1796 bp, Glycine max
  Clone ID: PAT_MRT3847_132332C.1
atacatacgtaactctagttatcctacctaattgatttctggctcccataagccaccttcaaccttgtgatacctccgatagtaataacgcagcgttcatccacaaaatgtcctcgaaacgacgacgtagtggaacagaacgcggccaccaccaccaccacgtcgtcgaccactataagatacagagcagacccgttcctggtagcgtgcagatgcttcagcttcccttacctctctcgccgccattctctgcatcgccgaccatgtcttttcggccgtccgttccttcaaatacgcgtttgacattttcgacgtcatattccggtgctacgccgttcctattgaaatttcctcctgggaattgggagtaatagaggcaacagatttgaaatcgtcaatcgatgtggttctgaataaatacacagagagaaatttcagtaggatattcaatttcagcatcatcgttgagagtatcttccttctgagagtattacttgggccttttcggtctgttcttctttgatgcatccttgttttgagaaaattttgtgaggccgtctctgaatgctccaagatttaccccatttctaaccaaaatgcttgtcactccaagttctgaggcccctgggatgttattattatcatcgtcaaagaagagcatagagttataggggaccccagtctttgaatgaattctctgaaaatgctcagttttgtccttccaggtgtaaaatatttcctcggcagcaaacattgacctgatgctgagtttgtcaagatacgttgttgcgatgtcgggagttggcgacttggaagcaatggcaacatcaatcctctcctgtttgagtgcatgcaatatccctcttgaatgtggaaacagagaaggcgtgtcgtgcttcgaccggcactcacagtagaaaggccagagagtgtaatcgagatcgaaaacgacgagccttgggagcagtgaaaatactcccattatttgcagtgcctcggccttcacccgttctacgtcctccattgttatctctccaactggatgatgggttaatggtcgtgtcatattcttagttggtcttcgtgtccgcgggttcgttttctctgttttggttggacacggttttctctatgtgtgttcaagcgcttcggtcccggtccttcccgtcggtttttgtggtctgacccgagatccgaatggagtttcatcataaagttttcgaaggttttggagtattgggctgccaggggtatgctgcagatctttgttgcagtcatgacaagggggtttcctggctatattggggaccggggggaccttttttttctacagagcagggcaagttatttgctacttgcctgtggtgtggttaatgttgtttcagggtatacctttgcattggttttcttaaacgtgcccgccagaagcaagagattacaagagagcaagcccccaaggatctagaggagttggaacgccgcagagaggaacttgaacaactactccttgctgagagagtttaaaacattttgaacgtagtgctgaaattaatctgtagtgaaggtaagtctactgcaagcctatgaatctctgtttatgttagtaatgcttacagaattgctagttcattctttgtatattgggttatgttcttagatgtaggccattaaaggttggctattcggcctgtctctgtaaatatataaaataatgtttaaaattgtctcagattttatagaggcttggatccaattataaatgacgatatttaattaaatcttcagtttgtaagagc

SEQ ID NO: 35803 - DNA, 670 bp, Glycine max
  Clone ID: PAT_MRT3847_132333C.1
ccttgtgttacctccgatagtaataaccagcgttcatccacaaaatgtctcgaaacgacgacgtagtggaacagaacgcggccaccaccaccaccacgtcgtcgaccactataagaaacagagcagacccgttcctggtagcgtgcagatgcttcagcttcctcacctctctcgccgccattctctgcatcgccgtcaatgtcctctccgccgtccgttccttcaaacacgcatctgacattttcgacggcatattccggtgctacgccgttcttatagcggctttcgtggtcctcgccgagaccgaatggagtttcatcataaagttctcgaaggttttggagtattgggctgccaggggtatgctgcagatctttgctgcagtcatgacaagggcatttcctggctatattggggaccggagggacctttttcttctacagagcatagcaagttatttgctacttgcctgtggtgttgtttatgttgtttcaggtatcctttgcattggttttcttaaacgtgcccgccagaagcaagagattacaagagagcaagccaccaaggatctagaggagttggaacgccgcagagaggaacttgaacaactacttcttgctgagagagtttaaaacattttgaacgtagtgctgaaattaatctgtagtga

SEQ ID NO: 35804 - DNA, 274 bp, Glycine max
  Clone ID: PAT_MRT3847_132334C.1
ggggggttgtgtgtttttgcttatccaaatggactttattctttacattgagataccacaagtttaccctccagggtcccaaacagattaatttattggcagaaaacatcgaaaagaaaattttgaaatttttaaacaattattttaatggggaagaaaaagggggaaggcgctctcaaggggggttggtgttaaaggcaccttttcaggtttcaggggagaaggagtttactctaaagggggagaggattgggccccacaaaaaggtttgaga

SEQ ID NO: 35805 - DNA, 257 bp, Glycine max
  unsure (1)..(257): unsure at all n locations
  Clone ID: PAT_MRT3847_132335C.1
cgtaagnctcggnaattcggcttcgagtgtatagatcggaaattgcctccgcaaaggagatttcgggatgctttatgcgaatttgtgctaatgcaactacagttggctcctgtatttctcacaatttctcttgtaacagaatactcactatctatggaaggacattcgtttatggatgtgcaaagaacacaagcactgcgacaagctcttgtggatataatgctcaacttgctgatgactatacggtctattcttac

SEQ ID NO: 35806 - DNA, 278 bp, Glycine max
  Clone ID: PAT_MRT3847_132336C.1
atatccttgaaagcgtgctgggtgtggtgtggcacgtgacgtctacacagacaaagtaaaaacccagttgctctcgactcactaccactaccgctatcacccaattccccccttcggtcttcaagctatggcgacctcgttcggaggaccaggcaccaccttagcgccggttaagggcaccaagcttcagatcccaagcttccattggttcagctttggttccggctttggtttttttcgcgcaggccctttccctttcttttacacgcgctttttct

SEQ ID NO: 35807 - DNA, 377 bp, Glycine max
  Clone ID: PAT_MRT3847_132337C.1
cccggcggcccacaggcttcctttttttcggaagaagaaattttttcaggggaaaaaaaaagggggaaaaagggaaaatccccttggggcaagggcataattccccccatccttttcctacaaaaaaaactaaggggtttccaacaggcaagggaaaacaggggaagcccccatttggggtggaaccctttttacaaaaaacctcacctgagaacacaataaatttggacaaaatccttaagcaaaatagcacccaggcataccaataaaagggggaccccttggtttttccccttcctgacccttttaaggggggttcccatgggggggtaagcagcaacatccggaaaggtctggtttttaacaggttaatcaaa

SEQ ID NO: 35808 - DNA, 286 bp, Glycine max
  unsure (1)..(286): unsure at all n locations
  Clone ID: PAT_MRT3847_132338C.1
ttcttctctttcgcgtgcgtcaccctgtagcnngtagcccatggcttttnncagagttggagagagccgggagggaggggaatatgcctnncttctggcatagggttgttgcatgagacatatgcgtatagcacccgttcctggatatctgcagaggaaggaaaagttcaatcgctttatgtgatttttaataattgacgaagaaataagaaaagagggttgttggttgaaaaaaacctggtaaggccctgcttgatgagccctatgatgtatgttcaccctgcat

SEQ ID NO: 35809 - DNA, 288 bp, Glycine max
  Clone ID: PAT_MRT3847_132339C.1
ggatgtagcgatctcttatagcgctgaaaatcgcgtgagaggagtaaatcgactaatcatacattaataacaggttctgtatgcattactgacagacaatatagatctaaccccattattgaacatcgtagtgagagttaggacttcacatatagagaatatactactcatgctgttctcactgattgttgagctctacctgcaaaaggacctagtccagattaagatgctgatgaagaatgtctaatcgcacatgtcaagtttttgacaaactgatattgactgtat

SEQ ID NO: 35810 - DNA, 474 bp, Glycine max
  Clone ID: PAT_MRT3847_13233C.1
aaaaaaaaggggggccattttccttttaaaacccatttcctttgttaaaaaatttttaagacaggcgggactttaacccaaattttaaaaaactatgaagggggaaaaatccaacccattggccttccaaaaagcaggccagccccaattaaacttattcttaaagaaaaggcaacagcatagggggaaaaaccacatttgaaaggggctttcctttccccttgggggaaaaggaaaattttcggcttccttttccgggagctttaacctttataagacacccagggaaaaccccctgaaaaaaaagaaaaaatgggccgacccttgctttaaaacggaaggcaaaaagttcccagctgaaaaaattgaaccctttgtttaaaggcaaaaagttggaaaccctgttaaaaaagaaaagaaaaaatatccttttttttggggaaggcttttttggcgggttcctcggcttccctg

SEQ ID NO: 35811 - DNA, 922 bp, Glycine max
  Clone ID: PAT_MRT3847_132340C.1
gtgagttaaaacacattataagaagcttaatttatcagtgacgaagcaaaactaattaagaaactaactcaaacgagaagaatggaggataataacttgtatctctccctccttctcctcttcgtttctatagtgaccctctccctcttcgtcctcttctacaagcacaggtctgcatttgcggccccgaacctgccaccgggagccaccggttacccggtgatcggggagagcctggagttcctgtccacaggatggaagggtcatccggagaagttcatcttcgaccggatgatcaggtactcctcccagctgttcaagacctccatcctgggggaaccggcggtaatattctgtggggccacctgcaacaagttcttattttcgaacgagaacaagcttgttgcagcgtggtggcccaacagcgtcaacaaggtgttccccaccacgcttcttagcaactccaaacaagagtccaaaaagatgaggaagttgctccctcagttccttaagcccgaggctctccaacgctacgttggaatcatggacaccattgctcgaaaccacttcgcttccctttgggacaacaagacggaactcaccgtctatcccttggccaagaggtacacgttcttgttggcttgtcgtttgtttatgagcattgaggatgtgatcacgtagcaaaatttgagaacccttttcacctgttggcgtctggaatcatatcagtgcctattgatcttcctggaacgccgttcaacaaagcaatcaaggcagcaaacgcaatcaggaaggaactgttaaagatcattagacagaggaaggttgatttagctgaaggaaaagcttcaccaacacaagacattttatctcacatgttgttaacatgcaatgagaatggacaattcatgaatgaattgga

SEQ ID NO: 35812 - DNA, 262 bp, Glycine max
  Clone ID: PAT_MRT3847_132341C.1
aaaaccccgccgacccacacgtccggctatacaacatacatactaacgtacgctcacatccaacttaatatctcttcaatcccgtcacttataaaaaatacactcccccccccctaacaacacattcacttgaaaaaccctgtccttacccaacataatcaccatgcagcacatacaacttacgacaactatcaatataacaaatagaccaacacccatcacccttccaaacatatcctcatcccaaatgaccaatgaaaca

SEQ ID NO: 35813 - DNA, 453 bp, Glycine max
  Clone ID: PAT_MRT3847_132342C.1
ggcaaaaaaccccatgggaaagagggggaagcccctgcaaaacttcaaaacggcaaaaacaaggccaacggcaacccatcaaaaaccccaccgccccccaaaaaaaccttggaataaaaaccccgggccgccaaagaaggccccaaaaaaaagggagggaaaatgggggcccctccgggaaaggtaccctttcagggccctttaaaggaacggggggggggaaaaaaaaaccaggggggggcgggaaacccccttttaaaaatttttgcacccagttctctgccccgcttaacaccccccagggggggcattccctcaacgggatcccggggggggtaaaaatcaaccacgtttccaaaaacaacaggcccctaaaaaatgggccggagggtgaaaacctcccggaaaaaaaaacccccgggctctatgggaaaccccccgggaccaaagggg

SEQ ID NO: 35814 - DNA, 240 bp, Glycine max
  Clone ID: PAT_MRT3847_132343C.1
aagaaattactgaaaaaagatggaagaaaatcaagaatataaaggcactggctgcagagaagaaggcaggcggccagaaaacttctgaagcccgtcaaggagatggaaaagaatccatggcccaggctccacccaggtagtgaaaccagaattgaccaggaaagtggagcgtccagccaaggcggttgaacccaccatactggtgatcaagttccccctagaaacatcactaccatctgt

SEQ ID NO: 35815 - DNA, 498 bp, Glycine max
  Clone ID: PAT_MRT3847_132344C.1
ggctcggggttctagatcgcgtgtttccgctcgattatattcataatattttctttgtgtaacatcatttacatgtaaaaaaataggaggcaatccttttggatcttctcagagtcgtcagtcatcatcgagccaggctagccactcccatccgcactgttcagaaaatatacagtgaggctgactcagaaaatataccctttggggacaccattttcactcgatctagtgcgggaaatcgcccattcctactgatagaaccactatataaagttaatggtgaagataaaactaagccttcaacacgttcaactcgtgcaagtgaggaaaaagatttcaagattgatgaaaccatggcatctgacaccaaagaagatgagaactttgcagcaacattaacctcctcacctgatgtaaattccaaggataaatccaagtcactgtctgaagcccagccaaaaaaggaaaatgcagtagatgcaggaaagggacctacag

SEQ ID NO: 35816 - DNA, 536 bp, Glycine max
  Clone ID: PAT_MRT3847_132345C.1
ccggtccggaattcctcgggtcgacccacgcgtccgggtgcacacaaacaagagtttattgagagagagagagagagagaagaagagggtggtgttggtgagtgaatggtttttctttttctttttcttctatcttttttttctcttgttgattattattagatcatcttcgattctgtattgagcatcccttgagatttgccataactcactctcccaaatcatgccgctatctttgatggtcacagccgtttcagaataatatataattaataaaaaaaattatatgttgttttgattgttgatgttatgatatgatgtgtttattgtatattggcggcctttttgcttttgcttcattctcaaacccacccacccccccaaaccgcttcttagccatatagccttatagccatccccatcaaaaatcacatcaccaaaggttctctctctttttttaccatccttccttcttccaacccccttcttttccttctcttaaaccttaattcctccggcctttttttttccttttt

SEQ ID NO: 35817 - DNA, 292 bp, Glycine max
  Clone ID: PAT_MRT3847_132346C.1
tttgttttttttttcttttttttttttttttttttggtgttaacgggaagggagtaattttattggcaagctgctcacaaaaaatcattcaaagaaatgtccggcttcccttttgcctgacatgatttttacaaatcattttttctcaaccttttataatataatggccgtggaaagaacatttattttgttttaactgctgcctacacactgaacttttttgcagtatgttaaattgactctcaccaatttgggactggtcattggttcttcttgatgaaagcacaaaggc

SEQ ID NO: 35818 - DNA, 621 bp, Glycine max
  Clone ID: PAT_MRT3847_132347C.1
ttccttttttttttttttttttttttttttttttttttttttttttttttttttttttttttttttttttgggcaggcaaagctggaaggaagaacaatatactaaaaaagcaaaggggccccaaaaaaagggggttttaaaaacaaaaaaattttttggaaaaacattttcccctcattgcttggctaaggaaaaaagggaaaaaatccccaaaggggggaaaaaaaaggggggggggaaggaaactcccttcccctaaaaaaagccccatccaaaacacaaattggcggtaaaaaaacaaactttacaaagaaacaattttgacaaggggaaaaaaagggcaatcaaaaagttcaaaatcactgggcagccaatttttttttggccatccatttccgggggggggattccaaggcccccagcatcattttattaaggtcataaacccaagggggaaagggggccccaatttcatcaaggttaaactttaccccaaaaaaaagggccttttttggggaggacacaaaaaaacagctacttgccaaattttaaaaattaagggaggttccaaaaactgaccccgagttctttgggaattaaattataaaaactccttcccc

SEQ ID NO: 35819 - DNA, 437 bp, Glycine max
  Clone ID: PAT_MRT3847_132348C.1
ccctcgcagtccgcacgcacatagccattatcatgatcactcacaagacaattgacaaaaacaaacgcttcaacctttttgggggagagagagttatccattgttttcgtctcattttcttttctctctcattcagttctcgatctgtgtctctatttatttatcatttcagtgaagtggggtgtttggttttgtcatttgggagtttgaaagttgcgagatttttgtttgatttggcttgatggcgtgaaaattcatctgggattgtcagattctctctgatctgtctgttttcagaggaaactggcagataagtttggttctctgagataaagaataatggagtggtttgagaaggggggcagtcttccaaattgatcttcttagctctcagagagtgtttaaaagcgatgagtgtggctagaactactactacc

SEQ ID NO: 35820 - DNA, 170 bp, Glycine max
  Clone ID: PAT_MRT3847_132349C.1
ggctcgaggatatctgcacactcgaagggtcagggaacagggagctatgccttgaaatggtcgatgggccagtccctatatgtgtcgtggggcttgaacgattttcactctgctggaaactacgtgcttcgcgtgcgcttcctccgttgtgcgcaccaggaaatataact

SEQ ID NO: 35821 - DNA, 1784 bp, Glycine max
  Clone ID: PAT_MRT3847_13234C.1
ttttagtcatcacctcaatttatttttatggaacgaatttgaatgctggtagacacaaaagccaaaagccttacggcatttaatttcgctacaacagaacaagattggtatatgttgctttggataatctgaaattttaaataagaaaattaaaccgaaaatgtaggcatagctaatagctaattactagtttgactaatttcaatttttcttgccctcttctccaccttcttccaagtaggtcttcttctttctatcagctctagcaatgacacaaatgaggaaaaaacacgtggcataaatggcgtgaatcttccaattggtcttgggcggttgcttcaacacaaccctgtgaaacacagtcacgtagtaatgcaaccccacggaaaagcccacaaaagtttgggccaggcccaagaatttggagcccaatccagaatcagttgagaacaccaaaacgagatacatgagtagcagcaaaaggtagagaacgtaagcgagagtttggaggacctgcaggcaaagataggtggagcgcgaagcagagtagaaaaacctgagaggttcaaggccagtgacgaaggaagaaagacaaagaatggagaagtagatagcgaggtaggcttggatgaagattaagagcttttggagtgagaaataggctttgattttgttgaagaggagtgaggccaaaagcaaagggatcaaagcgaatgcgcaagagagtaaagtggtgatggtgggtgcgtacttgttgccaacgtagggtttgaaccctctcgtgatctctttgttggcttttgttatgtaggcttttgaggttgtggagattcgttccaggtctgggatcagtgtttgttggaacttcatgggtagatctttgaactccgaaaccaaatcatcgtccacctcgtcttcgaacacccaactaggttgtccttgttgttctttcttcttcttgttgttggtggtgttactcttcttattactctgcttgtcggattcttcggtttgatccaacttggtctttttattggtaacttccttgtccttggtggcggtggcttttgtcgttttgttcttgccgccactagtaccacttgttttcgcgagatccaataatgaggatgatttcgtggagcctttggatgtggaattcagcttcttggactttaaggtggtggagttgagcttcttcacgacaacctcggtgtcggtgagggtggtggctttggttttggctagcttggtttggtttttggaggaactaaggttattggatttgatggttttggtttggtttttggaggagaggctagtggtgggtttgattaacttggtttggtttttggtggatttctttttcaggggttgttcaaattcttccttttcagaatccaactccaacaacaacattcttcttctgcttctgctgctgccatcactagacaaggctttgctctctggttgatgaggttctgagcaaacagaaacaaaaaagaacaaaagaagagagaacaggagcacccttctgcaaccaaggtacaagagtggagccatttggttcctccaagatgcttcagcttcaatcaaaattaagaccaagatatgtaatactaataatagagattgggtctgagcctaacccgcaaagttatgaatccatggaaaagagagagcgagtgtgtggaatgtcatagggctgaagctagtgaaatggttttatagtttggatttggaccataactattaacccctaatactagtttatggggcccttaatt

SEQ ID NO: 35822 - DNA, 243 bp, Glycine max
  Clone ID: PAT_MRT3847_132350C.1
gcgcccacgcgttcggtcccaagtgaagtccattctttgtcttttcttcccccctttttccccgagttcggcacccccacactgcattcctgtgtcaaaaccctagattttcaaatctagggttttgttttcttaacttggtacgggtattgttatgggtctggttcaggaactgaacttccacccttgctaatttcacttttctcttctcaatcttagcctttggtttttctacatttttcc

SEQ ID NO: 35823 - DNA, 335 bp, Glycine max
  Clone ID: PAT_MRT3847_132351C.1
aaacaaaacttggatttatccttgcccaagggtttttgaacacaaaacagtgttcaagcccaaagggcttaaactgactttgaagcaaagccaaaagtcaatgggataaaaaacccctttttcaagtccaaattaaagttcataagcttgttttgaaaaaaatcaactgtttttagggcaacaagagccttgtaaatttttttgcccgatgaaactgaacctaataacccttcctttttaaaagttttaggggttgttttattataacccgtctttggaaataaccccctccccaaaattttccccattggggttggcccaaaaaaaatgaagcc

SEQ ID NO: 35824 - DNA, 201 bp, Glycine max
  Clone ID: PAT_MRT3847_132352C.1
gcccgcatacaaagagatttattaaaatgcactttttgttcaaatggtattaattgaacaacaaatggtccatgcgccctaacaatggtttaacataatagggaaagaactcctaattaaaatcaattacttgttggaaaaccggactcattttcgtaaggtcattttgacaacccttaagaaaactactgtggttcaaat

SEQ ID NO: 35825 - DNA, 384 bp, Glycine max
  unsure (1)..(384): unsure at all n locations
  Clone ID: PAT_MRT3847_132353C.1
caaacacagacacaacacaacacagngtnatggngttacaaccacangccggcggcacgcgaggggaccgagaagaggggaccagacacaacacaacanggccaaaangacaannncacccgcgcggaccncaacacccaccaccccgagaaacaccgcaacaacccacacgncccacacnccccacacagcccaccccaccaagcncaaacgcaaaccganggacagaccanccccgagacgcgccaaccacccccacacagcacgcgcccacacgcgccgcggccccgccacccccgcaggcacacacaccggccaacgggaggaaaagggcaccgacaagcaacngggcaacnccccacacggcggcggcgaccccaaaaa

SEQ ID NO: 35826 - DNA, 192 bp, Glycine max
  Clone ID: PAT_MRT3847_132354C.1
ttaagtccactgacaactctcaaaaataggttcctttctactgcttggaggacctatcttcatagcggctatacttcctatccctgctaacgctgcacccaattaataccaaaattctcacaaaaaagatggcaatcatgctccaaatggaatatatgataccacatcgggttaccctacttgggctcctcc

SEQ ID NO: 35827 - DNA, 400 bp, Glycine max
  unsure (1)..(400): unsure at all n locations
  Clone ID: PAT_MRT3847_132355C.1
cttgaaccggacctggcgggtggcggcnacggaaaagaaaaagatggcctcgggacaaattgcaattaaacttattttttaaaaggacctaacggtaaaaaatggccggtggtctggagtaaacaaaaaaattttctgttaaaaaaaccaaacagggtggttctaagaaaagaccacccttgccttttgaaacttcaagggtattttagccaaacccttcttggccttggaagtaattccaggcttattgggggtaaaaaactggttccccaggattaacggacacggttttttggtggccttcctggtcaaaagccccgggccaaacagttttaatggttcaaataaaaggttggtcctgggtggcccttgaaaccaacaacccgccagaggttttttc

SEQ ID NO: 35828 - DNA, 275 bp, Glycine max
  unsure (1)..(275): unsure at all n locations
  Clone ID: PAT_MRT3847_132356C.1
aatgaacatgattccaatgagctattcgcaagtcatccagttacttgatgtcgtgttgtaagttattgaaattgtttnggcagaccatgcagcctngttctatttttctttccaggttgattccaactnngtcaaaattcactggttgaggtagaattacaaaaagggaattcttaaaaaatatatttagttaggaataatgaactacttaactggttaacattgtnctgacttctgagttgttaatatgcatccaattactgacttgattagca

SEQ ID NO: 35829 - DNA, 356 bp, Glycine max
  unsure (1)..(356): unsure at all n locations
  Clone ID: PAT_MRT3847_132357C.1
gcgacccacgcgtccgcttctttttgcagagtgagagtcataaacacatgcagcaagccgcagntgctgggtacaaatactcataactgatgtgagagaagaagcttgtcctttcttctgcatagctctctttctttggatggggcttctgttcttgatccttcttgatgccttcttcagaggaaacccttcttcttcttgttgggggttgaatttttttttcacggggacctggggggaggaccaatgttacccgctctatgatgcgggcacctggcccttggtggggcgcgagttgaggggccgggggaatgggcgggctggtgtgttttgcacccgctgtgggtgggggcccg

SEQ ID NO: 35830 - DNA, 1414 bp, Glycine max
  Clone ID: PAT_MRT3847_132358C.1
aattcggctcgaggagcaacatcagaacagttgcagcattcaatgctcagaacaagatgttatcagtgttctgccacgagcttcgtgtgcctcagagccagagcctgcgccggagccagacatccggcttcttgtttggcctctctcagcttgccctctatgcctccgaggctctcattctatggtatggtgcacatttggtcagcaaaggtgtttcaaccttctccaaagtcatcaaggtgtttgtggtcttagtgatcacagcaaattcggtggccgaaaccgtgagccttgcaccggagattatccgtggtggcgaagctgttggttcagtgttctcaatccttgatcgctcaaccagaattgaccctgatgatcctgatgctgatccagttgaatcgcttcgcggggagattgagctcagacatgttgattttgcgtacccttctaggcctgatgtgatggtgttcaaggatttgaaccttaggatccgtgcaggccagagtcaagcccttgtgggggcaagtggttcggggaagagttctgttattgcattgattgagagattctatgaccctattgctggaaaagtgatggttgatggaaaggacattaggaagttgaacttgaagtctttgaggctcaagatcgggttggtgcagcaagagccagcactttttgcagcaagcatttttgagaacattgcatatgggaaagaaggtgcaactgaggctgaggtgattgaggccgcacgtgctgccaacgtgcacgggtttgtgagtggtttgcccgagggttacaagacaccggttggcgagagaggtgtgcaactctctggagggcaaaagcaaaggattgccattgcaagagccgtgcttaaggaccccacaattcttctactagatgaggccacaagtgcacttgatgctgagtccgagtgtgtgctacaagaggccttggagaggctaatgaggggtcgcaccacggtgctcgtggctcatcgtttgtcaaccattagaggggttgattgcattggtgtggttcaagatgggcgcattgtggagcaaggtagccattctgaacttgtcagcaggcatgagggggcatattctagactcttgcagctacaacatcatcacatatgagaatatgagagaaagagattattgtttttttttgtatttgataaatatgaccttgtgggggtgataattatgtttgggtcccattaacctcatgctttggtttttctttttttctttcttttagatgtagatatgtgggatatgaggtttgtagcttgagttcaaagtgatctatttccaatggggtatcaattattatatttaatcacatgccaatggtgcataagcctgtcatctaaaaaaaaaaaaaaaaactcggactagttctc

SEQ ID NO: 35831 - DNA, 273 bp, Glycine max
  Clone ID: PAT_MRT3847_132359C.1
ccacgcgtccggcaaggtagccattctgaacttgtcagcaggcctgagggggcatattctagactcttgcagctacaacatcatcacatatgagagggattattgttttttttttatttatttatttgatgaatatgaccttgtgggggtgataaattatgtttgggtcctattaacctcatgctttggtttagatgtagatatgtgggatatgaggtttgtatcttgaggacaaagtgatctatttccaatggggtatcaattattatattt

SEQ ID NO: 35832 - DNA, 275 bp, Glycine max
  Clone ID: PAT_MRT3847_13235C.1
ggctcgagggatgatgtgtgggggaagcttgagttgacttaagttggtgttccttttggtgagaacaagagaggctgcatatgccagttgttggtcacatctagagatcttaatgtgttgaatactaactttgaggtggataaggcttataggcttgaggttctgtctgaggatgagagttgggagttgtctgaaaagaggggaggggatttattgttttatacaagaacccaaccgctgtgagactttgttattccctgttcaaccagattcct

SEQ ID NO: 35833 - DNA, 379 bp, Glycine max
  Clone ID: PAT_MRT3847_132360C.1
taaagactcagtttgaggatccctctcatatgtaatcaccgttttcacgtggctttgcttcgatctataactatgatcataatgaatgtcattcactcaaaacttgtttatcatgttttattttccgcttcccctgactgattcctttttcttttcaatttttttgctttacccttttttttatcgtgggtatccaacaagtgaacttgttcattgggttacttgtgattccatgatctgggaaaagaaaaaaaaaaaaaaaaagggtttttggtttctgtatgggatagggcattttggaatttgattcattttgatggggatgatcaacctttggtggtggcgattacttcaactttgatcgggaaaatctttcctt

SEQ ID NO: 35834 - DNA, 383 bp, Glycine max
  Clone ID: PAT_MRT3847_132361C.1
ctgcttccctatgatatacctcactgatctaaatctgatgagcgggctcttgaaaactgcaggttggagattagctgcacatcaaccagcttttcatgctccatacatggctggacctatcaataaaatagacagatccttcatttatccactcccaatattttattcataccacactgaaacatcttattaagagcatgcttgcgaaaaacccacaacatttgccaaccgcatctgaatagactaggcatccgcataaacaaccttatgttctacgctgatataatgcatcatctaatgctctaactatatataccctagttaatccaaaggatacagcatgaagacctaataaatctattggtggcatggaccatacggac

SEQ ID NO: 35835 - DNA, 477 bp, Glycine max
  Clone ID: PAT_MRT3847_132362C.1
gccgccctttttttttttttttttttttttaagaggaacaaagttctatgtccttccaaatatttgagaataaaagttccgcaaaaaagggttgctaacaaaagtggaagaaaacatatgactgattcttttaccttcttggcctacggatacaaaaaatctccagctatgacagagcagaatgtacagaggttacataatatttgactatgctaatttcaatgtattaattatttatggactttcttctgtctgtgagtgataaatttcatttctatcaaacggttgacttcttttgggaacaccagctaagttgtagaattcattcaatgtttttctaatttgcactttcttctttttatcaacagggcgaggtcctaaaagacctaattcaatggttgcattattaggctgagaggattggacaactgcggggtaagcttttcaagagaaggtaaggccctccgttttagctct

SEQ ID NO: 35836 - DNA, 413 bp, Glycine max
  Clone ID: PAT_MRT3847_132363C.1
agttctcatccataaatttccattgaagtccgaaaacagaaaccaaaaatactggaggaggaaatttaaaaaaggaaaaacaaatgggaatgtagtttaagtacaaacaaacaaaggggggtggcggatacaaatgctgagcaaattttacacacttaaaagcctgggggcttgtaggcgatgaaggtgatgcacggtacttggggaacgttgtcgaatccgatgaaacagataaagccgttggggtatgcagacttagcctcttgaagctccttcaacacctgggaagcatcagtgcaaccaagcttaggcagcttttcacatggtaccagtagctgtccatcagtagcatacctggcgcacctggtggggctcacgaggacacagaaacctgtgctcccaactttgaatta

SEQ ID NO: 35837 - DNA, 920 bp, Glycine max
  Clone ID: PAT_MRT3847_132364C.1
ccacgcgtccggtttctttctttctcgcgacaggctagaacttggtttccttctaatgcgaacctctcttcttctccgctcccacaattgtcttcaaggcagccacgatgtcttgtccctcactccatcttccatcagatcacaaagaaaccctaacccaaaccctagccccaacccttaccagactcgccggcggaagctccacgacggcgaccgctccggcatggtggtgaaaggcccctgcgcgaaccttgtcatgggccaagtcaagatcctcaagagaggcgagacgctcagccccgagaacccccgccgcgccaattctttcgacgacgacgacggtggtttcgattttgtattgggatccacgaaccggttgggccccgatccgagctccgttccggtccctgggttcctcgcgttgaggcggtgatgatgaattggttgattgattatgctgttggatttcggtgttgatcgcacgcacgtgagagtcacgtgaggaggagcggctgttgagatctttcttgatcgtttaatttgatagcacggtctcgacgagcgaatgattttgatttgtttgggtgcgagcgaatgaagaaacctacgaaagcgaaaggggaaagcagcttgtgtggatcagggttcaacttttggtcccctgagggagggtttaggtccctgttgaagacaagaatatgatatcgaattgtgtattcctatagtattcttttagaataccccgttaccacttcaatttagtatttgaatttttttttaaaaaaaacaaaaccaaaaacaaaaacgtgtgcgagtgtttgtgggtgctgtgttgggtttcgtttcttggatgtgttttgccattttgatatactggtgtagttctgaaacttaatgcaataaatttttgtctttttttt

SEQ ID NO: 35838 - DNA, 590 bp, Glycine max
  Clone ID: PAT_MRT3847_132365C.1
tgattcgtgactatgctcacctaattccaactggccatgcttttgatgcaaacaaacagttacattcacatgaagtttacatatcagtttaattaagaatatataatctctgacttctctacttaatctcactcaaccctcttccaaaattgcgaaagagaactttaatttgtcaaacattttacatggagagttcggctatcaagaatgccacaactacaagggtgagtttactttgtgtaaacgctcttaatttctaagtggtcaaagaactgcacgagcctcaaataaaaaggttatctctgacagacactatttgtttgtagtcattttttcctttttgtttggtggcttatttcttccatcaaacacaccaccacaaatgcattcagaacttaataagatataactactcgtggaaggacaatcatgttgctcaaaagaaaagggttggacaaagtcaaaaagtttgaaattaattaggaaactataaatctttgtcaaagatgtcaggcttttcagggcattcttggagcctcgctacaaatgaatattattattagaggagcacctaattcccatagaggctc

SEQ ID NO: 35839 - DNA, 157 bp, Glycine max
  Clone ID: PAT_MRT3847_132366C.1
gcataaagcgggttactgtctgttcatgctaccatctctctctctcttacttagtgcgtccttgccagaagttacaatggcccaagcaacttgcctagtcacatctgaatcagtggacgaggggcacctggcaagctctgggagcagatctccgatg

SEQ ID NO: 35840 - DNA, 350 bp, Glycine max
  Clone ID: PAT_MRT3847_132367C.1
agtgagaagcagatgcccctaacctgcatgggggtgataatcatagaccctctacattatccagaagaaagcacctaccctcatacataagagatctatgccctcgatgggaggttctcccatacttcacaccatagagcaagactcacttagggactggccattgggatcaccacctatcctccgtatggagcccctacttcaacccagcatgcttggataaactaggccccagcactgtcctggcatggcatagatcctgagcgcaatcaccactctaaacaacagagctcccctcattccagagcctatcatcatagcaataaatccacctaggcagagcctgccac

SEQ ID NO: 35841 - DNA, 413 bp, Glycine max
  Clone ID: PAT_MRT3847_132368C.1
cccacgcgtccgctcaaacctcttcgttccttcgattcattccatttcttccaaaatggccaaagacccagttcgcgttctcgtcactggagccgcagggcaaattggatatgctcttgtccctatgattgctaggggagtgatgctgggtcctgaccagcccgtgatcctccacatgcttgacattcctccagcagcagagtcgttgaatggggttaaaatggaattggtggaaggatgtgatgactaagaacgtctccatttacaagtcccaggcttctgcccttgaaaagcatgctgctgccaactgcaaggttcttgttgttgctaacccagcaaacaccaatgcattgatcttgaaagaatttgctccatctattcccgagaaaaacatttcttggttgactagattg

SEQ ID NO: 35842 - DNA, 418 bp, Glycine max
  Clone ID: PAT_MRT3847_132369C.1
ctaaaggcgcaattaactagcataaaatcggggaacccaggacaataaaaaaaacttcaccctttaaaattcaaatcccaaaaacaaaatccttttggttccattacaatggaagcaaatataacaagaagcctaaaaggcacccttttacaacaatacccaaaaagcagttgctaccccgggggaaaccctaaaaataaacccccgaaaccggaaagagcccggccctgcctttggagagcaaaaacaacatccataggggaaacggtcttttttttagcgggctcggggaaggaaacagcgccgcaaaaaacgttctcgaggaaaatctggaggaccccacgggtctcctcgaaaatgaaaccacggattttttaaacaccaccttggggagccaaacgccgaatggggggttggg

SEQ ID NO: 35843 - DNA, 885 bp, Glycine max
  Clone ID: PAT_MRT3847_13236C.1
agctcggaattcggctcgagtagtcctttaaccaaaaagtcccacagcagcacaagaagaagaaagaagggcaaaaaaaatgcaaaaggtagagcagtaaatagcagcaaatcaaagatttataagaaaggagactccctggcattaaagtggttccattctttgaaagaagcaatttatgatttatgccgtgcatttagacagccaatgatttggagacctatgtcttggtttttccttgcccacgttacgattccgaatctttcaaccgtcatcttctactacgaaaccgaggttttaaagctagaagcatctttccttgggacttcacgggttgttggttggttgggacttatgctgggcaccttcatttataatcgtcacctaaagtatatgaccctacgaaaaatcctcatgtgtgcccatattggtttggccttcttgaatcttctgcagattgctgtagtgtcaaggaaaaatattgcctttggcatctcagacaagattatggtcctttttggctcggctcttgctgatggaatcaatcaattcaagtttatgcctttcctgatcttgtctgggcaactatgtcctccaggaattgaagggactttatttgcacttttcatgtcaataaacaacttgggatccacactggggtcttttgtgggtgctggcttggcatccatattgaacattgattcaggatcatttgacaatcttctcttgggcatcattgttcatgccttgtgcaatttcatcccaattgcttttctgtttctgataccaaaggaagccacaggttcttcaacataaattatgactaccacagggattcgctttgcttcattaggtttttctaggcttaccacagttgaaatttta

SEQ ID NO: 35844 - DNA, 2266 bp, Glycine max
  Clone ID: PAT_MRT3847_132370C.1
cccttaatcagcatgcctctgttctccttagctatcttttcctcaaacccttccggcaaccactttccggaagaagaagaagaatctccttcttctccgtctttgtttttgcgatgcaccacccaaagaaaacaatgccctgacccttcgagtccggtagcaatctggtaaagctgctcgtcggagatgagagaaaggcttccgaaacaaatgtagagaaccgaagattctttctttgagtcaagccacgtgagacaatcgtgtctactctcatcaacagtactacttttcaccgtcttttgcaccatgagggagcttggcccaacatgccacaccttgcgccctgtaagtttctggtagtgttgagtgtactcggcgtcgagatcggcgaagctgtttacgatgacgccgtgacctcttcttcgtctcaaacctcttcgttccttcgattcattccatttcttccaaaatggccaaagacccagttcgcgttctcgtcactggagccgcagggcaaattggatatgctcttgtccctatgattgctaggggagtgatgctgggtcctgaccagcccgtgatcctccacatgcttgacattcctccagcagcagagtcgttgaatggggttaaaatggaattggtggatgctgcattccctcttcttaaaggtgttgttgctacaaccgatgtggttgaggcatgcactggggtcaatattgcagtgatggttggtggattccctagaaaagaaggtatggagaggaaggatgtgatgactaagaacgtctccatttacaagtcccaggcttctgcccttgaaaagcatgctgctgccaactgcaaggttcttgttgttgctaacccagcaaacaccaatgcattgatcttgaaagaatttgctccatctattcccgagaaaaacatttcttgtttgactagattggaccacaatagggcactgggccaaatttctgagagactgaacattcaggtttctgatgtaaagaatgtcattatctggggcaatcactcatcaacccaatatcctgatgttaaccatgcaactgttggggagaagcccgtccgcgagcttatagctgatgatgcctggttgaatggtgaattcattactactgttcaacaacgtggtgctgcaattatcaaagctagaaagctttcaagtgcactatcagctgctagtgctgcttgtgaccatattagagattgggttcttggaactcctcagggcacctgggtgtcaatgggagtatattctgatggttcctacaatgttccagctggactgatctattcattccctgtcacttgtgccaatggggaatggacaatagttcaaggacttcccattgatgagttctcaaggaagaagttggacttgaccgcagaagagctttctgaggagaaggcattggcttactcatgcctaaattagagaccatcgctccttcttggctactgtccttgttagtaggttcccatggtttgcccacagaagtgtagcttcaattttgaataatgctccttctaagataccaaggaactatcactcgagagagtttgtctttcattggaattacttgtatttcaacatctaatccttttaggaggatagtatatttgagctttacagttttagtcatggaattagaccatgggccgcatattgaattttggatcagtcctctaattttatgtgttagtgccccttttttatggctagaactttttgctgtgtttgtggtggctgtacaagatttcttgatgtatgtgggatgcacaagcgtgcaaactcatacgtagagtattatgcactgctattacgcaataaggtcatcatggattatttttagcttctcgacctttagatcatccagctgatatgtatgattatcatgtttatacaaatgcgaatgacatgttttctagagctaatgcatttgatcatacatctcgaaatggtccaaaggcttttgtaagtgagtatgctgtgactggaaaagatgctgggacaggaagcctcttggcagccctagctgaagctgggttccttattggactggaaaagaacagtgatgttatccaaatggccagctatgctccactttttgttaatgccaatgataggaggtggaacccagatgcaattgtattcaactcctttcagctctatggaactcctagctattgggtgcaagtatttttctcagagtcgagtggagcaacacttctaagtacatcactt

SEQ ID NO: 35845 - DNA, 600 bp, Glycine max
  Clone ID: PAT_MRT3847_132371C.1
tcaattgtatgcttagtgccaactgttgagataaggaacattggcagcaatcaatgagtgcatgtctcccatttggaccaaaaatgattattttttgctggtacttaatcttagtaccacctgttcgcatttttgaatctgggatgatgtttagcttaacattaatagatagaacaaacttggagccataggaaatgtgatatttgttctttgcagatttatcataatgcatcttccaatgcgatttggagaggtcatgaaaggttgatctttgaccctgcaattaataattcaagttttatagcctgaattggcatcatggcaaatatccttggaagttgactccaaaggtggcaaccacgatgtcttacatctgtagttctgtttctcctgccgaaatgacacaagtacaaattttggtttctggggatttgtatatatcttggagtttataaggggtcgttcaattttgtttataacagcctgtaatttgtgtaatcggtagatgatatgatatcattgtaatcgatgtgaaaagttatgaaagctcgattgtatcattttttccatttattttcaatgttgcctgaaattttaacc

SEQ ID NO: 35846 - DNA, 1832 bp, Glycine max
  unsure (1)..(1832): unsure at all n locations
  Clone ID: PAT_MRT3847_132372C.1
tttttacgcgtccgcccacgcgtccgcactctttgactcttcttcgtctcaaatctcttcgttccttcgattcgttccatttcttccaaaatggccaaagacccagttcgcgttctcgtcactggagctgcagggcaaattgggtatgctcttgtccctatgattgctaggggagtgatgttgggtcctgaccagcccgtgatcctccacatgcttgacattcctccggcagcagagtcattgaatggggttaaaatggaattggtggatgctgcattccctcttcttaaaggtgttgttgccacaactgatgtggttgaggcatgcactggggtcaatattgccgtgatggttggtggattcccaagaaaagaaggtatggagaggaaggatgtgatgactaagaacgtctccatttacaagtcccaggcttctgcccttgaaaagcatgctgctgccaactgcaaggttcttgttgttgctaacccagcaaacaccaatgcattgatcttgaaggaatttgctccatctattcccgagaagaacatttcttgtttgactagattggatcacaacagggcattgggccaaatctctgaaagactgaccgttcaggtttctgatgtaaagaatgtcattatctggggcaatcactcatcaacccagtatcctgatgttaatcatgcaactgttgcaacctcagctggggagaagcccgtccgtgagcttatagctgatgatgcctggttgaatggggaattcattactactgttcaacaacgtggcgctgcaattatcaaagctagaaagctttcaagtgcactatcagctgctagtgctgcttgtgaccatattagagactgggttcttggaactcctcagggcacttgggtatcaatgggagtatattctgatggttcctacaatgttccagctggacttatatattcattccccgtcacttgtgccaatggggaatgggcaatagttcaaggactttccattgatgagttctcaaggaagaagttggacttgactgcagaagagctttctgaggagaaggcattggcttactcatgcctaaattagacaccattgctttttgtctactgtccttgttagtaggttcccatgttttgcctatagaagtgtagcttcaattttgaataatgctccttctaagatacaaaggaactatcactggagaagagtctgtttttcattggaattacttgtatttcaacatctaatccttttaggaggaggatatttgagcccatgggccgcatattgaattttggattagtcctaattttatgtgcgttagtgcccccggttgaactttttggtgtgtttgtggtggctgtacaagatttttgatgtatgtgggatgcacaaagcgtgcaaacatatacttctaggccttgtggtcgagtattatgcactagtattacgcaataaggtcatcatggatatgctttttaactctagcttgcactctctcaaactcggcttatgagaaatgttggcaacattctctactaaaactatcgtctacatattttttcccattgcttgaaatttgagacttggaaatattaaagtctcattcgcaaaaataggtaaacagaatgattttagcatttttcaaaggagttacgaacaaagtagcgtgaaatttgtctcatgttaagctctcattcctgatttagtgaggcttacatgagtatcaatcaatataaaaaaaaaaaagaagagagaatgatagtgtgtttatcgttactgctnnnaaaaaaaaaataataaataaaataaataaataaaatttgggg

SEQ ID NO: 35847 - DNA, 404 bp, Glycine max
  Clone ID: PAT_MRT3847_132373C.1
gacaggttattttgctgccaaatatcgtggctccttatttactatacgaaaggcatgattgtgcctttatcacaattgtctataaggcacactagccagttctttcctctatgtccttcgaggagtcctctcacacagtgcatcctcctgaggttgccacatggtcgcttctccatctgctccggctactgctggcgcgtcatagcgccatagacttcgcatggctgaattcgggcaatgatcgggctgaagttctgattcacttagtaaaccgtctagtgagccctgagactgacctgaataaatatcatgccatcaacctttatgcgcacctcccagcatactttgatgagtatcactacatggactaaacagccattgctactaatgatgccgttgcgaca

SEQ ID NO: 35848 - DNA, 786 bp, Glycine max
  unsure (1)..(786): unsure at all n locations
  Clone ID: PAT_MRT3847_132374C.1
acaagcacggaaacgcgtccgtgccctttttgtgtaatgtaggaagcaactccgttcttcagcctctcaaacgcaacttcattatccaattgccttcgcaaaatgtcggggaagcgaaagaggaagttgaaattgttaagcgatgcaatcacagataatagaagaaaaacagttgctgaggtgaaaactgaaaatttggagctgcaatcctgggctgatctccctgctgaactcttagaatcgatcttgtcccgattgattctagtggataacatccgggcttcttctgtttgcaagagatggcattctgttgccagtgatgtacgtgtagtaaaccaatcaccatggcttatgtattttccaaaattcggtgactgttatgaattctatgaccctgtgcagcataagacactcaccttcgagttgccagagttgaatggatctagagtttgttatacaaaagatggttggttattgctataccggcccagaactcaccgagtattcttctttaatccctttactcgggagctgatcaaactgccaagatttgagatgacataccagattgtggccttctcttgtgctccaacatcacctggctgtgttctgtttactgttaagcatgttagtcctactgttgtagctattagcacttgttatccntgggcaacagaatggaccactgttaattaccaaaaccgcttgccctttgtcagtagcatttggaataaagctgtgtttttgtatgggctattttattgtctgagcctcacaggttggctt

SEQ ID NO: 35849 - DNA, 390 bp, Glycine max
  Clone ID: PAT_MRT3847_132375C.1
ggctcgagatgcaatctaaactgtaacatgtcacaccttgtgcctcgaagatagaacctagtacgtggagccaggagccagccttgcactgagatatgctcaccgccctacgcatcaacgtggtatgggtgcgggaagctcgtgtattgccatctgtgacacagacgcacctatccagtggacgaatcatctgaagacttatcggatcggggccgataacaatctagcgggcgcttgaggtttatgacctcttggggggtcccgtatagagaggcaaactcctttgctgattcatgagaagggtatggaggtggccaataagagacccggcagagtatcaatgggtggacccgcgatctctgagaacatgaccacactgactgagctagc

SEQ ID NO: 35850 - DNA, 534 bp, Glycine max
  unsure (1)..(534): unsure at all n locations
  Clone ID: PAT_MRT3847_132376C.1
aaatcaaaacccaaattctcaggttattgaaaatcgaaatcctaggtaaaaacacatccaccgcaaaatatgaaaaaggaagaacccaggggaactacatctcatcgtgttttttttattaacgtaatatccttttttgtggggggtaaagggtttttgcgaggcgattgtgtttttttgtgctgtggtagaatgagggtgaatccgggcaattaggttttgtgattaattcattgattaatcaaatacagacgggggaataatgggattatcaagtggaggaaacggagcaaaacggtctgaaacaggaaactctaaagtgggtcattcgttggtagcaaagggggacagggaaaaacgacatgcagtttaatcttatgcattatgctgggcacggtaagctactgcgnnntaatnattttcacttatcccggccacaacctgatcgaccccttacacaacgntacaccaaaacccccacccttgacaaaggcttttccaatctctacaccatggaggcggatcctactgatg

SEQ ID NO: 35851 - DNA, 1792 bp, Glycine max
  Clone ID: PAT_MRT3847_132377C.1
acccagtcttgccatttccttttctcaccacaaggcgctgtccaccagcacctgagctctttcttcttatcatctccgccgtccttctcttcccccaccgccgatcccgctgccggcgcttccgcctaccgcctgggacgctcggactccccttagttggcgaaaccttacagctcatatcagcttataaaagtgacaacccggaacccttcatggaccagcgcgtgaaacgctacggtccaatcttcaccacccacgtgttcggcgaacccaccgtgttctcggccgacccggaaacgaaccggttcattttgttgaacgaagggaaattgttcgaatgtagctatcccggttcgatatcgaacctcctcgggaaacactctctgctcctcatgaagggctctctccacaagagaatgcactccctcaccatgagcttcgccaactcctccatcatcaaggaccatttattggtcgacatagaccgcctcatccggctcaacttggattcctggtccgaccgggttcttctcatggaagaagccaagaagataacgtttgagttgacagtgaagcagctgatgagctttgatccaggtgaatggactgagacactaaggaaagagtacgtgcttgtgattgaaggatttttctcagttcccttgcctctcttctcaagtacctaccgtagagccatcaaggctaggacgaaggtggcagaggcattaacactggtagtgagggatagaagaaaagaaagcgtaacggaggagaaaaagaatgacatgctaggggcattgttggcctccggctaccacttttccgacgaggaaatagtcgattttatgttggctttgctcgtcgccggctatgaaaccacctctacaataatgactcttgccatcaagttcctcaccgagactcccttagcactggcacaactcaaggaagagcatgatcaaatcagagccaagaagagttgcccagaggcaccactggagtggacagattataagtcaatggcatttactcaatgtgttgtgaatgagactttaagggtggcaaacataattggtgcgatatttaggagagcaatgacagacatcaacataaaaggttacactattccaaagggatggagggtcgttgcttcatttcgtgcggtacatctaaaccctgaccatttcaaagatgcccgcaccttcaatccatggagatggcagagtaactcagaagcaagtagccctgggaatgtatataccccatttggaggagggccacgtctgtgtcctgggtatgagcttgccagagtggtgctctctgtcttccttcatcgcattgtcacccgttatagttggtttcctgcagaagaagataagttggtgttttttccaacgactaggacgcagaagaggtatcctatcatagtgaagcgtagagaggagtccaaactaagtaaatcgccatgagagacaccacacaaagaagaggaagaagagattgtagatgattttaatcattgtaatgtctaatgtattaagcaataatgaagtttcatccactagtttagccgtttatattttatttattttagggggttataggaaggaatgtcttattagtagaccttaggaagggatgggaaatgaggatgtgaaagatcaaacccctcatcaccctaataaaacagttgagctaaatccacctgtgtatatgatcttaattaattcctacaaatcctttcacgtatatcataataaatcaatggcgtaagtatcctgttatgttggcc

SEQ ID NO: 35852 - DNA, 367 bp, Glycine max
  Clone ID: PAT_MRT3847_132378C.1
caatatgacggtccttgttttcttctttgctccatttttggtagcatggccatgccatgcatacaatatgctccctctccgagtgaacactggctctggtgcctgtactgcggaggagaaatgcacaagatggaggcttgctgagaaagcacgctccatatccggctatgccaccatcgctgaccagagcttcataccagcgaaggaatacgtccatggccaacattatggagcagactccaaaacagttcaccatcaagcttacttttatgccagagacctcgaagtccataccaaggacacctttgtgttccatctgaatagcaccgttctctatactattatatactgcaataatcatcgatat

SEQ ID NO: 35853 - DNA, 315 bp, Glycine max
  Clone ID: PAT_MRT3847_132379C.1
cgccacagtgaataggagttttcatttctttctctggggttggttgcaactctgcttgggtgtgaatgctctctgaaattttagtgggagtgctcattaagagcatacatgacatgcttttcattttgaagtaactgcccaaaaaatggttttttacacttacatgcttgatttgcctattgcaaaacaaaggcagcaacatggggtttgcataattaatatccatgccacatgacagagtctggaaaataaagtatcttttttaaaacaatttgacccattttttggggacagttgctttccaattttttgtat

SEQ ID NO: 35854 - DNA, 680 bp, Glycine max
  Clone ID: PAT_MRT3847_13237C.1
gcacgagagtccttggatatgagaattaggaagaaagatgcgtctccgacggcggtggcgttgcggacggcagcattggctgggagggaagatgagagggctgagtatattctgaaacagtccatggagaaccctcaagaactcactctgttgtagattgattagtttatttattgcaaggttttgaaatacggtccgcaattgcatgtttcggccacaatgttaatgtttttgaggtgtctgtgcctcattggtcacatttgtccgcaatttcttgcaatatcgagaaatgtgacgaaactgcaactgcaatttaaaaccttgatttattgacttggatatgattggtttgcattgagttgagggggtggtcggaaattaagggctttctcatcttctggtgaggacgttgtgaacttacctgtagaatcattcttagcatgtttttagagaagttgaattcgtttcttttcttgctagtgtagctctaatttgtgtatggattttttaacataaagctcttctgtccgcggctcattgtaatttagacacccaattcaattgaatcaatatactgaatttcctgtgctgtgatcttcattatgctgcaaaaaaaaaaaaaaaaaaaaatcagggtttaaaatggggggggcagtttaatcattttttcccgaacccgg

SEQ ID NO: 35855 - DNA, 271 bp, Glycine max
  Clone ID: PAT_MRT3847_132380C.1
actcgagccgaatcggctcgagtacggctgcgagaagacgacagaacggagcatcatcaacaatggctctacgccttttaaaatattcactttcaaatggatctgagggacagagaacaactcaaacaattgtttctttttctttgttgtgtatacgttggttatgttacaatattcccttggcccctaattgaaatgttcttgggtttaaaaagtgagagagaaaagaaaagtcaattattttgttggggattatgtcattatacttgac

SEQ ID NO: 35856 - DNA, 394 bp, Glycine max
  Clone ID: PAT_MRT3847_132381C.1
ccacgcgtccgctccgagtcccagtttttctcggtgtgcccaaacacgccctttgtctgaagctcctttcagctgagatctaccctctctttctctcatggcttttgcttttgcactgaacaagaactggtaaggttcacttcgatcatagttcagatcatgctcaagtttcgttcttgaatctgtctttcatgttttcgtggtttgatggtacgagaaaaaaaaaagatgttttcagtttaattgtgttgttgttctgtgtgattgttctttttcacttttttgttggtactgctttttttttttttttttttttgagatgatgatcgtaattgcagtaatgtaaattttgggttggtgtttattttttaataataaataaagtatttttagt

SEQ ID NO: 35857 - DNA, 467 bp, Glycine max
  Clone ID: PAT_MRT3847_132382C.1
ataaatgctacaaccaactttttacatactgtctaagcactaatgccgttgctgagccgtcctcgatatcaacaaatatgctttggttcacggttcaccatatttacgaatcttgagatggcttactcttacgccacaataatcactaattactggagccgcaggatctatcgcatcgcatacggcgaaacagataatacataattatgcggagtgcactattgtggaacgtgacaatgctagattactggacaagatctgaaaatgatcattccttgactatcagatcctaacttgaaaggagtgaaggggagatgttgcatgtgctgaccatggaaactaccttctgatcgatgactacactgacgcttttgagcaccttgatactcagaccgccgtcgacaactgcgtgcacgactacgtcgaattctactacaacaacaatgctggtactcatgtactatcag

SEQ ID NO: 35858 - DNA, 403 bp, Glycine max
  Clone ID: PAT_MRT3847_132383C.1
gtaattaagttgaattaattagtaaatattggtgatatatattatgggttagattttagttttaattacgatggtggggatggatgttgagttggttgtatgggtttgagtagtcaagtaagtcgtcatggtcaaggtcatgcaacaaatagttgcttctactttttcatggtatcggtctcaccatgattttgtggggtagaattgattcttatgtattatccaaacatgctagttgcgcttttacatttgggatgtacattagggttagtagttagaggttatttaggaatggatgttgtgttcatatgcttggggtattaaagaattgtttagccatttactatgtttatcaattgtccaatttggttgtggccatcataactgatttcaatctccttct

SEQ ID NO: 35859 - DNA, 251 bp, Glycine max
  Clone ID: PAT_MRT3847_132384C.1
accacgcgtccggtggaatacccaataccccaaatcactcttacagcaacagacaatgacagtgaacaatatctggtgacatttccacggactaattcccttactcagcttttggtaatggattacttgggtccaatatcagatacattatctgatgccacatacaattcaccctttgattttcacattaacactgccaatggtgtaatacacacgttcgtagaagcagagccggttgaaatcccttaagg

SEQ ID NO: 35860 - DNA, 195 bp, Glycine max
  Clone ID: PAT_MRT3847_132385C.1
ccatgcattcgctcacgcttttgctttttcttttttttctgtttttttttttcaccggggcgggctttttccgagctgaccgtaggctgagccaaaaaaagccggaccggatcacggacgcaactcagtcctgcgcgaaaggggtacacgttcaccatggcagacaacatacacgcctagacctttgtgcgtaaa

SEQ ID NO: 35861 - DNA, 361 bp, Glycine max
  Clone ID: PAT_MRT3847_132386C.1
agtggttattttttttgttttgttactgaaacatcatgtgaccacaacaacaacacaaaaaaaggaaagaactcgagcaaccaaaaatcgacaacacgaacaaaaccgagagtaagagaaataaaaaacaaatagaaagaaccagaaacaaaaccaaaacaacaaacaacaaaaacataaaccagcactacagaaaactgaagaacagggaccagaaatacagaaaacacaaagggaaacaagagaaggaaaagccaaacatagcagcagggaacacgccaccgaagacatacactggggaggcaggacaccaagacgacacccgcgaacgaaaattcgaaagagggaatggaaaacaccg

SEQ ID NO: 35862 - DNA, 339 bp, Glycine max
  Clone ID: PAT_MRT3847_132387C.1
tttggggttttttttttttttttttttttgggtcagggttgtccccttctgtcgtgttctcgcagccgaacccttctgtcgtgttctcgcagccatacccttctgtcgtgttctcgcagcgtacccttctgtcgtgttctcgcagccgaacccttctgtcgtgttgtcgcagccgaacccttctgtcgtgttctcgcagccgaacccttctgtcgtgttctcgcagccgaacccttctgtcgtgttgtcgcatccgaacccttctgtcgtgttgtcgcagccgaacccttctgtcgtgttctcgcagccgaacccttctgtcgtgttctcgcagccgaa

SEQ ID NO: 35863 - DNA, 361 bp, Glycine max
  Clone ID: PAT_MRT3847_132388C.1
ccattttatatagcagctcaactcactggtgccatttctgcttcatacacgagtgcgagagctgttacgaccatcaaatgagattggaggaacatcacctgctggatcacacattcaagccctaatcatggaaatggtgaccacatataccatggtgttcatttccatggccgtggccactgactcaaacgcggtaagaatcacagtaatttaattgaaattttaagaaaaatttaactaaagtaataaagacctgctaaggaagtttagctcaattgaacagtattcatgataaccccaaactgttggaaaatttcctgatacttgatattaattaatagccttcaatttttttaaattt

SEQ ID NO: 35864 - DNA, 489 bp, Glycine max
  Clone ID: PAT_MRT3847_132389C.1
atattagatggaaataacatttatgggtatttcaagtaaaatgtgtttgattaattatggaaaatcttttttatattcttgagaatatttaaatatatatttggttcacaatattttttcctagaaatatatgttatattactaaaatatcctttttatattaaagaaattattatattttataccaacaaccaattatatcatgaatcaatcttacatgacgctaaggcggtgcattccaacatacatatatatgaaattaaattcaaagttaagacacaattgaatatgctttgcacattgtacgatttttaggcgggtatcattaagctgtaataaaatctggtttattatgtactggaagtatacaatagcgtgaataatagaaatgacatgtaagtagagaagtagtgggatagtgcatggatattagtagtaagggtataattgttcttttttcgtgggaatcaaatcatacaaaaacaaaat

SEQ ID NO: 35865 - DNA, 256 bp, Glycine max
  Clone ID: PAT_MRT3847_13238C.1
gggaaggggaaaaatttattcaaggaaactgggatttatccaaaattggttttgttgtatgcaaaaccacacccagttctacatttggccttggggacattcgcccaatgttattaatttcaaccggcatagccctaccccccgtaattttgagttttaaatccttcccccattattccaaataaaattttgttattaactttcaactttgtgggggagagggccggctttacacattccctccattggaattaac

SEQ ID NO: 35866 - DNA, 403 bp, Glycine max
  Clone ID: PAT_MRT3847_132390C.1
ctagatccaaatcatgatcacgggttcgattcttttcggttttcattctctttatcttcagaaactagatctgacaaaacccaccatgtcgccctctgcagctctcactggcgttgttgaagagatcatttcgtaaagccaattgatgaaagggaatccaatccatgtttgtgtgtgtttgcttgcttgcttgggtgtcattgaaaaatacttctcattgtgaatcttgttagagattgttattgataatttttcatgcaagcaagggtagctatgaaaattactttttgaattaaggctttattaataatataccttttgtatcagattcccctctttttgtatcttgcttttctagagtcttgagactatttttaataataatataccttttaaaaaaaaa

SEQ ID NO: 35867 - DNA, 425 bp, Glycine max
  Clone ID: PAT_MRT3847_132391C.1
cgggccgaaattcccgtccgaccccccttccgcccacccttccgccaacccttccggaaggagtgaaatcaaagaaaggaaggagcctttgggggtaaaaggaccgaaggaaagagagttgccttcgggttgggaaataacaggaaccaaaggtcgttgttccaatttttgattgaatttaaccaaggccttgtttcgttgccaaaagcccaaggcctgtctttttttccggaaaaactacctcagggccctccacctttccagggagttcaaccgccaaacccgatttaccaggggggaccaggccaaactaaggcttgtttccagaaagggccaggaggaggggtttattgaccataacaattaccccctgaggttatttttcaattaaagcttttgaccatttttttttgttaaaccgattg

SEQ ID NO: 35868 - DNA, 2409 bp, Glycine max
  Clone ID: PAT_MRT3847_132392C.1
aattcggctcgagtccaggtccacttccgcttctttcccaattcaataaaccctcttctctcttttcagaactcccaattcccaaacaataagacccccaaaccctcattctctccattgccatcacaaaccctacgcttcggttatctaatccaaatccaagacgatgtcgtatcgaccttccgccaacgccaggaccgaggttcgtcggaaccgctacaaggtcgccgtggacgccgatgaaggtcgccgtcgccgagaggataccatggtggagatccgaaagagccgtagggaagagagtttgcagaagaagagacgcgagggtctccaatcgcagcagattccttcgtcacttcactctactgtaattgagaagaagttggaacaccttccagccatggttactggtgttttcaccgatgacaataacatgcagtttgaggccacaactcagtttcggaagttgctttcgattgaacgtagcccacctatcgaggaggttattcaagctggtgtagttccacgctttgttgagttcttgatgagggaagattttccacagctgcagtttgaggcagcttgggctttgacaaatatagcttctggaacatctgaaaacactaaggtgataattgatcatggtgctgtcccaaattttgtaaagctacttggttctcccagtgatgatgtctggatgttttgggcgaaataccaaatgctattaggaaatgttgctggagattcacctagatgccgtgatcttgttctcggtgatggagctttgcttcctctactggcacaattgaatgagcatgccaagctttctatgctaagaaatgctacctggacactatcgaatttctgcagggggaaaccacagcctgcttttgatcaggtaaagcctgcacttcctgctcttgccagtcttatccagtcaactgatgaagaagtattgactgacgcttgttgggcactttcatatctttctgacggtacaaatgacaaaattcaaggtgtaattgaagctggtgtttgtagccggcttgttgagcttctattgcacccttccccttcagtgcttattcctgctcttcgtaccgttggaaatattgttactggagatgatttgcagacagaggttatcatcaaccatcaagctctttcacgtcttctgaatctcttgactaataattataaaaaaagcatagagaaggaagcatgctggaccatatcaaacatcacagctgggaacaaaaagcagtttcaggatctagtttaggctagtataatagctcataaagacggtagcatgctggaccatatcaaacatcacagctgggaacaaaaagcagattcaggatgtaattgaggctagtataattgctcctttagtccatttgcttcaaaatgctgagtttgatatcaagaaagaggctgcttgggcaatctcaaatgctacttcgggtggatctcatgaacaaatcaagttcctggtaagtcaagggtgtattaagcccttgtgtgatcttctcatatgtcctgatcctaggattgtgacagtttgtttggaagggcttgaaaacatcttgaaggtaggagaagctgagaaaaatgttagcaatactgatggtgtgaatctatatgctcaaatgattgatgatgctgaggggttggagaaaattgaaaacctccagagtcatgataacactgagatttatgaaaaggcagtgaagattcttgagacatactggatggaggaagacgacgagactatgcctccaggggatgcttctcaatcagggttcaactttggtggcactcaaccacctgcggtgccttctggtggattcgactttaattagaaggagttttgactggtctatcagtaaagtcctccagtttgacagtccaacagtttggggtcaagtcaatgtcctttgattgcccttggctcctacaaggttcagccttggtaaatagggggttgctggaccagcgtgggtttttgaaatggctggttttacatacaccatggggacagatgggttgtggcttgatttcttagccacacaagagttatatatactagagtttgctttctgccaagtgatcattccgaatgatttggctttatagagttgttgtgatcattctggatgttttgacgaaataccaaatgctgctatcttttgcttcatattaatagttacaagatggaatttttctttcaccctttccttgtaagttcttttgaagtttaccgtaaagttctattcattatgttctttaggtctcgttcaggttcgtaatgtaatgtttactaatctggtttaggaaagaagtcttacactttgttctcaggcattatatttggttacagtgtgggattttctcttccacttcgtt

SEQ ID NO: 35869 - DNA, 225 bp, Glycine max
  Clone ID: PAT_MRT3847_132393C.1
attagtctcatattcattcggagatgagtggttgcaatcacaaaggtaatggatagcagaactgttgtgtgatagtccataagttacggcgttaacatatggatatcggacaacagttctgctactgagtacctttgtgagtgcaaccattattctcatattcaggcggagattatgcaaccaaacctcagaatcagaatatgcaaagcttccaccagggcctcg

SEQ ID NO: 35870 - DNA, 3392 bp, Glycine max
  Clone ID: PAT_MRT3847_132394C.1
atcacaacacatggaagtgactctgatgagcttgcaggatcaccactgtgcatgatcaccaagtggaagttgttcgttcttccgtttttggcagacaaattgagaaaaagaatacaatttcagctcttcttttggtctctgaaacgtttttttccccttcatgggtgaacacgcaattcctcaatgttttcagcatctaatggcgaaaaaattgctctttttgttgacccttttggaaattctcctttgtgggcaatccaagtttatggtgtacaacacttcccaaggcatagtccctgggaagctcaatgttcatctggtagctcacacccacgatgatgttggttggttgaagaccgttgatcagtactatgttggttccaacaattcaattcagggggcttgtgtgcaaaatgtcttggactccatggtgcatgctcttctggctgacaagaacagaaaatttatctatgttgagatggcctttttcaagcgatggtggagagatcaaagtgaagctgttcaggatgtagttaagaaactcgttagttcgggtcaactagagttcataaatggtgccatggctatgcatgatgaggcagtaacacattacatagacatgattgatcagactgcacttggacatcaatttctaaaagaggaatttggtgtgactcccagaattggttggcaaattgatcctttcggacattctgctgtgcaggcttacctgttgggagctgaagttggctttgactcatttttctttggtcggatagattaccaagatagggctaagcgcaaaaaggagaagagtcttgaggttatctggcagggtagcaagagccttggcccctctgcccagatctttgctggagcattcccagaaaattatgagccaccttcaggattttactttgaagttaatgatgcctcaccaatagttcaagataacatgcaattgtttgattacaatgtccaagatcgagtgaatgactttgttgctgctgcattattacaggcaaacataactcgaacaaatcacataatgtggacaatgggaaccgattttaagtatcaatatgcacatacatggttccgacagctggacaagcttattcattatgtaaacatggatggacgtgtcaatgctctgtactctacaccatccatatatactgatgcaaaatatgctacaaatgagtcctggccaatcaagactgatgatttttttccttatgcagatcgagcaaatggttactggacaggatactttaccagtaggccagctatcaaacgctatgtcagattaatgagtggctattatttggctgcaagacaactagaattttttagggggagagtgaattcagggccaaatacagactcattagctgatgctttagcaattgcgcaacaccatgatgcagtcactggcacagaaaagcagcatgtggccaatgattattctaagcgattgtcaataggctacaaggaggcagaggaattggtttcatcatcgctggcttgcttggttgagtcaccgttgcttactagatgtcaaaatccagttacaaagtttcaacaatgtccacttttgaacataagttactgtcctgcatcagaagttgatctggttcaaggaaagaatttggttattgtagtttacaactctctaggttggaggaggaatgaagtgattcggattccggttattgaggccaatgttagagttcatgactctaatggtatagaaatagaatctcaacttcttcctcaggctgagaaatatgtagacttaagaaattactacgtgaaggcatatctaggacaaactccacccaaggcacctaagtactggcttgcatttacagtttctgtaccgccacttggttttagcacatacactgtctcaactgccaaaaggacagggtccacaagatcatcagtagatatatataagagtagtgaaaagtctaaatttgatgttggtcaaggaaatttgaagcttacattttctatggatcaagagaagtgtaccaattatgttaatataagaaacctggtcgaggaacaggttgaactaagttacctatactattctggatacaatggaactaatcaaaaagatccacagaattctggggcctatatcttccgtccaaatggcacacatcccataaaccatgaaaaaaaggttccattgactgttttgcatggacctgtgctagatgaagtgcaccaacaaatcaatccatggatatatcagattaccagactatacaaaggaaaggagcatgttgaagtggagtttattgttggccctataccaattgaagatggaattggcaaagaagttgccactcggatttcaactactatggaaaccaacaacatgttttacacggattctaatggacgtgattttatcaaaaggatacgagactacagaacagactgggacctagaagtgaaccaacctgctgctggaaattattaccctattaatcttgggatatacacagaggataataaaacagaattctcagttttggtggatagagctattggaggatccagcttacaagatggacaaatagagctgatggttcacaggagattactacttgatgattcaagaggtgttgatgaggctctaaatgaaacagattgtgtcggtgatgattgcaggggtctaactgtccaaggtaaattttactacagaatagaccccttgggtgagggcgctaagtggcgtcgtacttttggccaggaaatatattctccacttctgttagcctttgctgaaaaggatgataaagatgactggatgaattcccgtgtattaacattttcaggaattgattcttcttatgcattacctgataatattgctattataacattacaggaacttgatgatgggacagttctgcttcggttagcacatctatatgagattgaagaagacaaagatctctctgtaattgcaactgtggagctgaaaaagctcttgcctgggaggaagatcaaggaggtgaaggagatgagtttatctgccaatcaagaaaggacagagatggagaagaaaagacttgcttggaaagtagaaggctcttctggaagtaagcaagtttcaaggggagggccagttgatccaaaagagctaaacgtggagcttgctcctatggaaattcgcacttttatccttgactttgatgatgtgtctaaccaactttttgatgcattgtagaacaaaatcatttcttctagtccttgcttctgaacaagcatattggtatatgacaagttcagctatatgataacctctcataaattacgtttcaaatagtagaatgttttgcttaatattatatcttaccttcccccaa

SEQ ID NO: 35871 - DNA, 181 bp, Glycine max
  unsure (1)..(181): unsure at all n locations
  Clone ID: PAT_MRT3847_132395C.1
tctaatagttacccgangagagnngcngcncggaagaaaggctgccnaanggccaacaccgcgacgcccgggaangcagcagncaaaaggagagacagggccccaccggnacaagnannnnnaacaaacagcaacagnacagagcannnngaagcaacgaagnggacaaaaacggaaccac

SEQ ID NO: 35872 - DNA, 1246 bp, Glycine max
  Clone ID: PAT_MRT3847_132396C.1
agggggttttggggtttgggaaatttaagggttccctttggggttaacccccaacccagggggtttatttgacggtttaagggggggttcctttttcaattaggggtgggaaatttttgggaaggggatttggttggggctttttttttttttacccaatgggtaaaaaggggttttttttcaagggatttttttttggttacccccggttttttccttttcgaagttttttaaacccgggccatttattttttttttggggcccttttaaaaaaatatttactttttttgccagggttgttaaatttggttcttttaaaagggccccccctttttttttttttttggttttttttttttttttttttttttttttttttttttttttttttttttttttttttttttttttttttttagtttttttttttagaaaaaaatgttaataaattacttagagaaccaaaatgatgcccccaaatacattacaagtggagtactccttttattgtatcttgatgaagtactcctattgtattttattttaaaattagtcaaagagaagagagggccgaagctatgaaatttagtgtataattattgtaaagttttatagcgatactgaaactcaatataaactgagatccatagccttatacctatgtacattcaacactacaattactactggttgacattgaaaacgcagtagtcatggcaataaaaagggttttcacatttctctagtagacacccttctgatactcggtctcacagaaagttcctccaagatcatcacaagcctctcctcgaaataccgttttaggatcatcgtattcaagatactctctctcaacgttctctgtaacgactcgtggagtcttagcctctggctgtagcttcgtttcagggtacatctccgccatgcaggcttcccctcctacagtttcgcatgcttctgcaggaaacactgagaacgcagagttgtagtcgacagttgaagtgtcgggctccacggttgcaaccctaatcggagagtaacgaggtgaggagcgcggggctttcaatttggtaggaaagatggtaatatgggagacactctttgtgggtgccaatggcacaacgttgggggcagcgaaggttaaggctgtttgcattttgaaagaactctttttgaggttgtattaatcttatgaggagcagtgattccaatttatagaatccctttctgtcgtcttctcgcccg

SEQ ID NO: 35873 - DNA, 441 bp, Glycine max
  Clone ID: PAT_MRT3847_132397C.1
actaggttaataattgaggaacaaactattatccgagggggcggattaaattaaccaatgttactcatcacagactccaatcactatctgaacgatccaaatgatactgatatctcagaaaggaaaggaaggattaaaggggatcggatagcaaatgatatacataacaccgtaatatccccgctacaaagcagagataggagaaaagccaccgcgacttcccgggaaaggacccattctgaggcacctactcggagatcaaggcagaggggaacctgttactatttaagagagtaacccacgggtggacacgaccacaggattggcggtcctgccggagctggatccgaccttggttatcttcttggagaagttcatccaatggacgacctggccgaacactacgtgcttttgtcgagccactccgtttttcacctgcag

SEQ ID NO: 35874 - DNA, 1847 bp, Glycine max
  Clone ID: PAT_MRT3847_132398C.1
aatgattctgaaattactttaacttatgcaatttgaagcaaagatgtaattcactggtattataagatgagtagatggcatgtggatttgaataaattcagataagtaggaaagaataaaataatgttaaagtatttatgtagtgaaaaagattgagtaggcagaggggatggcgagctaccagcaggcatcaacaatcgaggaagtgagaaccctatggattggggatttacaatactgggtggacgaagggtacctgagccactgcttcggccacacgggagaagtaatatccatcaaaatcatccgcaacaagctcacgggccagcccgagggctacggcttcgtcgagttcgtatcccacgccgcagccgagagggttctccagacctacaacggcacccaaatgcccgccactgaccagaccttcaggctcaactgggcctccttcggcattggtgagcgcaggcccgatgccgcccctgaacactccatcttcgtcggcgatctcgcccccgacgcccacgcgtccgcccacgcgtccgattgcctttccatctccccttccgttcgcggcgccaaagttgtcaccgaccccaacaccgcccgctccaagggttacggcttcgttaagttttctgatgagaatgaacggaaccgcgccatgactgaaatgaacggcgtttattgctccaccaggcccatgcgtattagtgctgctacgcccaagaaaaccaccggtgcttatggtgcacccgccgcgcctgtgcccaaacctgtgtatccggttccggcctatacttcgcctgttgttcaagttcaaccaccggactatgatgtcaataatactaccatttttgttggtaatttggatcttaatgtgtcagaggaggagctgaagcaaaactctctgcaatttggggaaattgtttctgtcaaaattcagcctggcaagggatttggttttgttcaatttgggaccagaatctgatggagaggccgatcaccactcaccagagactttcacatatattcctagatgcagctggaatatgacaatatgaagcattaagatgcagggaaagatgataggccaacaagtggtacggatttcttggggtaggactctaacagctagacagatggatccaaatcaatggagtcagagactggggaagacagatggatccaaatcaatggagtgcctactatgggtatggacagggttatgaagcctatgcttatgggcctgctcatgatccttcattgtatgcatatggtgcatatcctggctatgcacaatacccccaacaggttgaaggtgctcaagacctatcgggtatgtctgtgcctaccatggaacaaagggaggaattgtatgatccattggcaatgcccgatgttgataaattaaatgctgcatacctctcagtacatggaagtgccattttaggacggtcgctttggcaaaaaacctgttcgtcatccttacagcaagcttaagatctaattgtcctgcctggtcaattatgtgcattatatgacaatattctgcatagatttaaattcttgttaatacatacttgagttgatcccaatacattttttcttaaacacaactttgttggtgtaaagaatgtggaagcggatcctctccagcacctaccgtctccagctccctcctgcatcattgtcagccgttggatacaagtaaatgatgagtgttttaaaggttagaaagtcatacctagaaaaaaacattaagtaatgaataagttttttttttatcattaagtaatgaataaatttgatcctctcagtcggatgagaaaaaaaaagaacgaagg

SEQ ID NO: 35875 - DNA, 1212 bp, Glycine max
  Clone ID: PAT_MRT3847_132399C.1
gcgccggttgttcaagttcaaccaccggagtatgatgtcaataatactgccatttttgtcggtaatttggatcttaatgtgtcagaggaggagctgaagcaaaactttctgcaatttggggaaattgtctctgtcaaagttcagtctggcaagggatgtggttttgttcaatttgggaccagagcatctgctgaagaagccattcagaagatgcaggaaaagatgataggtcaacaagtggtccggatttcatggggtaggactctaacagctagacaggtgatatggcacccgtacatggttatagattcccccgaacaattgtgagattgtgaagatgatgtgtggtgatgtgttaatgccaaatgagggacattcagaacttttaaattggggtaatataaaataatgaaataaaaaatgatatatatttaaaaaaatgtaaatattatatattttagttgtataaaaataaacatttactagtatcttgtaaattttagttgtataaaaataaattttaggtgcacataccaaaatactagttactaatattcaagtttatatatgaatgaatttaatatctctgattagcttaacaagtagctcgtgtaaggagtaatgtatttgcgctgacaatcttggccctaaattgttctaggacttacctggtggctggggaccacagatggatccaaatcaatggagtgcctattatgggtatggacagggttatgaagcctatgcttatggggctgctcatgatccctcattttatgcatatggtgcatatgctggctatgcacaatacccccaacaggtaagctattgatgttaaattcagttagatactgtattggtttctgtgcagagaataattttattgggctactcatgcacatggattgtttatttttaggttgaaggtgctcaagacctatcgggtatgtctgtgcctaccatggaacaaagggaggaattgtatgatcccttggcaatgcctgatgttgataagttaaatgctgcatacctctcagtacatggaagtgccattttagggcggttgccctggcaaaaaacctgttcgacatccttacagcaagcttaatatctaattgtactgcctggtcaattatgtgcattatatgacaatattctgtagccataaatttagtctgcatagatttaaattattgttaatacatacttgag

SEQ ID NO: 35876 - DNA, 1275 bp, Glycine max
  Clone ID: PAT_MRT3847_13239C.1
catttttctctcagataaataatcattgcaacactgttgttcagaggaagtgactgacatttgggactccgaagtccccattaaattccaaattgaaaaccgaaggaaaactcagcgtgtgattgaaatttgaagagtgtgaagatggcgatggaagtggagcagaatcagaatcatcaattagggtttcccttctggaaaccgctccgtcgcaggttcggacccgaatctcctttcttcgctcatggcaacctcgaacgggaacttctcgccaaacagcttgctttggaattaacagaagagaaacaacagcttgagaaatggatgcaagaggaagaaggaagggaagtcttttgtcccattgtgggttgtggtgcacgcttgacctcaatggaggactttgaaaatcactataatgcaaggcatactgcatcctgttctgtgtgctccagagtttacccgacatcttggttgctcagcatacatgtatctgaagtgcatgattctttctttcaggcaaaagttgcacgtggctatgatatgtacgaatgcttggtggaaaggtgtggattgaaattcaaaagctacaatagtaggcagcagcatctggttgacaagcataaattccccacctcatttgagtttttcaagaaggctaagccttcaaagaaacataggttgaagtcccaacgcaaacaagctgtttgtaaggaggattcttcaggaatgatggaagtggaaaatgcatccatggatgaccttgtttcagcagtctctaaattgaacacttctgactccaccccttcatcaatcagttttggtcgccgccacaaaggcttgtcatttgtccctcgagctgttcagcgtggaggtggatcaaactcaacagcatctgtgacaaagaaataagcttggactcaacaaatctgcattcttaattgctgaataatcaacattcagatgcagctcccttataaaatccgtgtggacgtcttgcattctaagtttgaagaagccaattaagttgaagatggaaaattagaatcatgctggaggatgtaataacagcatttgtcagtattatctttttttgctcccacttggggctgtaagtttgcccaacacaggcaatatgagcatgcgaatatgcctggcttgtataatgtggagattttgagcttctttttctatgatattgttctgttaacatctaaaaactttactgaatagccacattgtaattagagttgaacccaatcactcttaaagcttgtc

SEQ ID NO: 35877 - DNA, 470 bp, Glycine max
  Clone ID: PAT_MRT3847_1323C.1
gtttgtttcttcagcaactattctgtgcatctatgtgttttccctctcggctttgtacatcaaggcacaaatcggactacctatgaaaatttccggtacagagctgacggaaggatcaatgtttttaaccggggctgcttaaataattttctggaaatgttttgcacaaaagtaaagccctcaaggaacaatttcagggcatttgctcgagaggaggtaccaccgagaccgcgggctccgatcattccccgggatcgtgatgacttgggcggagatcgccgccctaaggttgaagccgatcttgatattggtgaagacctattgaagatatcacagcgcaggaacattgaagaacttgacgaggacattcagggcagagggagcaatggaccacccggcaatacatctgaacctgactcaattatgtcctcagatcatcgagctcccacaattcgatccgatgctaggca

SEQ ID NO: 35878 - DNA, 434 bp, Glycine max
  Clone ID: PAT_MRT3847_132400C.1
cccacgcgtacggctattcacatttaaaaggttattgttttgttttaagactggcttttaggatcctgtttgataatcagtatgtgaagtgcatttgctctccaaaaaataatcactcttgtttgtgatatgatttctatatcctcattcattttcccctataaatattggatatcaggctggatagagtgggatggcgagaggattgagtttgataatgctccatcttattcagaaaagaactggggtggaggattcccaagaaaatggttttgggttcaatgtaatgttttttgaggagctagtgttgaaattgctcttacagcatcttgtgttttgaggtaattttttggtattacctagacctttgtatattgctttattgattagtattttataattggtgtatatttttagatatatgtgctcttatt

SEQ ID NO: 35879 - DNA, 245 bp, Glycine max
  unsure (1)..(245): unsure at all n locations
  Clone ID: PAT_MRT3847_132401C.1
gangaatccgaaattcacaagcctgccacttccaagtcttttttagacaattttcttctcaagtctcngcaatacaatanaacantgggttttcgtctacctggtatcngangggcatcatttgctgaaaaccaagcntcttcnaaagctgtggcggtgccaaagggctatcttgcngtctatgttggagagagnatgaagcggtttgtgatcccgntctcatacttgacccaatcttcattcca

SEQ ID NO: 35880 - DNA, 1753 bp, Glycine max
  Clone ID: PAT_MRT3847_132402C.1
gaaggctgcgagaagacgacagaaggggacaacaaaccaccacccaccacccaccgccgccacattcacaccacgcgccgccgcttccaatttccccggagacccaccctttgcatggcagtgagctttctggcgcgcgatgtatcggacctctgccttgggaagccgccgctgaggtcgctctccgccgccgccaccgtcgccgacgccttggccgcgctcaagagctccgaccacgagacccacgtcagcttgtggagcttctgcgagaacaagaacgaggttcgttgcgttgggaaactgtgcatggtcgatgttatttgctacctttgcagagaggacaatctcttgtctccttctaaagctctcaaagaaccactttcttcaattctccctaaggatcaatctctcgttgtgcatcttcaaccttcttctagcttgtttgaagctattgatcttatcctccaaggtgcacagaatcttgtggtgccaatattgccaacaaagaggagtggagtttcaagaaggaaacagcagcagcatcagaaggcatcatcaacaatcaacagccatagtagttgtgaattctgttggttgactcaagaggatgtgattaggttccttcttggttccattggggtcttcactccactccctgctttgtctattgactctcttggaatcattagctctgatgtgcttgccattgactactactcccctgcatcttctgcagttggagccatctcaaagtccctcgcccagcaaacttctgttgccattgtggacagtgatggcactttcattggagagatatcacccttcactctcgcttgttgcgacgagacggtcgcggccgccactgcctcctcgtccgcgggggacctgatggcctacattgattgcggaggccctcccgctgcgcgggtccgactggccaaggcgaggctgaaagagaagcctgtcgagctggtgcggcaggtctttgcaaggttgaccgcgtgcgagtgggagcaatcaacatcctacgatgaggagttgccatctaggacaccggctcaggtctggaaggttggcaaggtcatctagctactcggctcggatggtgaggaaggctgaggctatagtgtgtcatccaaagagctcccttgttgctgtgatgatccaggccattgctcatagagtgaactacttgtgggttattgaggatgattgtagcttagttggcattgtcactttttctaatatgttgaaggtgttcagagaacatttagagactatttagattattggctttggatgctgctggtgagaagcaagaacaccaaggtctatgaacatggcccttcttttgttatgagtattgcaatgtggcccgggaggtttggtttttgttgtgctttatttctgtgtgcttcccttctaataagagaactcccttcaacgcaattctttgtagaggaccaatttttcctgcctcagtttgtttgaaagaacttaaaatgttcccatgtccaatgagactgttttgtattggaacgagatttgtgcaaccattttggcttcagatttttgtggctaaggttgaaacttgaaagaacttagtttgtttcagcagtttattttgtagttattgacttctattaacaatggtgttttagaaaggtgcatatatatcatgtacaccctctagcccatagatagaggtatgagagaataaaaggaataagaatgaaaatattaattttaaggt

SEQ ID NO: 35881 - DNA, 684 bp, Glycine max
  Clone ID: PAT_MRT3847_132403C.1
ggaaccttattttcctttataaatacggctgcgagaagacgacagaaggggtccaacacaaacaccacggccgccgccgccaccgagattatcacaacgcgccgccgccaccgagattatcacaacgcgccgccgcagcattcacctccccggagatccaccctttgcatggcagtgagctttctggcgcgcgatgtatcggacctctgccttgggaagccaccgctgaggtcgctctccgctgccgccaccgtcgccgacgccttagacgcgctcaagagctccgacggcgagatccacgtcagcgtgtggagcttcgagaatgaagtgggtcgatgcgtagggaaactgtgcatggtcgatgttatttgctacctttgcagagaggacaatctcttgtctccttctaaatctctcaaagaaccactttcctcaattctccctaaggatcataatctcgttgtgcatcttcaaccttcttctagcttgttggaagctattgatcttatcctacaacatgcacagaattctctcgggaaaatattgatttctaagatgcccaaagtttcaagttgttaacagcagcacccgaaggcatcatcaacaatcaacatccacagattctctgaaacgagatttattactccttcgtaaatttatattttaagcttgacatgtcgccat

SEQ ID NO: 35882 - DNA, 418 bp, Glycine max
  Clone ID: PAT_MRT3847_132404C.1
atcagcatgaatgagtcatttattcgaacttcagggggtttctccaatcagccataaaacgaaaaaaaaaaacagtaggctacatgatctggcatctttatatctcgcatgaagtttactataaatctgctaaaaattccacgattgaaatagaaaacctacttttgaaaagtcactttctgtcagtctagggctgtggcaattggggtggtgcaactattgtcggccaatgcaatttttctatatcaataaaaaaaatgcttctaaaaattcattttgccaaactgaattttttattgatatagaaaattttgttctgcaaaatcaatgaccagtagcatcgaaatttaaatcgtaagtataacaagcctgcttaggtaacaaataaaaatctcaagtctgcctctgtcaatttccc

SEQ ID NO: 35883 - DNA, 196 bp, Glycine max
  Clone ID: PAT_MRT3847_132405C.1
atggccttcctttttgaaagcccctcacacattgtatgccttgcgttttactcagtgcacaggcatctttttcatacccgaagctgggaaattcacagacacacctgatgctcaaaaagtgcgagataatgccatctacaatctcaaacctactctctgtggaactgctggcaaaggatatgatcaagtttatctg

SEQ ID NO: 35884 - DNA, 281 bp, Glycine max
  Clone ID: PAT_MRT3847_132406C.1
actgattagcaaaattcaattgatctctcactttatgcagacttcattctcaattgatccaacttttccatacacgaataatgccatccaactagagggacagtaatcaaattcaatcactggagcctgtcgaaagtagtttaaccttaacagttctttcaacatcgtgatcctttagcatacgtatgttgtgagtggtagagaagactccgctaccgcgagcagcctaaacagatctaccagaattacacgtgaactgctcacgcttcgatgaaacatct

SEQ ID NO: 35885 - DNA, 653 bp, Glycine max
  Clone ID: PAT_MRT3847_132407C.1
ggcaagaaaaaggttattttatagcgaaatgtcagcagacaatagactcgtataagaaacccatgatcaaagtctaattttccaatgacacgtttacgtcaccatgagtgagaaagacttcaataggcttggagtcgtggttttaagagtcaatgatttcagattctacttatgccatatcgattatcaggagtaccaatatgttccacccctatgcagtaatcatcaaaagaattcaagcacttctctgtttaagtaggactgtacaaattagacatacatgacatcaaggtaatgcatgggcagatttcttagcctaaaagaatgcttctcaagtgaaacaatttctaacttggaatgatcccacttctgaagacatatccactgtactgatggcagatgttatgggtgttgcattcacccgagaatagtagttatttttttaggttcttagtcttgtttttattttattccttttgtaccaaaaataaaatacattgagctcccctagttctaatatatgtataattagtattttagtttgtattttatttaaaatgtatttttaatgtgaattgaaatctgtttttttcttcatgtgaagattatggatacacttatttttaaattattcaatatttacaattatgttg

SEQ ID NO: 35886 - DNA, 408 bp, Glycine max
  Clone ID: PAT_MRT3847_132408C.1
aattccaacccaaattcccctttgaccccctcgaacctttgcccttaataaattgcccccctgcaaagttaccaccaagaatataatttgattccctcggaattcggctcgaggtagatcctgactaccagcataaccgagggaaggaagtctataataatcatagatcatgtcaataaatgaagactgtgaaacttctctctcgtgctagttaagagagttttcatttacctaggctgaaatgtgaaaataatttgtaggttgtagcttaatttagtctcttgtggtttctcacttcagttgtagtattgtcatttgtcgtgcttcaaacagaacaacaaattgtgaaataaatgaattttgtctaaaaaaaaaaaaaaaaaaaaaaaaaaaaaaagaccaaaaggg

SEQ ID NO: 35887 - DNA, 923 bp, Glycine max
  unsure (1)..(923): unsure at all n locations
  Clone ID: PAT_MRT3847_132409C.1
gggtgtgcagggcatgcatgaaaacatgttgatnnnnnnnnntaaagttgagcnnnagctaatagaaatnnncaataaattgagtgatgtgcaaaaattgagagaagacaccacttcaagttatcctccagtaagttgggaggattggctaggaagcaccaacacagacaatattcagggaaatgaactcaacctggagctgcttaatgttccaaaagaggttgtacttcaagatctgaactcaaccctaccaactcagctgcaatgtgtagaactgactaacatgaatagcaatttgctggagttggtgccaaagataaaggaagatcaacctaatgtgacccctgattcttctatgactgttaattcaaagtcagaccttgacaattcattgatattgtatcaggaaatgatcatggaattatttacatcgagggataaaatggagcagcagttattgcagatagcaaatactgtatatggcatgctgacaatgaaatagactctacatcgaatcgaagtatcaatcctaacttaaggattctaatttattaccattttcttttgctactctcatagagtgtagagtttagatattgtacagtgttaacaatcttatggggaagtgaaatccttttccaaccacaaatagaatgtcacccacagtgagcttcaaattgttgatattcttccctggccttttacaatacaattggttttaaggtaggtcactaggtcaatggtagggctgttattcagtgacaatttttctagttttgttaagtaaaaaattaagctccttttggtagctcttctggtagttttttattaaacattttagctcgagtaagtcatgaaaatgtgcttaaaccttatttgggggataagttgctatctgtaaaatttctacagtacatctgatc

SEQ ID NO: 35888 - DNA, 346 bp, Glycine max
  Clone ID: PAT_MRT3847_13240C.1
cagaaacaaagaaagcttttccgaatgacatacatctaaccatatgtcatgctagtatctcatgaaaactcaatacggataccacatggggcgaggggagggaggattactagatctacaaaaatccaactccattacctatgagagatccttcaacgctatagatatgaacactctacagatctgtaattgctcagtatgttgccactaccttgctcatattccttaccacattcactatgatgagtgtgaacatgtcaccatgcaatcgtacctcttttggcattaattgcataactggactcctgtgctctgatgacataaactctttgcacactgtactgat

SEQ ID NO: 35889 - DNA, 418 bp, Glycine max
  Clone ID: PAT_MRT3847_132410C.1
gcatgttgtgttgctgagccaatggacatcgttgtggaaaaaaaggatgatgagcttcttacttccttgcaaaacaggccaacaaggcagcgaaaacgacccagtaggtttttatgaaggtctcacccctcaaatacacataagcaggtcttgacaacttcagagttacgcgcgttatagtgttgctgatgcagaatcaaacactctagaataagatttttggcgtaaattttccataacaataattagacaggaggacccaattgaggaaaaaaattgaaaatttggtagaggtatggaactcatgaatcattttaaccttattaaaaagttttttttaatgaataccgtaacaaatgaatgtatttatccttaaagcataatttatacgtaaaataaattataattttcaccctca

SEQ ID NO: 35890 - DNA, 1059 bp, Glycine max
  Clone ID: PAT_MRT3847_132411C.1
ctccaatcacggcctcttcattttattcaaacactactactgtacagaacaaaagtgaccatcactcaaaaaacgaacttccacctgaaacctcaacactcctagtgggaaaaaaacaacctaaaatctacaacaaaatgatacaaccaccaatcatagtgggaagacaaaaaggcttatattatactaatacgctataacatatagtctcaatcgaacaaaaagcaagaacgagttagaagaaaattgaattcatgtgccgtattttgaggcagacgcaagtgccaccgcctgcgcccacactttgagccgtgccttcacgtctcgtggatcatcacctggagcagagatacgccaattggcgatgggagagttgctaccactgctagtgtcaagtgtggaattggaaaaagagagacgagaagggatctcaagcatacgttcgtgttccaactcaaatccaagatctctacaagccttaacttcctccaagtccatgcaaagagacctaattccacctttgggtctagttatgagcatgacaccactttgatcactatccccactaagcccctcctctttcctgatcttagtcttctcaaacccccacctctccctcctaaaggatcttctccttctccgtggatcactcttgtttgtaatttcattcccattgtcactggcatagtccttaagctgtttcctcattcgtgggggcgtagagggcagagagtaacaacttcccaattcgttttctgagtcggatgataactcaccatctgcgtcgaagctttcgatggacaagtgtgacacgcacatggaggccagattgtcaacatcgtcgtcgacaccaaaggtgctgccagtgcacacggagagcctcgacaagttgtgggggtgatcatcatcatcatcatcaaagtcatcttcgtgtaacgaacaagagtgaaagttcatggtctcatccgaagccatagtgagtgaaaatgagacggaaatagagcggcgtttagttttggctaatgtgaatcattcgtttctcgtttttatgatgataag

SEQ ID NO: 35891 - DNA, 508 bp, Glycine max
  Clone ID: PAT_MRT3847_132412C.1
gcgcgacacaggcattcgaagacgctgtctcgcttgcctcctgcctgcaaatcggcggcaagaagaacatcgcagaggccgtcaacgtgcacaagacgttgaggttcacccgcaccgcctgcgcccagaaaatcggcttcgccaacgccgagctactccaaaagaccgactgggctcaagtcaaaattgacccacgcaagtcgtctcctcgcttgccaaagtggatctgggagcacgacgccgaaaggtacgcgcatgacaactaccagaagtgtgttgagaacctccagaatggcgtcaggatggaggacgacgagctcattccgccgaattatccgaaggggtacaaattcgagccttggagcattgacgagattatgggagatttgaaggagggaagagaggttgatttgggggcgggtgagtggctttgagtgggttgatgatgggcaatgttcttggaatatatttggaaatgataatagcaacacgacgttaacgagaaaaa

SEQ ID NO: 35892 - DNA, 366 bp, Glycine max
  Clone ID: PAT_MRT3847_132413C.1
ccaaaaaaaaaaacacgggggtataaaaataaaacaaaaattgggggctaaaaaattacaccggaaaaattttccaaaggggaccggggaaaacccgtgtggaaagtggccccctggaaaaaaccccccctcagattattatgggggggaatacacgccttggaatgggggggttttccaaagaaattgggccctttaaccccccttaaaccttatgcccgaaaggggaccaaccctgggaaaagggaatgggttgttcccaaaaagaatgtaaaaaggggggttgaaaaatttattggccaaaatttatacggaaaaaccctttttccaaaccaggaaggggcccacaagtttttaaaagggggg

SEQ ID NO: 35893 - DNA, 239 bp, Glycine max
  Clone ID: PAT_MRT3847_132414C.1
tagggctgatgatgtggacaattaggcgattggatataagcatacccctgtcagatcttcgaattgcgattgacttgtcgtgcttccggcgtggacttggacatgtctacgactcctggtcttgctgctaatggtaaatatccgctttatacagtagcgactgcatatgatagaacttagtatgtcatgatcatgaatagatgtcatgagcaataagtgtgtgtgtcagaatattatag

SEQ ID NO: 35894 - DNA, 548 bp, Glycine max
  Clone ID: PAT_MRT3847_132415C.1
aaaatcttgtgatcactcagttacaagagagaaaattgaaggaagagctataacaccgagaaagcaaaatggcaagtctactatgtcaagggaagagttcgtggcctgaggttgtgggaacaaacggggtggtagcagtggagaagattgagagagagaatgataatgttcgtgcaagattggtgggagaaggatctatggtgacaatggacttttggtgcaaccgagtttgggtttgggtcgacaaaattggggtggtcactcgtgtgccaaagataggttagctaggcatgcaccttgtatgtatgtatcatgtatggaataatatatatatatatataatagccattaattacttacattaatggttcttatatatatatatatatacttcttactcttaaataaggcatcgcatgctcaggacgattatgcacattaatcccatcatgtcttcaacttgatctgtcttctgtaattgttatatatgtatgtgtttttatcatggtttcatcatgttagaaaaaagttcttaatacatagcacta

SEQ ID NO: 35895 - DNA, 356 bp, Glycine max
  Clone ID: PAT_MRT3847_132416C.1
gttgtccaaaccaatcttgaacccttatgtccgcgagcatacagctgctcaggctggtgtcaaggccacgcgggagcaagcctgacacagttaccgttcacctcaacatctatgatctcacccgaatcaacggctatgcctattggcttggccttggagtctaccattctggggttcaagttcatggattggaatatggttcacgagcgcacgagcacgacacaacggggattttcggagtccaacccatacactgccctgggttcactttcagaaagtcaatgttcatcgtaacaacatatctgtgtccgaaggatgttcgagcatttatggataagctggctcatgattacttc

SEQ ID NO: 35896 - DNA, 908 bp, Glycine max
  unsure (1)..(908): unsure at all n locations
  Clone ID: PAT_MRT3847_132417C.1
ctcgagccgaatcggctcgaggttgaaaaccctcacacagaaagagtggtttgtgcggtggtgaagaagcgttcggaatagaagaagaagatgtcgtcggtttacgttctagagcctccgacgaaggggaaggtggtggtgaacactacgcgcggtcctttggacattgagctgtggccgaaagaggctccgaaggccgcgaggaacttcgttcagctctgcctcgaaaactattacgacaacaccatcttccaccgcatcatcaaggacttcctcgtccaaagcggcgaccccaccggcaccggcaccggtggtgaaagcatttatggtggtgtttttgctgatgagtttcattcacgtctgaaattcaagcacagaggaatagttgcaatggccaatgccggaactctgaattccaatggaagtcagtttttcatcactctcgaccgctgtgattggcttgatcgcaagcataccatttttggaaaagtgacgggagatacaatgtataatcttttgaggctgggtgaacttgaaactgataagaatgaccggcctttagatccgccgaagatattatcagttgaggtgttatggaatccatttgaagatattgttccaagaacacttcaaaaacttcagattgaagctaaagctgatacaaaaaatananagtccanggaaaaaaagcnttaaanaaattgaacttgctttcatttggggaaaaanctgnngaagaagaaaangaattgctcggtgaaccaaacattagaacgtcnnaagttcttgaacaacctcggcttctaaggaaaacncttanaatgaactgatttcacagaaaaanctccttttcngngagggatcccttactcaagaagacaaccccaaaaatcaaatcnggtactgct

SEQ ID NO: 35897 - DNA, 1475 bp, Glycine max
  Clone ID: PAT_MRT3847_132418C.1
atcactgatcctatactacgtcgttgccttcctggatcgaactgaaaccgagtgcttccaactccaagcttcaaggaccactaggatggtaaatgcactaactaggacgcggttacaagatggatatgtctcgtatccatgggagaggaggatgcaggagttgctatcagttcccaattctagcaattttctttcaatattacttcttcccaaagtttcagataggatagctgctcgctacaatgatgtggaggatacactagccagggcaaatacgtggctgaatgcagctcaagcttcaggtgtccctattgtctttatgaatgtccaaaccgagtccctacttactaagatctctggagagacagcttcttccactgtaaatgcaggatcattatccgacttatctaaccttgcaaatgcaagcctttatggctctaacaacaccaatgtctactccagcgccaccaataagctccataccttctaattctctactctctctcacttctctctatcacatttttcttacaagatggcagcatcatcagcatgccttgtagggaatggtttatctacacggggtaatagaataactcttaagaaggacttcaatggaagaagatatctctactcatcttggagattttcattattgaacaacaataaggcatcaaaagcattttccataaaggcatctttggagcaaaggcaagaagaagggagaagggggtttctgaaactgttgcttggaaatctgggagttggtttgcctgcactattgggaagtggcaaagcttatgctgatgaacaaggggtttcatcctccagaatgtcttactccaggtttctggagtatttggacaaggacagagttaaaaaagtggatctttatgacaatggaaacactgctgttgttgaggctgtttcgcccgagttggggaaccggtcacagtatgttagagttcaactccctggacttaaccaagagctccttcagaaattcagggaaaagaatattgactttgcagctcatagtccccaagaagagtcaggttctcttttagctaacctgattgggaatctggctttccctttgctcttgattggaggattgttccttctctcgagacgatccggagggatgggaggtcctggtgggtggatttcctcttgcttttggtcaatctaaagccaagtttcaaatggagcccaatactggagtgacatttgatgatgttgctggagtggatgaagccaagcaggattttatggaggtggtggaatttctgaagaagcctgagagattcactgctgttggggctcgcataccaaaagggtgtcattgttgatggccctcctggaactgggaagacacttttaagcaaggctattgcatgtgaagcaggtgtgccatttttctcaatctcaggttctgagtttggagagatgtttgttggtgttgtgcttctcga

SEQ ID NO: 35898 - DNA, 332 bp, Glycine max
  Clone ID: PAT_MRT3847_132419C.1
caaagattacattgtctatatatatcaacaacagaggatatgtgacttatttctggtgtctttgtaccttttttgttgaaatatttgtagccagtaaggatagtaaggatagcttactaattactatcaataataagttagtttgggtggtactgagttcaaatccgctcgaatatatgtcatgaatgaaaaaaaatgattgaaagaattttttttactaaaagttaataaaaaaaatttcacaacaaagatgaattatcgacaaagttgataatattttattggaaaaaatactcaaagtatttttctattcatggattaggaggaatata

SEQ ID NO: 35899 - DNA, 314 bp, Glycine max
  Clone ID: PAT_MRT3847_13241C.1
gccttggttccaaaagcccatttcttttctatcactggttttcatgggacacatactttaatccacaattttcttcttctgccagaacccgttggagtaccgatactgtcaagacttcgcgagagatctctccgatggctcagaggcacatcgaacggccgtatttcacgctatgttgcgctgtgacggctgctgctgcatgagctctattcatgtactgcgatcatatattgaggaaaggaggcctgaaagaagaaaatataatagtgtttgtgaatgatgacatcgcccttcgttggagagacacccaaggc

SEQ ID NO: 35900 - DNA, 1204 bp, Glycine max
  Clone ID: PAT_MRT3847_132420C.1
tttcatttccctatcttttgttcgtagatatctctttttgccgcgacaaatgctaccatcatccactgtcctgtctctcgccggaacccgcgccggcgttccggtgagcttttccggcgaactgggtcacctcgaaaccaagttttcttcaagacccagaaaggttttcagccgttcgtgcataaaggggacttcccttacaacaaaacaccatcaatggtttgaattcgaagaacagaaactcacattcgagcttcgcattcggtaaaaaagccgaagacagctttttctcggatgtaaatggagacaccgatgagatgtatgatgaattaattaataattatggaaaagtggtatttagtagaaaagacaaaaagcctgctagcgcagagattgacgatgatgctgaaagcctgtcatttgctgtggaattggccacggttgcaagtgaggttaaggcaggagatataaaggtcttatttgtgaagccacttgtttactggactcgattttttatcatagctacagcattttctcgtccccagattgatgctatcgggtccagaattagagatcgagctgagaagaaatatggaaaaattccaaccggagacacaaaacccaactcatggactctgttggacttcggtgatgttgttgtccacatcttccttccctcacagagagctttctacaatttggaagaattttatggtaatgcaacaccagtagagctgccttttgaaaatcaaccaccaccatttcgcatttgatggacctttggtttgtcggtaatgaaaagttcaagatggatgatgactatctttgataaggtcattaatcactgccagctttggtttgtttacatgagtatattgtaaacattccaatgtgcttatcagcccaagactttgagctttcttttagctgggatgggagtggagaatcacccaatggggaagcgaaatggcacaatttcattgcatttagaagttgttttctgaactgtacattagagtggtaattagcaaatgggaatagagacaaatgtagttgtctgacttaaatttgacttcaactagtttaaaattaggcggggtttgtgaaatcttgtatttttttttcttctatatttcaaacaaaagagaacacaagaagatttatgatttaaaggaactttttactaacgagagaactagttctc

SEQ ID NO: 35901 - DNA, 264 bp, Glycine max
  Clone ID: PAT_MRT3847_132421C.1
caggacaaaaggaaaaggccccaaatttaatttaagggggccctggaccctaaaatttttgggggagaccggcccattttaaaaattttgggagatcctttcaaactttacatttttttttttcccctaaaaaatttgaaaatctaaaaatgttaccccccatttccatcaaaacttttagcccttgggttataaccacacccctctcaaacaaaaatttttacttgccccattttgtttttctccaaataaaaaatggaaaaa

SEQ ID NO: 35902 - DNA, 342 bp, Glycine max
  unsure (1)..(342): unsure at all n locations
  Clone ID: PAT_MRT3847_132422C.1
cgtgaggtagtaagtcgaatcgtcagnattctcncnctgatccntctaatacggaattggagagatgtttatatagnaagntaggataanaccngtgggcnaagggaatatttnggncntttccaaggggnttcccnggttnggncncaacttnancnnggctttnannntccnngantttggccaaaacttnnnaancncncccttttnnngggggcccaattntnnnnanacannanccccgnggncccccgtacngccggaanccncccncgggccttcnccacagnttnntgnggnggcccnttttaanagcntnntccnngnngaancccttggncc

SEQ ID NO: 35903 - DNA, 354 bp, Glycine max
  Clone ID: PAT_MRT3847_132423C.1
ccaaaaacattataaatccaacttccgaaaacaatttcccccaaattaaacctttaaagggaaaaaaaaaattcttttcaaaaaaaaacataattggcataaaatttaatttcctccccggagaaaaaaaaaaaagcccccctaaaaggaaatcctttaaaaaaaacccccttttttaaacccccccccctccggaaatagtttaaaaaaactcaatccctaaggacccttgggggaaaaacttggaaagcaaaaaacccctccccaaaacagggtttaaacagaaatttttggctttcatgtctaaaaaaaaaaaaaaaatctttttgaggtttccctggagggcgggcatgg

SEQ ID NO: 35904 - DNA, 243 bp, Glycine max
  Clone ID: PAT_MRT3847_132424C.1
aagaatacttgaccttttagggacataaatcccacccaaaatcaacgggtgcacctcgttaagattcaacaaatttactcactttactcctcaaaagttcaaaaaaccctacttcctagctcccaaagatgtgttgcagcctatccaaatggccaacaacaaaatgaaaaaggaacaatatttttgtgaccatacacctgcatcaccggattagaggaaaaaaagtgtctttatcctaattaa

SEQ ID NO: 35905 - DNA, 978 bp, Glycine max
  Clone ID: PAT_MRT3847_132425C.1
tttagtcacagcacagtgtatatttcgcaactacaccatcgccatgcttacaccttgccttttttcgtttcactaataaataaataacactaatatattgatattaatacatcggagaccaaatcagaacaatcaaacagcctttttctgtgtctcttcaacgcaacaactagggattcgttcttcgccatctgcacagtattatgactgaaaacgcgtgttacgtgtgaagcattgtcaggaattatatggattctttcaatgctctgttagggcgcaatggagcgaaagatcattgattttgaccaaggttgggactatatgcagaaggggattaccaagctgaagaaaattcttgaaggagcaccagaaactcctttcagttctgaggaatacatgatgctatacacaaccatatataatatgtgtactcagaagcctccgaatgacttttcacaacagctttatggctggacttggggcagttggcctcacttgcttccgtgattcgttttatatggaggtacgagtcaatgctaggaaagctgtgattgcactgattgataaagaacgtgagggtgaacaaattgatagatcgttgttgaaaaatgttcttgatatatttgttgagattggtatgggcgaaatggatcaatatgaacaggattttgaggtacatatgcttgaggatactgccgattactacaaaagtaaggctgcaaactggattgagattgactcctgcccagattatatgcttaaggctgaggattgcttgagaagggagagagatagagtgtctcattacttacactctagcactgagcagaaattggtagagaaagtgcaacaagaggtgctggtgattcatgcaaatcaattactcgagaaagagaactctggctgccatgccttacttagagatgataagggtggaagatctctcgaggatgtatagactttaccataaaataccta

SEQ ID NO: 35906 - DNA, 1497 bp, Glycine max
  unsure (1)..(1497): unsure at all n locations
  Clone ID: PAT_MRT3847_132426C.1
cttttcgcgtccgatctccttgcaatgcttacaccttgcgttttttcgtttcactaataataatactaatactaatacatcataacaccaaaccagaacaatcaaaacaaactttctctgtgtctcttcaacgcaacagcacaatggagcggaagatcattgattttgaccaaggctgggattatatgcagaaggggattaccaagctgaagagaattcttgaaggagcaccggaaactcctttcagttctgaggaatacatgatgctatacacaaccatttataatatgtgtactcagaagccaccgaatgacttttcacaacagctttatgacaaatacaaggatgcttttgatgaatacattaataccaccgttttgccatctctaagagagaagcatgatgaattcatgctgagggagcttgtccaaagatggttaaatcataaagttatggtccggtggctttcacgctttttccattatcttgatcgctacttcatttctcgacgctccctggctggacttggggcagttggcctcacttgcttccgtgattcagtttatatggaggtacgagtcaatgctaggaaagctgtgattgcacttattgataaagaacgtgagggtgaacaaattgatagcgtccgctttcgcgcttcttctgtatcttgatcgctacttcatttctcgacgctccctgcctggactcggtgctgttggcctcacttgcttccgtgaatcggtttatatggaggtacgagtcaatgctagtaaagctgtgattgcacttattgataaagaacgtgagggtgaacaaattgatagatcgttgttgaaaaatgttcttgatatatttgttgagattggtatgggtgaaatgggtcaatatgaacaggattttgaggtacatatgcttgaggatactgccgattattacaaaagtaaggctgcaaactggattgagattgactcctgcccagattatatgcttaaggctgcggattgcttgagaagggagagagatagagtgtctcattacttacactgtagcactgagcagaaattggtagagaaagtgcaacaagagctgctggtgactcatgcaaatcaattactcgagaaagagaactctggctgtcatgccttacttagagatgataaggtggaagatctgtctaggatgtatagactttaccataaaatacctaaaggcttggatcctgttgccaatgtattcaagcagcatattacgggtgagggtacatcattggttcaacaagctgaagaagctactagcaatcagactacaaatggttctggctttcaggaacaagtccttgtccgtaaatttttagagctncatgacaaatatatggtgtatgttaatgattgctttatgaatcatacactgttccacaaggcattaaaggaagcatttgagatattctgcaataaaactgttgctggtagttccagtgctgaacttttatctaca

SEQ ID NO: 35907 - DNA, 377 bp, Glycine max
  Clone ID: PAT_MRT3847_132427C.1
ctgacgcgggggcttttctcgaggttttacgcgggagccgagggggaaaacgcggtacattccatggaggtggaaggggcactaaaaacgtgcatggaagtggcaaaaaccagcgtgaaaatggagggtgaaagaggggagatggaccgtccgcacaaagagccccagccgaacgaaagagcattaaaaccgacatgtgcgaggcaggaaatgcacacttgaaagatggggaaaaagaagccaaagaaggaccgactttcgccaaccacatgggggaggcgagagaagctcttggggccacgcgggtcccagaatatgcgaattcaacatagatggtccttgccaattgaacttagaaaagggggaaaaacaagcct

SEQ ID NO: 35908 - DNA, 146 bp, Glycine max
  unsure (1)..(146): unsure at all n locations
  Clone ID: PAT_MRT3847_132428C.1
tnaaattcgaanaatnatnttnncatntnctgnnntaatactgnngtggtntanantccctaaagaatgctgtcgatatggcnaattaaatcttctagttctgtgcaggtcctgtaaaaaaaagggccatgccctttctttactcc

SEQ ID NO: 35909 - DNA, 250 bp, Glycine max
  Clone ID: PAT_MRT3847_132429C.1
ctattttcctattgttcctcttctcgttcggatcttccactactccaaccaccagttggagaaaaaaggttcgtgagccatgccagaagtaagttttttactttcacgacattatatacaatggtcacaactcagagaatgcaactgcggccattgtgggtgcacccacatgggccaatagaacaatcttggctgggcagaaccattttggtgactcgccccaagttggacgcgctcagggattttacat

SEQ ID NO: 35910 - DNA, 252 bp, Glycine max
  unsure (1)..(252): unsure at all n locations
  Clone ID: PAT_MRT3847_13242C.1
cgtccgncgagcctgtacaatttgtggttggacaccttcgtgaacagattgttcaagtccttggtgggcctcaagacgctctgtggaagagctactggaaagatgcttcgtccatgatcaagttcttttggaacgatgtagcgacttcaatttctcgtgcgaatgctttggattccacactcttgaatgatgcttacaaagctgaagggcaatcatacgcggacattatctcattcacactgagacaagcta

SEQ ID NO: 35911 - DNA, 478 bp, Glycine max
  Clone ID: PAT_MRT3847_132430C.1
tacggctgcgagaagacgacagaagggattcccgttaatgatgtgataacagctggacccagacccagttcctttgttcaacacgttacaataatggcccatttttctctctcccctctctcctgtgcaccttctcctctaccaccacgccgccgaatctttctctctcctcctcgagccgccgcatcttccgccaccgacgtcgtttccacttccacttccacttcatcttctgcttcgaatttcgcgcccaaagtcgttgtcaccagagagcgcggcaagaacgccaagcttatcgctgctctggtacgcgcttctgttcactcacttcacatttcgcacctacgatttgttttcctacaactgcattgcaatgtgcttaaccttagtcactcgaactccaaccagctagttgtgccgtttttttttttccgagtctcgttctcgttcttttgctactttttcctgcaatatgaac

SEQ ID NO: 35912 - DNA, 717 bp, Glycine max
  Clone ID: PAT_MRT3847_132431C.1
aggaagagagaacatcatatattcatatatagaatagaaagaacaaaatattaaaattaaatgagacaagctcaaaattgagcagttaaaaaaacaaatgtttatgtttgtaatgatccagttttgggtaattacctgtaaactagttctataatcaactttaaattattatttttttgtgtatatcactttccaatttccacctaagggaaaacctaaaaaatctacccctgactcaccatgtttacaattatgagactatacagtagacacctttcaaccccaagaaaaatgttaaacatcagcacacttcattggtgcatagacaagtctggatttcttcatatcatacagtatgtggaaattctgctgctgatagtttccaattattgaaagggcagatcgaggattccccaaaatagccaaacaaacaacctcaggatcaatccagataaaataattctccactggaaaattccacactgcttcatcagcaaacaagattccaaagtcaggtagctccgtcttttcaattccagacacattgcaacatggctttagaggaggaaggccttcaacaagctgatagcccttaattttcctcacaaaggcctccttgataatctcataagcacgctctgcaaaatttgctaatgtggggccagaatgaattatggtaccaccaacaccttctgaagacaaagccaagtctactca

SEQ ID NO: 35913 - DNA, 559 bp, Glycine max
  Clone ID: PAT_MRT3847_132432C.1
tcgatctatcgctagccaatgtaccagataccgtgcacacagaaacaaccgagtttatacattaatacacctgtagggggctgccaaaatactggcaacagccttcaattggcctacaggataatagttacaaacaagtgatttgttatggccgctgttcgtggtctccgccgagctaaagtgggcgcaacatgtggatgcccaacattaggatgggccaccgacacactgtgcatataaggcataagcgcaaccttaacagttaacataaccacccgaggttgttacattactaaaccggcagggggctgcccaactactggcaacagccatctatctgcctacatgataataggtaaaaccacgtgatttggtattggcgttggtcgtgcaccccaccgagctacagtgggcgcaacatgggcataccaaaaatgagtattggccaacggcaaacggtacatataaggcagaagcgtaacctaaaaagataccataaccaaccgagttttttacattaatacatcggcagtgggctgcccaactaatgccaccagcc

SEQ ID NO: 35914 - DNA, 300 bp, Glycine max
  Clone ID: PAT_MRT3847_132433C.1
tcgaccacgcgtccgcgaacacccggcacgggacacacagatgtgataccaaataataactgatgagctttacagcgaagaggaagacagctatgcgagcattgaagagaagatgcacaacaactatagcctgacgcgaggcacagggcatacgctgtgacactctctcaaccaatgatgaatccctattaccatgctttcacttactaggctgaaccttacactgattgtagcactaatcttacccctctgaaaccacgcttatgaagctacctcaataacactagcataaagcagtat

SEQ ID NO: 35915 - DNA, 433 bp, Glycine max
  Clone ID: PAT_MRT3847_132434C.1
gactacatgcttgatgaagaacacgaagaaaagaggccacgtgagtgccggtcatggccgtatcgggaagcaccggaagcaccttggaggacgccgtaatgcctaatgcatgcaccatcacctgatccttgtttacatgaacaacccttggttctttggaggcgtccgaatgcgctattctcacatgctccgtctcacattctactctatgatgctcaacatctgcaagctgtggatcctgtttaccttagacgtgaaggacgatgcctccaatgagaacaaggcacctgtgatctgcgtcacgcagatcctgttctttaagggtgttggaaagggtgttatgacgtagaactagtttgttggtgttatagcttagcgtatgactacgatcggtgacaagatgatcaatgacgttggcggagctgttgttgtt

SEQ ID NO: 35916 - DNA, 512 bp, Glycine max
  Clone ID: PAT_MRT3847_132435C.1
gttttgttttacatgactgggctatcatatttcggcactctcccaacgaaatcacgatacgctatcctttttcccctattcgcttcttcgtatttttcgatctatatatttcgtcttggattttgatgcgggcgaaagcgaattatggtgtggacaggttcgggatttcggtggagaaagagagggacggagatagatagatagagagagggagaaagtgtttggtgagggatttcaggttggcgtattaattgatatggagatggggagcgacgatcgggaccgctaccgggtgatcaaggtgaatatattcaacgactgagcgttgaggctgaaggatagtttgcatggataggcgtcaggagctgatgggggattactctgacgagacgctggtggatgatgctattgcgacatcgaggaacggtaggcacaaaagacaagcatggagtgagtggaatggtgttctgggagaaaacaacgattcattcgtgtgctggctctgggaacat

SEQ ID NO: 35917 - DNA, 282 bp, Glycine max
  Clone ID: PAT_MRT3847_132436C.1
tttttatgaaaagaagaaccactgtttttttcatgagggcagaaatgtcgtacaatctcgcgttattttcacggaactactggccttaaattaatataacaaaagccagctcctctatagttgcgaagaccaattacaaaattctctgtttatgggcaaacagagactacactacatattaacgctggaggatctaaagtcgcatacgggtctttcaaccattgttgggggaggaacatcatataatgtttttgctaaaaacaattacaactacaatagcgg

SEQ ID NO: 35918 - DNA, 293 bp, Glycine max
  Clone ID: PAT_MRT3847_132437C.1
gctaaatatgatttgagagtaaatattccgcccgccagagtgttggcaggtgagttctccactcgtgcagtagcacctcaggtattagagaaagagaaatatcagaaattcactctctaaagaaagtgattgtataattggaatcatacatgtgatgaactcttttcttcttttttaattgagaaatgtgatacttgtcacatgaagattattgagatcacatggtccactgaacaatatttctaatttcttttttctaatacattttttttaacattctttatcattgactg

SEQ ID NO: 35919 - DNA, 220 bp, Glycine max
  Clone ID: PAT_MRT3847_132438C.1
cattctctggttgtatgtcatgcgaaatgactcccggtctatgttatattgaactcagccctgttcagcagagaaaggggacctcactctattgtctagcttgcggggaatctcctgagcgcaattgctttctcctgccggaaaggttaccggactttgatttgcctaaaagaattctattcttccttgttggggttagaaaaactagaaacatactgag

SEQ ID NO: 35920 - DNA, 405 bp, Glycine max
  Clone ID: PAT_MRT3847_132439C.1
ctcatggtatccggagcataaagagtagaaggaagtgaggctcttgctgcttatagagcagatcacactgatagagaaatcgatgtataagaaaaagggccaggctgaatcgaggctctcacttatagaggtggacatcactctacatctgatgatccaactaagtaccggggaactgacgagatagaatattggcagacggcagggaatccagcgaatacgtccaaagaatggtaacataggactggttgagggaatgacaaggatgaattggagcttagaggcgatgccacgaaacaaataacgcatgctactcgagcggcacagatagcacaaaaacctccacttcaggactgatctaaagatgtctatgagcaatgccctcccaccttgaagagctggaga

SEQ ID NO: 35921 - DNA, 320 bp, Glycine max
  unsure (1)..(320): unsure at all n locations
  Clone ID: PAT_MRT3847_13243C.1
tttcggctccctctcctctctttactncttttcaaacaatgtcacataccttgcattctgtcaatttcaaaaatccttgctcctgaatatccaattgcacttatctcccattttcacgttttcttttaataactccttctccatatatctactattatctatgtcatcacacaattcatttccccattcaactcttacgactaaataattactataacctttcatcattcttatatgtaccaaatatcatcccatacttctacacacatactaaacacttatccttccaaatcctaaatcaaaactaccattgccaacac

SEQ ID NO: 35922 - DNA, 505 bp, Glycine max
  Clone ID: PAT_MRT3847_132440C.1
gcatccatctgggccagagataacatagtctccagactagctatcctttccacacactgcttgtactgaactagaccggcatccttctcatatttaagctctgctagggcttctttcaatactgtgatttcgatttcagctttgcttgctcgttcatcaaggcctccagcatctttttgtgccttattaagctctctttccatttcagataacttctccaaactcttctgatgttgaagaaagatagaatccttgtcagactgtatatcttccagtactttctttaaggtttgaacttcgttttctgctttctgtgaacgctcagactcagcatgattctgggccttcacattctgtttttcagctgataattgagacaacccaaaaatttcatttagctgcttcagaccctttcggcttagaccatttgcagattcttctaaactctctccattcatttttaaagtattttggattaaagaaaacccaaatgaatctttctgta

SEQ ID NO: 35923 - DNA, 191 bp, Glycine max
  Clone ID: PAT_MRT3847_132441C.1
gccgccgatcccgtcgcccacgcgtcggacgcgtgggtgctgcaaaggtggttgagatattcgcgatcctctggggagcataacgcctgtgaactgcaaatggagagaagttgtgaacgacgaataactgtgagacatttgggtgagatgatagactgccctactgacacagtattgacagctattttttg

SEQ ID NO: 35924 - DNA, 384 bp, Glycine max
  Clone ID: PAT_MRT3847_132442C.1
tttttgttttgtttatttattttttttggttgggtttttttttgttttgtggggcaaaactaaaaacgtaatttttgatagggaagaaacaactttatacaacccttacttttcttatttaacaaaaacaggaaattacttttttagaatggctacttcaattttttttgggggggagatttttttaacctatacaggggttcttttaggtgaaaatttttgttttggtggcaaaactgccattcccattttcagtgaattgccaaaactgagaaaaaatttattgccggttttgtccgacgggacattgggcaagattcttaatttaccattcccggaaagcattcacgaatgccggcaatgaattaacattttttttttccg

SEQ ID NO: 35925 - DNA, 451 bp, Glycine max
  unsure (1)..(451): unsure at all n locations
  Clone ID: PAT_MRT3847_132443C.1
gctcgaggcctctctcttcattttttgtttagcatgttttgccactgcagcacggtgaagagacttaccttggatttggtgggaagaacagaacaggttgatgtggcagagtttgggattactttgttggattgttttccaaacataacatatcttaatttaggtcctggagcttggcatgtgatggagaattctttcagctggggaggtttgaaagatgggattgggatgaagatgataaaagaacttatagcacatctagtggtccatgaaatggggttacccttgcatttatttcctctgttttggataaaagcactgaattatctgatgtttcactgctcatccaccgtcatgttaattcatatcttgctggcagcctgatctctgtatgcagaagcaaatntcccaaagttagattgagatggggaatatggaaagaaggaatcaa

SEQ ID NO: 35926 - DNA, 1564 bp, Glycine max
  Clone ID: PAT_MRT3847_132444C.1
ccacgcgtccggagagacgcagaatctcccttatttctctcttgcaaccagagccggcactcccgaaaccatgcgttcgtccgcgcttttgtcccttccgtgtttcttaattcacatgtcactgcccttcttagtcgtctgcagcaacaacaacaacgtttctgagttggtcttgtcgtgtccatggctgtgtccaacggcgtcgaagcagtgttagagtttctaaggaagaatggattgtcggaagctgagtccgctctccgacaagacatcatcgagaacaccgacctcggaaccttcgactacgagaagttcttcttccccatggtcccaccgccgccgccggtcagagtccgatctttctcccggccgtcggagctctccgccgacggcaactgctccatatccagctccgatgagttcgtcagcatcggttctcccacttctcgtgtttcttcttcagaattcataaatccgtatggaattcgttcctcgtctcagactcagaatgactctgaatcttcgtctgaaagattatctcagtttggcactgcacgtgattatcatgattttgaaatgcagaatgaaccatattggtataatgaaaaagatgatgactatttcatgactcctagttttgaagggccggatttctttgcgtgtcaaagtgaagataagtttgtcatgacagcagaaacggaaaatcagcatgacaattctctggaccttgtttacactctgaagatatgagttgaaaatgaatggagaaaaaaagacgaagcggtgaagaagctgagcgaattgcaatatgaaattgaaagcggttccatggtggcataattggttagtggtaaaagcaggatcaagtcacagcagcctcatggtacgcaagaagcagactcaggattctgaatccactcctccaagaatcacatccaacgtcaaacaaaacctccgcttcctaaagctatggaagagcttccagaatagaaattctagcactcctaggccttctaccagttaccgcaagaagaaggtcgagaaggaagatgatgttgttgacacagacctctatcgtgatcccaccacctccctctactacacaaaccagcagggtatattagacaatgccgtccctgtacttcttgtggatggctataatgtgtgtggctattggatgaagctcaagaaacatttcgtcaaaggaagacttgatattgctcgccaaaagctgattgatgagcttctaacctttagcatgcttagagaggtcaaaatcgttgttgtctttgatgcaatgatgtctggactccccactcacaaggaagatttcgctggtcttgatatcattttctcaggtgaaacatgtgctgacacatggattgaaaaagaggttgcagctttaaaggaggatggttgccccaaagtctgggtagtcacttctgatcactgccatcagcaagcagcacatggagctgtatgcttccttcctataaattgaaaacttgagtgaaatggatgcaacttgattgtcaattgtcttcacaattcttttccagctatg

SEQ ID NO: 35927 - DNA, 611 bp, Glycine max
  Clone ID: PAT_MRT3847_132445C.1
atcctctttccctccactttcatctcttagcattcctcaaagcaagctttccgtttgtcctctgtcatcagcagtggctaccacccatggctgacacaacggtggtgcaccacttctcatcacaccatcatggtggtgcgctgcaatgattatgccactacatgttttcctttcaccgttgtgtaactcttgctgcttctctcattcacccattccacccaatctccaagtctccttcctttgttgttcctctcttaggcaataattcatgctcaggtagactcaacaaaataccctttcactttccttaaacggatcttgcatcaacatcctcacagattactccactatcaaccgatgctggcctctattcaacgacatcatttatgagacactgtatataaacatatttttaggtagtgtaattaattaattgatacgtaataattaaaaatattttaattgctaaaattacaaaagggcaaatgagtaaattaatctatcccaataaaagtttaattatttaataatattaaaaaaaactatcttagtcgtccaatattatactaatatatccagtggaaagtaatacgtagtgtaaaatgggccag

SEQ ID NO: 35928 - DNA, 194 bp, Glycine max
  Clone ID: PAT_MRT3847_132446C.1
gttcattcagacatatggcacacacataattcataggtatggctgttggaggtcaagatgtaatttgtgtcaaacaaaaacattcttcgaaggttccacctggtgatctaagaagacatttagaggatctaggagatattttgttttcagatttaagaagcccttctcaacaacaaaggaacaccccagaaggc

SEQ ID NO: 35929 - DNA, 387 bp, Glycine max
  Clone ID: PAT_MRT3847_132447C.1
gttgcaaagcaaaaactactacgaggagctttcctccatacgaatcaaaggaggagagagagagagagagagagaggagacacagacacaaaggaaacggaaaaagcaacacacaaaaaaaaagaggttcagattcgatctcttgttttgttcttccattcatatctgttttattttattttatttttctttctttcggcaattgcatctcatcaagctcgtttttttcttcttaccatcttcatttccgcacttgtttactcctcaattctcttttttttcttcgggatctcaagtgggtttccgttatttctcaatttggacgcatattttttgttttatctcttgaatctgcaagctatattgaagattcgttctaactcttaa

SEQ ID NO: 35930 - DNA, 503 bp, Glycine max
  Clone ID: PAT_MRT3847_132448C.1
aaatttttagacaatttgaataatactatagacgacttgttaaactaaaataactctggattaattaatttacgcgctcatcgctaagtagtattttttataattttaaagtataataaatatacaaaccaagtcaataattaaattaaaagtatttttaaaataaatgcatggtaaaatctagaccataaaaattaatctaatggcttaaatgggaggaaagtgaaggtgattttcccgctttaaagtcactgaatttgattacaaaaatgagaggtaggggttacgaaatttcgtggatactaccattagggaaatctgtccaatttgccttgagcgggagatgatttgttggtgcaaatgtatttctcttttaatttcttaaaattaaatatttatatatataaagaataacaattcaaaacggattcaaagttggcctagttgacctagttgtaagagttagagtaattaatataaggtattagatttgaagctcattg

SEQ ID NO: 35931 - DNA, 740 bp, Glycine max
  Clone ID: PAT_MRT3847_132449C.1
ggtccgaattcccggtcaccccgcgtccggataatcaaaaaggcagaacttattgcaacatttgagtgaggcatggcgatgctggaaagcaaatattccttggaaggttcctggtctgcctgttcccattgagaacatgattcttcgatatgtgaaatcaaaagcagactggtggacaaatgttgctcattataatcgtgagcgtataagaagaggtgcaactgtggataagactgtttgtcgtaagaatcttggaagattgacacgcctctggctgaaggcagaacaggaacgccaacacaattatttgaaagatggtccatatgttactcctgaagaagctgttgccatctatacaacaactgtacattggttggaatctaggaagttctcccctattccctttccacctttatcatataagcatgataccaagctgcttatccttgcgcttgagaagttgaaagaatcctatagtgttgctgtgaggttaaatcaactgcaaagagaagagttggggctgattgagcaagcttatgacaatccacatgaggcattatcgcgaatcaagcggcacttgctcacccagcgtgcattcaaagaagttgggatagagtttatggatttatatagctacctgattccagtttacgagatagagcctcttgagaaattacagatgcatatctggatcaatacctgtggtatgaagggggacaagcgccatcttttgcccaact

SEQ ID NO: 35932 - DNA, 310 bp, Glycine max
  unsure (1)..(310): unsure at all n locations
  Clone ID: PAT_MRT3847_13244C.1
ctcccttagaggtctcttttagagtccaagaataaaaactaatggtcctatatggaacctggacctaaccaagttaaccacacagaaccaggtgtcttcattgttccacctatggagaagtgagcatggacgtgtctaccataaccacaaagaaaaggcaaagagacttgagattttcaagaataacttgaactatatcagggacatgaatggcaacaganaatcaccccattctcatcgtttaggattgaacaagtttgctgacatcactcctcaagagttncagcaaaagtacttgcaagctcccaag

SEQ ID NO: 35933 - DNA, 643 bp, Glycine max
  Clone ID: PAT_MRT3847_132450C.1
attttcgtgctgatttgtctattactccctccattttgttcccacagaccatgccctccattgtgtatggatggtgtaaatctaggcagcagaagatatatacatacatacataaacatatacattgtgcttgtttttcatggttgaattttgatgtagaagtctatggaatttatttcttggtgttctcatgtgttacatagccgagaaaagtttggggagatgcatgctagattatggtgggaagagaaccgtgccagaatacatgaacaatacttgtgagttgtgagattttacaaaggaggtggctgctgatgctttacaaagtgtggagctggtgttgcttattaaattgttccatatttgttttgttatactactattaaatctctttataggtgaagatgtcagatgaggtgctacttgcatctctgcctttttttgggctatttacatgtgatcggttcaggttatcttctcttgaatgtgggtcgtaaatatagtttctagtagttaaagatactggtggataaagagcagcaatgatttacttaaaaagcttaagaagtctggtgggtgtaaattctattactattcaaattggatacaaaagatgaatccactttcattattttgttcctac

SEQ ID NO: 35934 - DNA, 293 bp, Glycine max
  Clone ID: PAT_MRT3847_132451C.1
acgcccacgcgtacgaatacaatcactttgacgaaaacgctgtcgattgggctttgtaggtctagtacggactatacctgttacctaactgccactgcatcagcttcgtcgatcgaagtggagcttccatttcatagacggagacaaagatagctaggacgctcactaggctgaccctgagcatgacgaataacaagcctacttacaactgtatgttacagcctaagacacatattatgaaggactccgtgatgaatctagtagtacgggtgagcaaacatagctgcataaca

SEQ ID NO: 35935 - DNA, 433 bp, Glycine max
  Clone ID: PAT_MRT3847_132452C.1
ctatggtgtggtacctgaaatggaacactacgcatgcattgttgatctcttaggccgtgttggccggttggacgaagctgtggaattcataaacaagatgccaatcgagccaaacgaaatggtttggcaaaccttattaggagcatgtagaattcacggaaatcccacgttgggagaaactgcagctcaaaagattctatctgctcgaccacaacatccttctacctacgttcttttgtccaacatgtacatagaatcaggactatacaaagacggggttaacttgatagacacaatgaaagaacgaggcattaaaaaggaaccaggatatagttgggtgtccgtgagaggtgaggttcacaagttctacgctggagatcaaatgcatccacaaacagacaaaatctatgccatgttagaagagttaacatcc

SEQ ID NO: 35936 - DNA, 1855 bp, Glycine max
  Clone ID: PAT_MRT3847_132453C.1
cttggatcagttcggttcatcagcaccactttagtcagtctttcccttggtggttgtcgggcgatcactgctcttgagctcacatgccctaaccttgagaaagtcattttggatggttgtgatcatttggaaaaagcctccttttgtcctgttggccttcggtctctcaatttaggaatatgtcctaaattgaatatactcagcatagaagccatgtttatggtctcacttgagttgaaaggatgtggtgtactgtctgaagcatcccttaattgtcctctcttgacatctttggatgcttccttttgcaattttggatggctgtgatcatttggaaagagcatcattttgtccagttggtcttttatctctcaatttaggaatatgtccaaaattgaacacactcagcattgaagcaccgtttatggtttcacttgagttccctgctggatttatcttacaccctttgggtcaatttgcagcctgtttttgagtcttgttcacagctaaaggtattaaagttgcaggcatgcaaatatctcactgactcatcacttgagcctctttacaatggtgctttaccagaaaggatgtggtgttctgtctgaggcatcacttaattgtcctctcttaacatctttcgatgcttccttttgcagccaactaactgatgaatgcttgtctgcaacaacggtctcctgcccattgattgagtcattaatattgatgtcatgcccatctattggtttagatggacttcgatctttgcgttggctccctaatttaaccctgctggatttatcgtacacttttttggtcaatttgcagcctgtttttgagtcttgttcacagctaaaggtattaaagttacaggcatgcaaatatctcactgactcatcacttgagcctctttacaaaggtgctttaccagtacttcaggagttggacttgtcttatggaacactgtgtcagtcggccatagaggagcttctttcttgctgcacacaccttacacgtgtgagcttgaatggctgtgccaatatgcatgatttaaactggggatgcagtcgtgcgcatactgctgaattgcctggtgtaaatgtcctacccattgcaagttcccctgaaaatgtcctcgagttaagtgagcaacccatccggttactgcagaacctaaactgtgtgggatgtccgaacattcggaaggttttcattccatcaacggcacattgttcccgtttgttatttttaaacctttctctatcagctaatttgaaggaagttgatgtagcttgtctcaacctaagctggcttaatctaagcaattgttcctctttggaagttttgaagctagagtgtccgagattgaccagtctattccttcagtcttgcaacattaatgaggaagctgttgaggctgctatatcaaaatgcactatgctggagactcttgatgttcgcttctgtccaaagataagctcaatgagcatgggaagattgcgtgcagcatgttctagtttgaagcgtatattcagcagcttgtcagcttcataaacatgaccaaggatctgtgaaattttccagtggttttcacttggattgaaggcaaacttggtaataaatctggttatatccttatgtattgtaaatgtgtaacttgttattgtttgtttgtatggcatatatagaaattaggtttatcttctatggattgttataataaattgtcgttgttatacttgttactattgtaaattttacatttcaattttgttgatacatattttattctaaaacagtccaacttttttttttttttgtaaataggggatctgatccattttttgccctagcc

SEQ ID NO: 35937 - DNA, 733 bp, Glycine max
  Clone ID: PAT_MRT3847_132454C.1
aacattaaaagggcacagttgacttgcatctgcactacataaagggtgaagttaatttcttacaggttgaactcaattccaagactataattagaactttacataatttacagcgcacaatcagttaatttaagtggagtaattgaatttgggaagccacttaataatctacacaatcaatttttgaattgcaagatctttggcagaagttgctaatctgcggaatactttgagattgtgccctactttctcctcactcagcaactcaagtcgctcaagggttggaactaactttccatataacatagcaacgtcctgttgtgcatcatatttggcaccatatgcaattgtttttgtactcaaggtagaatcgagtgcaacagagctctcttgaagatggataaggatgatatttagcacatgttcagagagtggcagtaataaaatgattagctgatccctactagcaacaactcgacacatttctaccattgcaatgtacctccttttatgtatgttatctgaagatgaaacagagtcttgccggacacacatattgatgatttcatcaacttcctgccttgacagttcatttatgtctcgaatcttattcagtaacaaggatttctcctcagctgccctttcaaaagcagttgtgacagaaaaaagaagagaattaagcaagctcaatgtgggttgttaagttcaaccggacgagtgggcggacgcgtgg

SEQ ID NO: 35938 - DNA, 514 bp, Glycine max
  Clone ID: PAT_MRT3847_132455C.1
atccacgatctgtgtgcatatgggctgaagcctggttttctaggttctcggattttgggcaccattccttagtccatttcacagcaaactgtttggaatcaaatggcaacagggagaacaccatggaactttgatcctaacaagctgagctactgtcaatttactattgacccactcggcggaggaattttagcggtcaaaactggagattggatcacacttatacaaaattgtccaattagtaacttgttgagagttgctgcttggaagaaaggctgtgtaacggctaagatcgtgatgtctggaaatgcagcagtcaaaaggagtgattgggcctcattggttcaagtgtgttttacaaacagcatcattaccgagcattttgatgcatgtaagaggacaaaatcggaaccacattcctgggaactgatcctcccaatagaggagtgtggtcctaaccatggatttcaaatgtggagttctgagagggcaaaaaaaacttatggcacttgag

SEQ ID NO: 35939 - DNA, 275 bp, Glycine max
  Clone ID: PAT_MRT3847_132456C.1
taacaatcttacgatttcatgaatcactgagataaatggagtcagatgaagacgattttgttttctacggaacgccgatagagcgtgaggacgattcaatcagtcgcaagaagaaggccattgctgagtcctcaggtcagctccgagctctccctgcttggaagcaagaggttagagatgaggaagggcggagaagattccatggagcatttacaggaggttattctgcgggttactataatacagtgggctcaaaggaaggtgggcacctcagt

SEQ ID NO: 35940 - DNA, 254 bp, Glycine max
  Clone ID: PAT_MRT3847_132457C.1
attcgtttttggattttttgtgtttacctgtcccaaattcaatttaaaaaggggtgggggttatttttttaataagcatgaaaacctccctaagatccaccccgcaacaaatcaagagcagcaataccgacaaaaaattactgtccacataaacaaaccaaaaagaagaacaacgcctggtcgacccccaaacccaagccccacaaagaaaacacaaaacaacgccaccaacgacgacgaggaaaaacccctaa

SEQ ID NO: 35941 - DNA, 421 bp, Glycine max
  Clone ID: PAT_MRT3847_132458C.1
tacggctgcgagaagacgacagaaggggattgcaaattggcacgaaatccatcatatattaaaccaaactcgataaatctctatctctcccgtttcttccttatgaatattttaaccgtaagagcaatcgaggaaactcctaagctcctccatggaacaattgaagctaccatcttcaatgccacaccttactcacctttgtttcccttcaatcgtttttcttggtttcagtgcatatgtgcaaatggaaatcctgcttacgtgactataaagatagacaggcagaagtttgcaaaaaccagccaagaaagcaaccgtgtgtggaaccaaacttttcagattcaatgtgctcatccagctgattcatgcatcaccattacccttaaaacatcgcgttcttccgtattgggaaaattccata

SEQ ID NO: 35942 - DNA, 516 bp, Glycine max
  Clone ID: PAT_MRT3847_132459C.1
aaaaaaaggggggccaattaccgccccctaatttttcaaaaaaacaaaaaccccggaaaaggggcccgcaaaattaaaaaaaaaataataaaacttattacgaaaaccacttttggggaagggaaaaaaaagggcctttggttttggcacaaattacctttttttacaggagggaaacccatcagcccccatggcaaaggattatactacaattttggggccccatctccctttgggggggccttattgggggggggggataaaaaatgcgaggaatgcaaaaaaaaagaatttctttaaaacatcctttgctcaactttttggacgggaagccatttccatttggcacctttgcctgcccttggggcatgaccaaaaacacatttggggctcaaaaagaaaaccctcttcaaattgaaaataatttgcaggacccgtgggctttgcttgaacaaaagatgggggacttttcctggccatgggaagaactgctctgaacaagggtccccttttttt

SEQ ID NO: 35943 - DNA, 274 bp, Glycine max
  Clone ID: PAT_MRT3847_13245C.1
tggccatgtcacctggctgctaggccagagccatgccaggctgcgtccctccgaggcttgggataaagcaaggggaccttggcgctctcagctttccctgccatctccagcttgttgtcccaatgaaatactgagatgctgggctgtctctcccttccaggaatgctgggcccccagcctggccagacaagacgactgtcaggaagggtcggagtctgtaaaaccgagcatacagtttggcttttttcacattgatcgattttatatgagataa

SEQ ID NO: 35944 - DNA, 256 bp, Glycine max
  Clone ID: PAT_MRT3847_132460C.1
tctaccactcgtacgaccacatacgggaaggggacatataggagctctgcccgttacttctgaggctggacaacatgagggtacatatccccaaaaacaacaactgggagctgctgacttactcaaataccaccagcaccactatgagatgacatcacaccggggacacacagtctctctctaaaaaataattcaactttatgcaaatacataagatatgaaccaccatggtttcgaggagtactcctacatattt

SEQ ID NO: 35945 - DNA, 325 bp, Glycine max
  Clone ID: PAT_MRT3847_132461C.1
ggctgaccaaaccgagaaggcttttttgaaacatctctaagacgctctcagcttgaagaaaactgataaggcaaagagacccgccatgggaggcaaccgctcttggatatccattgagcttgtaattaagacttcgagtgaagtcgatcatagaacctacattgacaagaagagcacctacactggcaatgtctacatacgaggctcgatcctggctggaacatgttacagtgctatgaagaacaggactatcacagctatgaggaattatctccatgctatcaagaagtaccacgaggacgagactcagcactcgaatatatcc

SEQ ID NO: 35946 - DNA, 402 bp, Glycine max
  Clone ID: PAT_MRT3847_132462C.1
gttctatctctgccacatggcatgccaagttggtggtggaattgcaggtttatatgaagtcacctttctttacaggcttacccctggtgcttggcccaagagctatagtgttaatgttgctcaaatgagttgtgagtgcgtctaggttttcgttggccacaagggtatgattttgtctttggcaatgtctcctggtggtttctatatggtatctagcgatgaagatggcatcatcatgatgtgggatctctctagtagccgttgtctcacacctttgattgggcacacatcatgtgtctggtccctcgctttcagttatgaaggttctattatagcatttggatctgctgattgcactgtaaaattgtgggatgtaaatacgagcaccaaggtttctagggc

SEQ ID NO: 35947 - DNA, 1087 bp, Glycine max
  Clone ID: PAT_MRT3847_132463C.1
ctctcctctacttgcttgaacatgaaagcttccactctacccttatacccaacccctcttcccaaaacctccctctctgcttctcatttctctcttcatctccttccaatggcttccattcccacactctccctttcaaaccccaacaaccattgcactctccctcccacctctctcttcggcaccaggattactctcctacgcgccacctcatcgtcccgttccctccccaacaccaattgccgtgccacgtcagcaaccgtgtcgtttagcctccccaccccgaaacccctttcggatactcctgagaaaacaccaaagtggtcggcgagggctataaaatcgtatgcaatgggggaattggaagcgaggaagctcaagtatccaaacacgggaaccgaggcacttctcatggggattttggttgaaggaacaagtaaagctgcaaaattctcaagagctaatggaattactcttttcaaagtacgtgaagaaacagtagagctacttgggaaatctgatttgtttttcttcagccctgagcatcctcctttgactgaaccagcccagaaagcccttgattgggcaattgaggagaaattgaagtcagatcttggctactctaggttttgatgatggaaaagccaaagaactttctaaaaaaattgatggagatgtttgatttaagtttcaaaaggcaagcttaagaaatttcttgcagattgatggttgattaatacccgttgatccttggggttgcaagttcctcttagggaaaattaactatactccctcaagattatcaacaagtacctgtgttaatgttatttcaaatgctgtgtcgtacaccattttggggatgatgtatttcttattcttttttaatttatccaagttttgtggaagttaattttttagcagtgtgtgatggtggaattgcagtcacacactgcatcatctctagtctctaccctgttctgtaacttatcaccctgtaacttatacaagttgtatctgtatcattttgctaacaccaaaacttttttactacgaaatgaattaattgtaatggactgtcataagatct

SEQ ID NO: 35948 - DNA, 634 bp, Glycine max
  Clone ID: PAT_MRT3847_132464C.1
tcgggattcctacgcctaattctgattccagaagcatctaccactcgatctccccacacctcctcatctgtctcggtcgcagatgacagagatcgtggtcgatggagccaattccgggcctagggtgctcccttactgtcagatagaaggggctggagatgggctcgccgactgtccagccccgcgcacgtgagagagagcacctcccaaaaactagcccatatcaaccaactacactagctctaacaaccaagagctatgtagagagaccaaggacatcccaaagaaatatggagatcacatcaagaaccaggaattgtggtaatcacgctacattgctagaatgaatggaggcctgatattcttgaaccaaagatattgctggagagaagcgtatgaggagtgtgtataactgcatttcgttcgtagcatatgttgaatgttatctcaggagctcaactactcggatgcaaggtgctttcgctctgcttagtcgaactgaaaactcggtgaagattgtataatagctacaagaccataatatcactgtgccaccgatactacaatgcgttattatacgatactatagatgactgattaatactgaataagaatgataccgtctacattcttg

SEQ ID NO: 35949 - DNA, 425 bp, Glycine max
  Clone ID: PAT_MRT3847_132465C.1
cccacgcttttggccacgcgtacaggactgtgttggactggtttggcaccgtcacacgttcattgttcgaaccgttcgaactggaacttctgtgtggtgtctggtagtagccagcagacagagggggacatggtttgctaattgggataagaagatgaatcttgcaagatattccctggccgctttatttgctcccataagatgcaatgtcgttaaaagcgatggcagatacacattcggtctatctcataggaacacgtgcatctataggctgttttctactcatgctcataaacgacaactacaggagaaacctgaagaggatgccatatactaccttactgcttggtttagtgttgctacaatgattgaatgtacagaccatcactacatgactttagcgcgcctcatataacaacatgctt

SEQ ID NO: 35950 - DNA, 620 bp, Glycine max
  Clone ID: PAT_MRT3847_132466C.1
aagaagatagaatcacagagttattataactgcattcgttaaaagactacttgtacagatttcttaaccagcctgttgaaaacaaaaataattatttctcccctgttataagggaccaagtccaccatccctgacggcgaaccattgtcaacagatttgaatacctgaccatgtactcaacatgaagaaactttatttaaggatgtttccactggccatcccacgacaaaccaaaatctgaaccacatgcgatgaacacatttgaccgccaacacttgagagcgctaatcacaaggacttcctatcagaaagggggcactggtgacttgaggctcacatggtggatgaacacagcgggcgagggggtctgtatataactcgcaccatgaagtccttctggaaccccacttgtctttcacctgcctgcacaagctaaaagccatgcttgtaactaacacgccggacctactgcaggataaagatggcgtgcacgatgcctcaggcgctgaaacataactggatccatagaagagcccgcaacctgcatgtgccggctttacctcgccagaaggaaaccgattggggaatgtctcagtaaccacacggccgattggagcaac

SEQ ID NO: 35951 - DNA, 320 bp, Glycine max
  Clone ID: PAT_MRT3847_132467C.1
agcgactctgatggatacgtacacggtggcatacggggttcctcgctcgaagtggttggatttggcgggtcatcagaaggacctgaatgcacccgctgacgaaattgataaactagtcattgactggctggacgagcaccttcagaacaaacctttgggtgaatacgttgaaagtgatatcacactttatgcacgtgatgatatcagcacctactagttcacaggtcgattggtctgatgctgacaccatatcctcagcgacaaccttgaagtcgatcctgtcaggaactgatactgctactgcgattctcacacgggca

SEQ ID NO: 35952 - DNA, 302 bp, Glycine max
  unsure (1)..(302): unsure at all n locations
  Clone ID: PAT_MRT3847_132468C.1
atcgattcttctcccttctcttttctctctgcgacaccagatgatggagacnacggcgaangaagacgctgtacgttncgccaatacgcggcgttgttgttggtggtgctactcgcggcgagtgtggtggtggaggntcaggagaactcggacgtgannacgctgtgaagcanatgcacgngaagaagtactgngacaaaggatgggaatgnaagggctggtnatttangttgnaacctcactattacggattattccagatnnncatttntccantcantnnccaagggaaanngncagtg

SEQ ID NO: 35953 - DNA, 922 bp, Glycine max
  Clone ID: PAT_MRT3847_132469C.1
ctcgagccgcataacacaaacacaacacaatacacaaaagcagtaaccagagaaaatggctagtgtcttttctgcatgttcaggttctgctgttcttttctacagcagaaactcctttccctcaaaaggatctttcattcacctcaaaaggcctctctctgccaactgtgtagcttctttggggactgaggtatcagtgtctccagcagtagacactttctggcagtggcttaaagaagagggtgttgtctctgccaagaccccagtgaagcctggtgtggtgccagaaggcctaggattggttgcactcaaagacatttctaggaatgaggttgtcttgcaggttcctaagaggctgtggattaaccctgatgctgtggctgcttcagaaattgggaaggtgtgcagtggattgaagccttggttggctgttgcattgtttctgataagagagaggtcaaggagtaattctctttggaagcattacttcagcgttctgcctaaggaaactgactctactatatattggtcagaggaggagctctcagagctacaagggactcaacttctgaacacaactaggagtgtgaaacaatatgtggagaatgaatataggagattggaggaagaaattatactccctaacaagaagcctttcccttctcctcttacacttgatgacttcttctgggcatttggaattctaagatcaagggcattttcccgccttcgcaacgaaaatctagttgtgattccatttgctgacttcataaatcatagtgccagagtaacaacagaagatcatgcttatgaaattaaaggagcagcaggtcttttctcctgggactacctattttcccttaggagccctctttctctcaaggctggggatcaggtatatatccaatatgatttgaataaa

SEQ ID NO: 35954 - DNA, 1072 bp, Glycine max
  unsure (1)..(1072): unsure at all n locations
  Clone ID: PAT_MRT3847_13246C.1
ttttacgcgttttttcacacggacaatccgggtttgatccctggcactgaagaaaattttatgttttttcgtttttggacttcatttagtcatttctgttatacacagttttggggtccatgttattagcaagttacttgatttgattccaaacgtaagcttgtgcgccactcttttagtagttaacacacacatttgtttgttgtttggaagcaatacaaattccaatcgctgagctgagcgaacaaaaccgcatcagcaaatagcatgttgtctacatttggttttgtttcttcatcggatatgtctgatgtgtcacgccggaaaatgactagaacgaccagaattcacataatggccttagacggcatcgtgaacgtgaattcactcttcaccttagccctcttcctcggcatcaccaccaccagcaccaccaacaccctcatcggcgaagacgacgcagcctgtgcagccggaacctccatgtcggagggcctcattgcgttccacgtttactccttcagctcctttctattttccagcctcatcgccttggctctcaaaaacgtcatcaacttcagcaaggacgtccacgagggtgacgccgttctggacaacaacaacaacaactggattcacagtgttgcaaaaattaacactgtcgttttgaggtttggaactctcgtttcggcttttgggtcggtgttcggatgcgggtttttggtgatggctcttgtggatttggtgcagatcaagttgggaaccttcacttgtggtagtcctcacaccttcgctgccgtcgctcccttgcttgttcttgtccccactgcacttcnnntctatgttgttctcgtcatctatgcctttactcgttaattaattaaagcttttacattgctaagtaataactaaattaaaaatgatcgatgatttaattgtgtttaatgagtcgaagtgaatcatgttatgaattaaggctgaatcaaatgaacagaccggattcgaagtgctttattcaattttattttattattttggctaggaaattgttgtatgattgtatcattcaatt

SEQ ID NO: 35955 - DNA, 268 bp, Glycine max
  Clone ID: PAT_MRT3847_132470C.1
attaccatcctttattatggaacggatattccaaaagtgtatagatatttcttaataggattttttatattttggaatagttattttgacatacctatacatttcatataaaatcttattccaaaataactcttctgtatagatatttcgaaataactattgtagaatatcgaaaatctgattctggaatagcatgtttagatattttaaatatcttaatgacatcaataatcaataatatattgaaaagaacttagagcgacaacat

SEQ ID NO: 35956 - DNA, 650 bp, Glycine max
  Clone ID: PAT_MRT3847_132471C.1
aatccgttatgacccagtgcaccgcaccaatcttgatgtgatggacaaaattggtaaagaggaggaagataggatggtggagttcagaaaggatttatttgttctgcttcgcaatgtgggtcgtgtagcgcctgatgtaactcagttgtttatcagaaattcgttagcaagtgctgtttcaagatcttcagatagcaatgtggaggaggtggaaggtgcactttctcttttgtatgcacttggagaatccataagtgaggaagccataagaactgggagtgggttgttgagtgagctggtgcttatgcttctatcgacaaagtttccttgtcactctaataggcttgttgctcttgtttatttggagacagtgacaagatatattaagtttattcaggataatactcaatatattcccatggttctggctgcctttctcgatgaaagaggcatacatcattcaaacatcaatgtaagtcgtagagccagttatttgtttatgagggttgtaaagtttctgaagatgaagttggtgccttttatagagactattttgcagagcctggcagatacagttgctcaattcactattatgaattattcgacagaagagctatcaaggtcaagaagatggtagccacatttttgag

SEQ ID NO: 35957 - DNA, 512 bp, Glycine max
  Clone ID: PAT_MRT3847_132472C.1
gcttaggaaacgcttaatatttcttttactatgaaggaaacaatcgctctggtgcgaagacacacttacgctaagaaaggtggtatattgtacatcaaaccaagttgatactgaaaattttgggccattattatcttaccctgggggacacgactcagtaagagagaacctccaggaacagcgtaaattcaaacctaacttgggtgcggataatcgaacaagcttgtctgtaacatagtacaatcttgctctactgaccttcaggagggttaccactctgatttctttgatgattggtgagtaaagtgggaagactatctaacccttgtgccatgaggaatgtttgaaagccacctgttgagcaaataccagcactgaagctttgcgatgacaacaccctttgagtatggacaaacgacccttgttgacaggaacctcccttttgggttggacactatccccagtcctgatgtctggagtagacctatgcttgtcagaggcctcacgggccc

SEQ ID NO: 35958 - DNA, 634 bp, Glycine max
  Clone ID: PAT_MRT3847_132473C.1
atattaaaaatgttttaaagagtatatttcttttatacacataccattactaggaaaacccacctgtgggttaatgttagagcttggagctgtgggttcaaatccacctggaacactttgtcaatttctaaacccacctggacctaataccttggaaaactatatatttatgtaataagaggatgtctattatattaagagaacaattttatgaaaataaaatatttatgcatcttaaacataattactaattaacattttaattacttaggagcgtgttgcaccgtggattgtacaccatgacacttatgatcagcaatcgatgattttgtgaaccattaaataattaacaagaggctccaagatgtatgccacgaaccaggtaatgtggcttcagcaacaatactacgaacttgaaatatatgagtgtatttttagattaaaatttactaaagtataacacgagacttgtttctttaaaattgagttttcaaacaaaatttgaatacgtaaacacacttgtgaaggtaattaaacaaattattgaactatttttattcttttaaaatacattcaacactcgaaaatactttttgaatgatatgattaatcaaacacgccatgaaaagggtac

SEQ ID NO: 35959 - DNA, 216 bp, Glycine max
  unsure (1)..(216): unsure at all n locations
  Clone ID: PAT_MRT3847_132474C.1
caaaaactcgaatactatctacaactgggcggacgagagcagngaagggcatacatatacaagatgggtcggctgctgagtaggcactatacttacagaaacagggtccttattgatggcaacaaatttcacgcacgacaatgctggatgaattagcgatgttagcctgacacagatatcctggaaatgttctggaaacttagacatccacagctt

SEQ ID NO: 35960 - DNA, 213 bp, Glycine max
  Clone ID: PAT_MRT3847_132475C.1
acctaattcctaacaataaagaacatatttccagtaaaaacttatgcactcacccgtttattagtttacaggggccggcgtataaaaatgacccgccgtacctggatcgaataataggatatttagtgcttccactttaccaggaaagggggttctcttcttccctgcttatgaacctatgagtcctatatatcctcaacatggggcggtgcc

SEQ ID NO: 35961 - DNA, 1134 bp, Glycine max
  Clone ID: PAT_MRT3847_132476C.1
agctcggaattcggctcgagatttgctttgacggcccacacctatgactcaagaaccacacgtggcagttttctgttccatgctgaactcagcacaaggactttagaagaagtgaaaaaccagaaacagaacaactgaaaacccgagcaaccagagaaagaaactgctctgggtctctgtcttgatttgattccttcaatttctctttggggttattacaagataaaaaaaccaaaattcctggggtggccgtggtcaggatgagttctagtttgtggcgagaatggacgggaatcaacaaatgggtgcttcttcttctttcatggaagatattgattttgatacaaaagtttttaagttttagagaagaatggaagggaataagcaaaagggtacttcttctccattcacctctgagctctttgggtccaaagagtctcgtccctcttcttcttctgggatttttggctccattttttctcctccatcgtctaaggtgttagggagagagtctctgcgctctgaattgagtggcaaaattgccaatgaaacctggagctccaaaatttgtattcaagataacttctccaagggtaatggtagcgaggctcagaatgctgtgaacaaggatatgagttccatctatcaggatcaaagagtccaaccatgtcaccttagttcatcaatttattatggtggtcaggacatctattctagtcctcagagtacacagaatgagggattcaactctatgcattgcaggaatgttgatggagaagatggttcagaatttgcttcaagaggagactggtggcttgggggtctctattattaagttcactcttgtcaaggcatgtgcttctcacaagttatagcaacggtagtttagcaatataggatatgttgaatctatgggaatttacgtacagtatttattttattttaaaggatactatccctttctcattgtaaaagttgtataggaatattgatgaatctcagctactcttgtgtggctgaactttactttaattggctaaaggatattattcctcacccttattgcaaaaagtttatagggattctatgcattatcagctaatcttggggggctgaacctttgcaattatttac

SEQ ID NO: 35962 - DNA, 544 bp, Glycine max
  Clone ID: PAT_MRT3847_132477C.1
tgtaattcctgagtttccatttcaggtgtggagtttgagacctcgtgaccgtggcatgctggggaaaggagtttcagtagggacttttttctgcactagttgttggaacaatggagatgagctatctgttgtgtgcttgaagaacctaaatcctgtgctgccagcaatgccacgcctccaccaaatacatgcacttatagagcattatggtcctactgttttctttcatcctgaggaagtttacttgccttcttctgttgattggtttttcaataatggagccttattgtaccgaaagggcgtgtccacgggagaggccattgatgcagctggctcaaatttgccaggtgggggaagaaatgatggggagttttggatagatttgccaagtgatgataaaagggatcttgtcaaacatggggacttgaagagtgctaagctttatgttcatgagaagcctgctctaggaggaacttttactgatattgctatgtggggggtttgcaatttcaaaggaccctgcaccctgaaaaggggaattaca

SEQ ID NO: 35963 - DNA, 818 bp, Glycine max
  Clone ID: PAT_MRT3847_132478C.1
ccacgcgtccgttttgatacaaaagttctagtttttggggagaatggaagggaataagcaaaagggtgcttcttcttcattcacttctgagctctttgggtccaaagagtctcgtccctcttcttcttctgggatttttgggtccattttttctcctccatcgtctaaggtgttagggagagagtctctgcgctctgaaatgagtagcaaaattgccaatgagacctggagctccagaattggtattcaagataacttctccaagggctatggtagcgaggctccgaatgccgtgaacaaggatatgagttccatctatcaggatcaaagagttcaaccatgtcaccttagttcatcaatttattatggtggccaggacatctattcaaatcctcagagtacacagaatgagggattcaactctatgcacaggaatgatggaggagaagatgattcagaatttgcttcaagaggagactggtggcaagggggtctctattattaagatcactattgccaaggcatgtgcttctcaaggtacatagcaagatagtctagaagtatagtccatcttttgttatatggaagaactatacagcatcaaaagggttgtggacagcaagttgctttctctggctttgagaaaatcatgatatgatgaatctatgctcccccacccctcttttttattttattgtaaaggatactatcctccccctattgtaaaagttgtataggaattctgcgcattctcagccactcttgtgtggctgcacttcgcaattattcactttaatggaagacactctcttgtcttc

SEQ ID NO: 35964 - DNA, 435 bp, Glycine max
  Clone ID: PAT_MRT3847_132479C.1
ccgaacggttccaagaggactacaaagggggaaccacacaactcatcaactggaatagtgaggctatcttttcttggtgttttcttgcatgtggcaattggggtgacagtgttcatgactagtgggagtttcaggggcactaccacttttaggcctgtagatgctgtgtactttacaatggtaactctgggcactattggatatggagatattgttcctgactccacgtttaccaagatctttacatgtggtttcattttggagggatttgggatttcttggacttttgctcaatggattggtagcatacatttgtgatacacactaggcattcttgttgggcatgatggatgagaatagatattagataattctcaggacttatatggtagatgaatagtatggaagtttgagaatatgaaccaaagtttgtct

SEQ ID NO: 35965 - DNA, 647 bp, Glycine max
  Clone ID: PAT_MRT3847_13247C.1
aatgagactgcacatacatacttacgtgtatatagaaactttttcttccatcataatttctatgtagtctccaggagggggtaccacgataatgaacaaaattttctgatttacaattttcaggagttctcacttctcagcttagaagttaaatgtctcaggaaactctcagtattttgttgtagtaaacccgatattatggaggacaagcaccattagaagatcgatcagattacagtgccattcatctacgatattagtagggcaattctgcaatctaaaagaataaaaaccacttgatggcagggaacagaggaatactgagacaggctcgtaaggtatcagaataatgagatgtcatcatgaaagtaaaataggcccattctcagctgccgttgaggttttgccataattattatgatgccttgccatctgaatgtcacgtgaaaaatgggtccttgccttcgcatatggggctgctcttgctgccatttgctgacctcggaggatattttggcgcccttttccaccaacaaaatgaacagggtataagaaggagaaatgtaaaagaagcccttattcaatgcccattttaccaccgtcagaaagatgagggtcacatgtaggtaattcaggtaaaaccacac

SEQ ID NO: 35966 - DNA, 385 bp, Glycine max
  Clone ID: PAT_MRT3847_132480C.1
atcagtgtatccatattctcgaaatcattcgcttttctataacccctgttgacgtgctcaagtcgtatagtgcagtgattcgtcgcttaatgaaaaaataaaatatatttccaccgatcgccagaatcggtcatacagtgatttttgttaaaatgaatatccgaccgttcggtcaggccggaaccacgttgctcataaaatactgaggttgaatatttatcttgtaaccaaaaaaatatctatttagtaaacgaaagcggaaaatcaatcggacgttttctatctgagagtatctgattcttaattgaactgactaaaaaactaacgcgaaactaaagctgatatcaacttggctagtcaagctcgaacacaaaaatacggtttt

SEQ ID NO: 35967 - DNA, 731 bp, Glycine max
  Clone ID: PAT_MRT3847_132481C.1
ggctcgagcaaaagaaagaggaaacagaaaacggtagaaaggaaacaaggagagagaaaaaagagagaagcaaacaaattcaatcagatcgaatgctatcttgacgtccgcagcaacagaccactctctctctccccttctctctctattttctctctctaaaaagacctcaacagaacagagccccgaagaagaagtagaagaagaaaccctaaaaacaaaggaccagctcaactcaactcaactcaactcagcaactcttcatattcttccacacaattcaaattcttttttcattttttctctctctaaccactgtttttctcttcggtttcaactcgagactcatgtggaaggtgtttgaagagtgcacatttcagtgtttgggtttgttttggaggcacagcgagggtgtggaggagttttttgggttgaaatgaaacgttgtgtcgattaagatttagagggtttgtttgtggacatgttttgtgtactaggctgtggttattattattgttgggcttaggtttgtgaaaggggcagtgatagtgaaagaatggtgcctcctgggccacccacgccgattggtggtgcccagcctgtgccgccgtctcttttgaggtcgaattcgggaatgttggggggccaagggggccctgtgccttcacaaacttcgttcccttcgctggtggcgcagcgaaaccagtttaacaacatgaatatgctaggga

SEQ ID NO: 35968 - DNA, 311 bp, Glycine max
  Clone ID: PAT_MRT3847_132482C.1
acaaattcatttattttatattgattcttgtgacattctagagtggggacatcatactctaggtttagctacccttatactaattatttaaaggcaagtgaagggcatcatttgtagcgtgtataaataaaggatgcatgcagcgtagactaaacacccactgatgggatcctaagctgagtcacgagccttgaaagagcgaaatgatattccaagacgggagggactctcaggaaaggatctgcctcctacaaattaccacgctctcaagttagaagttggccataccaaagagatgacaggggagggct

SEQ ID NO: 35969 - DNA, 667 bp, Glycine max
  Clone ID: PAT_MRT3847_132483C.1
ttttttttttttagcaatatgagagtgccaataactaggcccaaactcgggaagttacagagtcaaaatcagcccaaaaagacaggcttaaaaaaagcacaacattggaaactctaacattgctgtctatattcaatccatgtttaacaatcataaatctcacgaaaacataacggaaacgatgaggcacaggaatgtggagctctgtttttttttttctaagtgaagagaaagcattgaaaataatcttccagcatattaaagctgtaagcagttaagcacagaggaaagatgcccaaattaacatagggatcatgctaacagttattcaaacaactatccaaaggcaaaattctcaaaatacctccaaactcacaagcagcaaaatgtccgagtaacatgggttactataccctacttacatctctcatatatacatatataatgtacaagttaaccttgcactggaattaaaagttcatgtgaataattcgtaaccttagatatcactatcagcacaggttcagctactacaaagaagtggctgagcatttgcaaaaccaggtttagaagttttgcccaggaatcataaacgaaattttattcttgtcttgggcaccgcaggtaaggtcatctcttaacatgtagcaacaatatatcaagagac

SEQ ID NO: 35970 - DNA, 281 bp, Glycine max
  Clone ID: PAT_MRT3847_132484C.1
gatttggttgggcctgcttgtggggtgttgaggaatctcgttggtgttgaggagattaagaggtttatggttgatgagggtgctgtggtaacattcattaggcttgtgaggtccaaggaggaggcgattcaggtgaattcgatagggtttattttgagtattgcttctggggatgaattggttaggcagatggtgatcaaagagggagggattcgcgctttgttgcgtgttttggatcctaagtggtcttattcttgtaaaaccagggagtgacaatgagg

SEQ ID NO: 35971 - DNA, 1679 bp, Glycine max
  Clone ID: PAT_MRT3847_132485C.1
ggccaacaaggcacaagatctgcattggtattgctagaggtttggctttcttacatgaagaatcaacattaaaaattgttcacagggacattaaggcctccaatgtgtttctcgacatcgtctcctgcccatgtgtggctgatctcggtcttgccccgctcgttgtgggcggcaatacgcacatctgctctcccgtagcgccctcttagttcggctatttctgtcccccatctctcctcttctgcgagtggcagcatgtcgccaggggctatgggtgggttcgttgtcgctcctgttgttctcctcttccgactccttctggggcggtgaatttatatcggctaagcactttcttttggcttggtgttgtcggagctctatctgcttgcggtgttgttgtcttcgcgtctgttctgggttgctgcctccagctttggcattgcctggttgtttggcggacgaggctgtggtcctgtcttttggggctgttgccctggtggctggatctgggctgtccagttccttccacccatcccagcgcgaggcattcctgcgtctagattgggcacaggcttggtttcagccttgcagcacccttgtcttgttaaactacatggttgttgcgttgaaggagatcaattgttgctagtatatgaatatatggaaaacaatagccttgcacaagctttatttggtaacggagcatctcaattaaaattgaattggccaacaaggcacaagatctgcattggtattgctagaggtttggctttcttacatgaagaatcaacattaaaaattgttcacagggacattaaggccaccaatgtgttactggacaaagacttaaacccaaaaatatctgattttggtctagccaagctcgatgaggaggacaatactcacataagcacaagagtagctgggacttatggatatatggctccagaatatgcaatgcatggttatttgacagacaaagctgatgtctatagttttggagttgttgtcttggaaattgtatctggaaagagcaataccatccaccgatccaagcaagaagcattgcatcttctagattgggcacatttattgaaagagaagggtaacctaatggagctagttgatagaaggttaggttcagatttcaatgaaaatgaggtaatgatgatgatcaaagtggcgctcctatgcaccaataccacttcaaaccttaggcccaccatgtcatcggtgcttagtatgctagaaggaaaaactatgattccagaatttgtttcagatccatctgagataatggatgaaatgaagttagaggcaatgcgacaacattactttcaaaaagaaaatgagagaagtgagacacaagagcaaaatcatagtttatcaattgaggggccttggacggcctcatcttcatcggctgcagatctatatcctgtccacgttgattcttcctattgggagaaaagaaattaggaatatgtataaattttacctatatatctaggtggtattctttgttatttcatccccttgttttcctctttaagcaccatttttcatgcataattgttatatattcaagtatcacaaagtcatgtatcttccctcttaatctagtggtcttagtgggatcaaacaaggtcttatacaggagaaattattagatgatttat

SEQ ID NO: 35972 - DNA, 919 bp, Glycine max
  Clone ID: PAT_MRT3847_132486C.1
aaggagaggaaaaggaagtcattgtcaatagctgtaaggaggagcaaaacctaccattaaatactccctctatggcacagtagtgaaagaaaagagacattgagctgcgcacaggcattcattcatatggatcagtgtggagataaagaggatcacgagggtctccctttaattactccaaacatgcatggcttgttcccctttttgttaatttctatgtatcaagatgttggtaccctctctcaggatttgcttcaatgaaaggggttcatcacttttttcatcacaagtatgttggtttgagaggttgaagctgccagcatgatctggtaaatcacatacttttttttttctcacctctcatgcctaatttttaagcaccagtcattagagaaaataatggtgaaaaatccatctattcaattttttttttcaaattcaaggtttccagtatgtatcactaatggtgaaaaaagtgatggaattttgtagaacatgggttaaatttactttttttttttttgagttttcattttcttcaagtttctgagccaagaaataaaagagacttataaattggaattaatacttaaaggaaacccaccagaagggcaatttggttatcataagatgtggtttccatcaggtcatcttgcagcttcaatcactcaataaccaacagattagtttctcaactcatgaattccggtactgttcaactacaatctcaatttcaatttcagtttactcctcgatccctacttagttctggttctccttggagcagttcaatggttttatagacctctacctttttaacttcattcttctatgggtgaggtaataagtattaatttgctttgcatataatttgagtttcaacgttccttaatttggagtgataatggtatcataaatc

SEQ ID NO: 35973 - DNA, 242 bp, Glycine max
  Clone ID: PAT_MRT3847_132487C.1
gttacaaccaggggtaatggtgtgtgactggatggtgatgtaactgggccagtgcatattaacgtacacaagttatgccagcatctgctctatccagatgcagactctctgccaactgaactcgcggttcattgagctgctgaaaatacgaaagcagacgttgacaattcccgaagtacatatactagagcatacatcaatctcaaatcacatatacctgttggcatgcaaatgatgcctac

SEQ ID NO: 35974 - DNA, 867 bp, Glycine max
  Clone ID: PAT_MRT3847_132488C.1
ccacgcgtccgttgcaacttaacgataaactattctatggaggataaagaaggagagactggactagctgagttagggtgagttgcaggcagtgtcatctctcctttgacgacaagatgagcatcccaattccccatcggcagttattcatagacggagactggaaagtccccgtcctcaagaatcggattcccatcatcaacccttccacccaacacatcatcggggatatcccagcagctactaaggaagacgttgatctcgctgtcgctgccgccaaagctgccctctcccgcaacaagggcgccgattgggcctccgcttccggctccgttcgggctcgctacctccgcgccatcgctgccaagatcaccgagaaaaagcctgaactagcaaaactcgaagctattgactgtggaaaaccgctcgatgaagccgcctgggacatcgacgatgttgctggttgctttgagttctatgctgaccttgctgaaaaattggacgcacagcaaaaggctcatgtgtctcttcccatggacacattcaagagttatgttcttaaggagccgattggagtcgttgctttaataactccttggaattatcctctgttgatggctacgtggaaggttgctcctgctctggcggccggctgtgctgcaatattgaagccctctgagttggcatctgtgacatgtttggagctcgctgaaatttgcaaagaagtcgggcttcctcctggcgtgttgaacattctcactggattaggacctgaagcgggtgctcctttagcagctcatcccgatgtagacaagattgcctttactggaagctctggactgggagcaaaattatgacagctgcagc

SEQ ID NO: 35975 - DNA, 556 bp, Glycine max
  Clone ID: PAT_MRT3847_132489C.1
aaaaaaaaaaaacctttttttaaaaaaaaaaaccccggggcgggggggttccccggaaaattcgggccgggtcctgggggggcaccattttttttttttagggggccatataaaactggggggaaaccagggtcaaaatgtttcctggggaaaaattttttttctcccaaattcccccacaatatacgaccggaaaatttaaggggaaaacctgggggggccaaagggggggcccaccccaattttttggggtgggcctcccggcccgttttcaggggggaaaccctggggccccctttgaattaaaaaattgccccccccccggggaggggggtttctttttttggccccccggggggtttttttttttacaagggaaaggggcacatgtgtttggccttttccccgcttgccccgaaaaaagtgaaaaaagggggtccccttttgtttttcccccaaggggaaaaaatctttttgggggggggtaaacgggggtaaaaaaaagggacttgttttggatatcggtccccccaccccgggaaatatccccccaaaa

SEQ ID NO: 35976 - DNA, 807 bp, Glycine max
  Clone ID: PAT_MRT3847_13248C.1
aatcttactttatcttcaagtcgaggaccttgggcgaggcactttacattggtcaatcagtgttgtagttggtttcccttgttcaattttcctcactttgatcgacagcactcgagcttgttttagattttaataccccgacgacttccatcttaaaatgcctccatcaaagcgttcaaagcacagacgtatgggctctaacacttctacggaagagaagagtgacttcgaagctcgcatgaagatccctgccgagctcgttaagggcccttggaagaagcaagaggacgaattgcttgcttctctcgtggaggaacacggtcctaaggactggtcaaagatcgcaaacaagatggcgcagttgggtcatgttagaatgggaaaacaatgccgagagagatggttcaatcatttgagtcctgaagtccgtaaagaatcctggaccgccgaagaagaccgagttattatcgagtctcaccgccagttgggcaacaagtggactgctatttcacgcctcctgaatggccgtcccgctaacgcgatcaaaaaccactggaattctactttgaagcgccaagttcaattcggcgctgaaattggctccggcagccctagacccggcaagagacaacgcgccactgtcggtcaccagccccgaaagaagagaagactcgacgtctctagctatgagtccgatgaggactttgactccactagcgatgagatggatgacgacgattctgagttggtcacatacgagagccgaaacgaggatcaagaagatcagcgcacctttgctacttcccc

SEQ ID NO: 35977 - DNA, 620 bp, Glycine max
  unsure (1)..(620): unsure at all n locations
  Clone ID: PAT_MRT3847_132490C.1
aggagagactggactagctgagttagggtgagttgcaggcagtgtcatctctcctttgacgacaagatgagcatcccaattccccatcggcagttattcatagacggagactggaaagtccccgtcctcaagaatcggattcccatcatcaacccttccacccaacacatcatcggttctcttctttcccattctctgtctctcatcagatctcaatctcaatctcaatctccttccttgtcttctcaatgcaggggatatcccagcagctactaaggaagacgttgatctcgctgtcgctgccgccaaagctgccctctcccgcaacaagggcgccgattgggcctccgcttccggctccgttcgggctcgctacctccgcgccatcgctgccaagatcaccgagaaaaagcctgaactagcaaaactcgaagctattgactgtggaaaaccgctcgatgaagccgcctgggacatcgacgatgttgctggttgctttgagttctatgctgaccttgctgaaaaattggacgcacagcanaaggctcatgtgtctcttcccatggacacattcaagagttatgttcttaaggagccgattgnagtcgttgctttaataa

SEQ ID NO: 35978 - DNA, 485 bp, Glycine max
  Clone ID: PAT_MRT3847_132491C.1
cagatacttattcagacatgactcacattcaacgtggtgtcgggtgcatttaagttttgccggacacggttgggctgttggacatgcgcaattggatccatctgggtgcgaacacgtgcagagctcctcgctgccgcacgcaaagcacgccgtcactgcgctcagacctctgtcgctgtgcgtagaccgggtaaatagaaaatgaagaagaaacctcgtggccatagtgaatagccttcatcatggcttaacaactgtctatgctgctgctaatgagtgccaccaccttcatcgtcatcgctgcttccatggcttagtagtgttgcgtcttaggactgcacttactggacaaacagaaaagcagcagcagtaaaaatgttgcgttttgatttctcttgctttctgttgggctgccctgcctagaaatagaaagactggattgcttgtgttatttacacccgcactaccaataaataaaaaattgc

SEQ ID NO: 35979 - DNA, 329 bp, Glycine max
  unsure (1)..(329): unsure at all n locations
  Clone ID: PAT_MRT3847_132492C.1
acaannttatttnncccgaggaaagatctcattacagtggtaacaacagtccaagtacagggattttatgaaaaaatatttggcccggctacaatatacacagcttggggtgtaagcctcaacaaacacaacagtgaacggcaaccttagcgacgccgtcgaacactttattttctccggggaacaatatagatctttgtttttttatttccaagattttacaaaattgattaaatttggtcgcaaaaaacccggcggtgaccggtttctttaaccacgcccccaaaaactttagactctttgcgggtgggtttatccctttccatccc

SEQ ID NO: 35980 - DNA, 918 bp, Glycine max
  Clone ID: PAT_MRT3847_132493C.1
ccggaattcccgggtcgacccacgcgtccgccttctcttaagctcccgtagttaaatctgcgagccattagttaaagaaaaaaaaaaccctaaaaagtttaagatgggttccaaaactcgctctttccttgctcttttcctcacgatcaacattctcttctttgcccttgcctctgcctgcgggacatgccctagccctaagccaaggcataataagcacaagcctgttaagccaagtccttcaggtggctcaggtggttcgggtggttcaggaggctctggtggttcaggtggctctggtggttcaggtggttctggtggttcaggtggctcgggtggttcaggtggctcaagtacctcttgccctcgtgacgcactcaaactaggagtgtgtgccaatgtgctaaacgggttgttgaacgtgactttaggtcaaccaccagttaccccttgctgctccctcctcaatggtctcgttgatcttgaagctgcagtgtgcctttgcactgccctaaaagcaaacattttgggcatcaacctcaaccttccaatctcactcagcttacttctcaatgtttgctcaaggaacgccccacgtgatttccaatgtgcctaaatcatggcctatgctatgcacaagttgcttcaatacgtgtttgctagctagttctggctttctgttgtctcttttattttataaatttcattgctcatgagtcatgatgcgattcttgtacgtgcatggatggttaacttctcgttattctgtcgctttaattggtgtttgtttttatttaacaaagtgtcaaattaaataaattcccgatgctttcttatgcaaaagcaaaaggaatcaaagatgatactagtgttatttatttgacagataaatgattaatgttgcgaacaaaaaacacc

SEQ ID NO: 35981 - DNA, 186 bp, Glycine max
  Clone ID: PAT_MRT3847_132494C.1
ggccgactagctccacttcccccggccgtcctttttttattttttttaaaccaaaaaaatcaggggggggattaaataaacactcgaaccacaaacctacaccggtcttttgaacaacaaaggtctaaatgaccattatcgtatccctttattacataagcattccaacaaccaacctttaaaata

SEQ ID NO: 35982 - DNA, 547 bp, Glycine max
  unsure (1)..(547): unsure at all n locations
  Clone ID: PAT_MRT3847_132495C.1
acttgacctttataagaatgtgagtgaaaaaaatattatagttataaaacaagtattttttttcttttagacttaatttaatttacgagtttgttaaaaaaaattgtcttaatcattataaattttttcaaattataataattaatcacagtttactattaacgtttggatatatttgttgcacctgttatactttcagggactaaattttgtattttcatctttccgggatgcatttgtcaacggtgtgggaagacaaaaagtaaaaaaaaaatattatatgacaaatatgtttctatgctggcaattagagatagtcacattgacaatcatttcagagacaaatttgtccctctgtgccacgtaagctattatattaacgctgacgaacaaaagttaaccgtcagatatatttgtccccgaaattgaaggattcaaggtgattaaaattgttttgtaaattgggttggtttatgatggattcaatgtgttgtatatagttgaagagaatnaactgattaggactttgggtttggatatgggnggg

SEQ ID NO: 35983 - DNA, 406 bp, Glycine max
  unsure (1)..(406): unsure at all n locations
  Clone ID: PAT_MRT3847_132496C.1
agggtggagcacattacggtggataggggcaagcttgccaagatcatggcagacttcgaggcctggttgaaggagttagagtccaagctgaaggagttcgagcagcgggcgactagggagagagaggtcaggcagcaacttgaagaagagttgctgatctacaagaatgaggttttggagcagcatgagaaaggctttaaaaaggttgtcaagcaggccggattcttccaaaaggaccttgacttgggtctttttgaccctttcaattgtttttggaaggttattatgactgaatttgattgtcaatgtttttcaaaagacctagtcaattacccatgcatttagatttgtcgtgctcatctttatacatgttctaaaatcacttaataatatggntattagtttt

SEQ ID NO: 35984 - DNA, 555 bp, Glycine max
  Clone ID: PAT_MRT3847_132497C.1
aagtttgtttgaaagagtatgtaaagagagtttgttattagcatttcccttattattagtattatgttgtggttgttctggaagttgggaggtgacacttgttcaatatgaagtgagaatgaattgggatttatgataatattcgataaattagatatttttggcacaagtgataacagcttgtgtcctttaaccaagtaatccaaggatcgattcctggttggccattggatatggaataaattgtgttggtaggagaatacccaccttgtgtgcgctcagggtcccgacaaagattagttatgacttttggcgggattaatttgtaccaatactatggtcagcacaaaaaaagatttttgttttatttcctcattacctcattaccttttgcttatactgtctatcatgataagagccaagttctagcacttaactgacttaagtcatttcaaatacaaagctcacaatcccatctaataaatataaagataaaggagtgacatctgtctcagataattccttgcgcaccaaaaactgcagagcaagtaggca

SEQ ID NO: 35985 - DNA, 370 bp, Glycine max
  unsure (1)..(370): unsure at all n locations
  Clone ID: PAT_MRT3847_132498C.1
cccacgcgtccgcgccaggcaaaaaatggaactgtccgagaagggaggagtcatagtgagtgtctaacatgcgggaaacttccgcatcaattattcattcgacattccttgaatttagtgttccatcggagcgaaggttgaaatggcgatgtcctaaacgcgaacctgcgacgcctccgccacgtcgctaacagaacggaaggatatgaatgagggaagaaagattgtgtttctcaatttgacaacaactttgtttaccattttctaattaattttcgtaatacatccaccaatttacaattattttttcacatcttttgacttgtatttcaatttctcactttacattaaataaaatgaataccccana

SEQ ID NO: 35986 - DNA, 633 bp, Glycine max
  unsure (1)..(633): unsure at all n locations
  Clone ID: PAT_MRT3847_132499C.1
tcgaaaattggcgttggcttaggagccagcgagagagagagagagagagacagattcaccggtgaccggtcggtgttgttgattgaattcacctgacgttcaacgcatctctgtcaatgtctccagtttggagaatcattccgtttattcggtgaattataagatagagtggaagcaaaggcttctttcttccttttggtggcggtggcggtggcgatggcggaaggggaagagcttcggcctgacttgctgaaaaacacgccttctaacattgcgagattggaggacgtgatcgaacactctaaagcaaggcaaaagtatctcgcccatacttctagctcctctgatggcggtgatgttcgctggtacttttgtaagatctctttggctcccaacgagttggcagcctctgtcccgccaacagagattgtaggcaagagtgactattttcgttttggcatgagagattctttcgctattgaagcatctttcttgctgagagaggaagaaatgctttctagttggtggagggaggtgatgccgaatgtanttgaaggcccccagagaaacgacaaagattcttagttccaagggcagatacttgaatccttttatgggaacatactccaatca

SEQ ID NO: 35987 - DNA, 263 bp, Glycine max
  Clone ID: PAT_MRT3847_13249C.1
cacaccttcatccttgtccaactatttccctacagttctctgcaacgctcgacagtttaataggacagtcataaatcaaaacttattatatgctatccatgacagccatagaaatgatcttagaccactcaattccactgattttgatgacatgattcacagcggagcttactttgctcaaaagttccagaacgatgatcctgtgcttgatctcattgaccaaaaacttttgggtcgaagtcctagatcaattgttcccggtg

SEQ ID NO: 35988 - DNA, 166 bp, Glycine max
  Clone ID: PAT_MRT3847_1324C.1
ctacattttgctataatgaaggtccaaacagattttgattgcagattgtaacgataacacagaaactttcattacacaataaccaaaaaaaagaaagtttctgtgttatcgttaacatctgaacaaaatcgtatgaccacatttctgctataaatgaatttggatg

SEQ ID NO: 35989 - DNA, 355 bp, Glycine max
  Clone ID: PAT_MRT3847_132500C.1
ccacaggggctggaaaattaatggtttatttttaaacaccaaaaaaatagccttccaaattcaacctgggggggggcccccggccgcaatggggaattttccgggaaaaaaaggcccaaaacacatttaaattaaaattttggggggcttaaaaaacccaggggggttggaaaaagtcccaaacccttttttttataaaaaaggggggggccccccaaaactttatggggggggggggcgtgggtggaaaaatatgggaaaaaccccatgtgcggggcgggaaaaaaggccttaaaaaaccttctttttccttgaactggggggtttatctccctaggcttagaagccctgtttt

SEQ ID NO: 35990 - DNA, 283 bp, Glycine max
  unsure (1)..(283): unsure at all n locations
  Clone ID: PAT_MRT3847_132501C.1
ctctctctttctctttcattctttgatgcctttctacaaaaacacaacctnttaactgttattttttgttttttcgtttgctcctnattttcttcgccgaatccnanaatgtcatcgccggggtnccctggcggcggtantgcgtctgantttttcgctggagcgggtnttttcggnggcagatccattccgggggccaccatgaanaaccccaacgccgccgcttccgcnaccatnaacaacntccaccntctctacngaacccaacaacaacagaaccttc

SEQ ID NO: 35991 - DNA, 417 bp, Glycine max
  Clone ID: PAT_MRT3847_132502C.1
gaggaatatagaccagttgctttcgtactgcctagggccaagcaagtgctgggtcaatgatgtcaggtgtgttagttgcgccagctatgagcacaggctttctggcagacatccatccatgtgatcaaagttgagtagaactcttcagggccaccaggaggagccccacactgcttcgtcgctgaggtgggaggggagcggaagctcatcaaagtattatgacacatggagccgattgtctggacttgcaaaagatttttctaaattagcttcagtttcgctatccctcgaagcgttctcgacttcagactgggacgtagcgagacattcacgcagcgattggtacaagccttccacatccgggcggaccatggaaacgtactcctttatatttgatacagaccagactaatcaaac

SEQ ID NO: 35992 - DNA, 395 bp, Glycine max
  unsure (1)..(395): unsure at all n locations
  Clone ID: PAT_MRT3847_132503C.1
gcaggaaccgggccggactcttcgggncgacaggaaagcccggagaccacacggaacacgccgccagacagaaccgggcagcgcgccgcagagcccaagccacaggcagacccggaggacactggcgcccgacaagggaacggagaaaacgccgggcagaaaaacagggcagaagctggctgttcaaggaggagcgannaacnngagagaagaacaaaggagataagaccccaccgagagagagcgcggagcgcacaaagccgaaagaagacgggcaaccnggggccgcaaacgggagagaggaacagggcgacgagaaagcgaagaggaacaccggcagggcaaggagcaagncgcgaccgggaaaccagaggcgagacacaccgaaacaggac

SEQ ID NO: 35993 - DNA, 221 bp, Glycine max
  Clone ID: PAT_MRT3847_132504C.1
ttaaactctcaatcactcccactggagttgaaacaccttattctatcaacctcctgaagcaacacaggaaggagccttataagcctctttatcaattactcgaagataaagaataaaaaattgctcctataactttacttggaaccactcacacttatatcactaccactagcacacatatacaattaggacctaataaggctcaacttcctagagctcaa

SEQ ID NO: 35994 - DNA, 350 bp, Glycine max
  Clone ID: PAT_MRT3847_132505C.1
agacgaggctattactggattcaagatgcatgcccgagggtggaggtctatttactgcatgcccaagcgccgagcggaaaaaggttctgctcctatcaatctttcagaacgtgtgaaccaagtgcttggatggggtttaagttaggaggaaattctttatagtccacaatgccccatctggcatggttatagaagagggctaaaggggcacgagaggttcgcatatgtgaacaccacaatctattcagacgctatgatggcaattgtcatgtattgtaccttacctgctgactgtgtgctgactaacacggtcattattacacataacagaaacatcggacgtatatgga

SEQ ID NO: 35995 - DNA, 361 bp, Glycine max
  Clone ID: PAT_MRT3847_132506C.1
tttttttttttttttttttttttttttttttggtttttttttttgttgggaggggggaactaaaattaccctggccatggaccagggggaacagttgcagggtttttaacattaatgcatccaacgttgtcaaccagaagggaaaaaatgtacatccttttgcccttttccctttattaaataacacaacttaaaaacgggggggcggttgggccacaaactttgaccgtagttaatttaacagtcggcaacattaaaagggagggggggattaacctgttccatttttatccccaaaaaatggaaatttttgttgtttggcattgccaagagttcctaaatttttaaatttagcaattcc

SEQ ID NO: 35996 - DNA, 420 bp, Glycine max
  Clone ID: PAT_MRT3847_132507C.1
tggcttggaacctttgggctgatttatgtgcttgtttatgtgcttgcatggtcgtgagaagatgatagaaggggataatactactactaataataagtagactaactctctctctctctctaattacaacagctacgggcccgaaggaggaccccgagtagcacgtcgagaaagtaaagatcccgttattgatctaactaaatgaagatccgtccacttcccacggaccgcataaataggttattgccggattcgctaatattagttgcttcggaacgcctaatacgagggatagagtcaaacgggacgtacggaaagtcgccgaaaggaaacttaaggatgaagtaacgggcgaccatactaccaaggcgaaatagtcgtcggaagtagtcggtccgttcgtccgacaataccgctacg

SEQ ID NO: 35997 - DNA, 609 bp, Glycine max
  Clone ID: PAT_MRT3847_132508C.1
aattgtagagtggctgttggctggggtgacaaatctgtggctgctgtgtccaagcctttctgactacaaaactaatcactgaaaggactgaaggacaaggctataagaatactgtaataccctctaacgagggatcttgacagactgacaccatctttactacgcataacatacatgaacaatcacaaagtcagaggaggtctatgggaacgaaaagagccgcaccatcgaacctgcgatatggacatttactaatacggcctcatatcataggattcgggcactaagaaggactcagtcgaaaaatcctacagtgtcatgtgccaaagccctgtctccttgctcgggggtatgacaaagcatgacataacccccgatagggatataccgcttttgacatgcgcaacagtgcttatactactaaagacagaaagccctagtgcttgggatcttgccctgaagcatgcctggtctgaagttcaaaatactttctaccataatgacggttcctaccataggcctctgtgattctcctacttaacataggatgaccactgaaccattcctatgcatggttcgatggctactatatacaatggatatttgcac

SEQ ID NO: 35998 - DNA, 345 bp, Glycine max
  Clone ID: PAT_MRT3847_132509C.1
tttcaaacgatatgatatggagggtgtgtgatacgtggaatagatgaccaatcaagcactgtgggctcttaaggtggctcaatctgttggcggcgctgtacaagaaagaggtctggaccagagactctcagctggggaactagcgggtgttgacgtgttccaagcttgggtaagttgaatgctgttctaaggaagtttattaacaaaatttgtgaccagacctatcgtgatgatgttcgcacggtctggtgcaatgaactcacgagagatttttagaggataagctattgttggacacttggttggggtgatcgagatgctttattagactacgaggcgactcat

SEQ ID NO: 35999 - DNA, 285 bp, Glycine max
  Clone ID: PAT_MRT3847_13250C.1
atggatcaattccaatctcaattgggggggggggggatgtaccaagagtttggggcaaaaaatttcatgccttattatgtcaaaacatcctatccaacttcatttacaacagggtatggatatcccaagatcattaccataactgatgggttgactgacatatgatacgtttatggtcataaaaatgaattgtccataccctactcttagttgaccagcctggggtattaccactcctagcaaacttcgttttcaaaacatctgcatcccaagaagagctaacaa

SEQ ID NO: 36000 - DNA, 319 bp, Glycine max
  Clone ID: PAT_MRT3847_132510C.1
ggaaaatgttcatatgtataagaagttgcttgttgatgtagggaggagaattgtggggctggagatgctgaatttcgagattgatttcaatgaaaagctcagggaacattataatttgttgcgcccgaagaaagaattggttgacgaacaagaattgcaccaagagccttttagttgctcttacaagtgaaaaggaagaatatgcttaatgtgccttttcttacaactggaagaggatcttggttacccacgagaatactaacattgtgatcactggagagaagtttcaatgtcttacacccactccatgggtaaatga

SEQ ID NO: 36001 - DNA, 542 bp, Glycine max
  Clone ID: PAT_MRT3847_132511C.1
ggaaaatgcttctacgactgataggacaagtagagagaagggaaacattttacatgttactcctgataaagttgaagaaggcacacctgctaatcctacatcttctcataaacaacagaagaaagctaagaaaattattcaccgtggctctgaccgtgtaaggtctgtggatacaacagaattaattgatcccagttcagagcttagtggtatacttgctggaaaattgcctaaatccccaaccactagaagctcttttgcttatgatggcagcctctcttcttatgatggaatggatgagccgttccctatccaacattcaggttcattcgacaacacttacaccaatgctaatggtgtttctgagggaaggaccagaaagggtaaaggccttgtgaatagcatatatggaggccttgaaacacaacatcaatcacatatgtccaatgcaaagcttcatgccaagaaagacagcagggggaatcaaaacaaagtggtggactctacaagaaatggtcatcaacgttggatgggcacaaaga

SEQ ID NO: 36002 - DNA, 746 bp, Glycine max
  Clone ID: PAT_MRT3847_132512C.1
attcggctcgagtggtatcccccttaatgcaaccgattacaaggtggcctttctatgccttcttaggtggggccatgttctgcttgctagccagcagcacatgccacctccttacttgccactcacagcgcctttcctacatcatgctcagaattgactatgctgggattgctgcattgattgcaacttcattttaccctcctgtgtattactcatttatgtgcaacccctttttttgctacctctacttaggcttcataacattaatggggattgctactattgtcttctctcttctcccatttttccaaaagtccgagttcaggaagtaccgcgcttccctcttctttttaatgggattttctggtgtggcgcccataatacataagttgatattgcacaagcatcaacctgaggccttgcaaactactggttatgagatactaatgggagttctttatggtttgggagcagcaatctatgtcacaaggataccagagaggtggatgcctggcaagtttgatattgctggccacagtcaccaactctttcatatcttggttgtggcaggggcatacacacactatcatgatgggttgatctatctaagatggagagattctcaaggttgctaggttgatattagtgaatcttcatcaatattaactaagatatcaattggatggaaagtgaatcaaatcaagaaaatgatattattatctagcatatcctacattgttctttgc

SEQ ID NO: 36003 - DNA, 221 bp, Glycine max
  Clone ID: PAT_MRT3847_132513C.1
attcggctcgagaagaacctaagtgagtaaccaagaaaggccttaattgctctttaaaaatgctcagtggagataaagctgttgagtccatcaaggtgttagttgtagatatatcatgcttctatcaatgcttgatatggaggcaatcaaggccactgtccagagaggacggctgactagacatgacggatacgtgatccgatgcaataaggagtttgcaa

SEQ ID NO: 36004 - DNA, 416 bp, Glycine max
  Clone ID: PAT_MRT3847_132514C.1
gagagagaggaatcatctcccaaaccctggaatggacgatatagaaaaacccgagaagagaagcagagatcgtcactcggaacgccatcgcgactccgatgagcaccgccaccatcgatctgacaggaatcacaagcgcgaccacaaatccagggacaccgaaggaagcaaggataaggatagggcttacgaaagagaaagtagcaggtcgaaggtgaaacgcgatgaggagagggaatattcgcattctcacaagcggaaggagagggagcacagcgaggacatggacttcctggataataaaattagggtttctgacgagaggagggaacgaaggaagtttggggataaagtaaaaaaggaggaagatgatgcataagaagaagacggtggtgataatgttagagccgttcacg

SEQ ID NO: 36005 - DNA, 952 bp, Glycine max
  Clone ID: PAT_MRT3847_132515C.1
aattcggctcgaggccccatgaagcgaaattgcaaaaacgtcaacctaggtggcggcggaaagctaggtactgcctgcgactggagtgagtggttcttcagacatatctataacgctgtttctgtgagagcatcaatggcgacaaaagctttgtccttcgctctgtctctcaatgacctcaccaataaccacttctcttccaatacgccacacaccgccgccaaagtttccgtctttaccgtcaaatgctcttcttcgggtggtggagagaggccttggaagaattcagatgctagacttgtgcttgaagatggttcaatttggaaagcaaaatcgtttggtgcttcggggactcaagttggcgaagttgttttcaatacatcattgacagggtatcaagaaattttgacagatcctagttatgctggccagtttgtgctcatgacaaatccacatattgggaacactggcataaattttgatgatgaggaatcaatacagtgtttccttgctggtcttgtaattagaagtttgagtatcagtacctctaactggagatgtaagaagcctctgggggattacctagctgaaaggaatatcatgggaatttatgatgttgatactcgtgcaatcacgcgccgattgcgtcaagatggcagtcttattggtgttttgagcactgacaattccaaaaaggatgaggaactgcttcacatgtctaagtcatggaacattgttggtaaggatctaataagcggagtatcatgcaaaactccacatgaatgggttgataaaacaaaacaacaatgggagtttagtaaagtgcctggagagactttccatgtagttgcttatgattttggaatcaagcataatatacttaggcgcctagcatcttatggctgccaaatcactggtgtgccatgtacatggtcagcatcagaaactttga

SEQ ID NO: 36006 - DNA, 276 bp, Glycine max
  Clone ID: PAT_MRT3847_132516C.1
ggaagtaaaagaaaaacccaatagatcactacgcagaatggtttcttcaaccgggaccgcgggtttttcacccccagacagagaaattttaagatccaacacggaacctttaggagtggcaacatcatcaagagacaatttaaacaaattgtggaccatcagagcctgaacctcacaggattgaggatctattgattgtcaaaaacgagcaccaatcacaattggggtcttcgctgaacaacctaaccaggaaaagcaactgaagaatgggaacca

SEQ ID NO: 36007 - DNA, 293 bp, Glycine max
  Clone ID: PAT_MRT3847_132517C.1
gatgaatgatgatagagatcgaaccatagattgctgttgaatagcttacaatggatcgacaatatgatgtaccggaaaacacccagtcttgagctaagagtgaataaacagcaaagcgttactgttcaaaatgaactgaattgaacgcttgactccagacggagatgccttctgctgatatggacgccggaagcactgtcatgagactgctgaaccacacacaaatatgcatgcaacactattcttacctgtcacacactcttctcagtgactagaagatggatggctaaatt

SEQ ID NO: 36008 - DNA, 266 bp, Glycine max
  Clone ID: PAT_MRT3847_132518C.1
taggtgtgcaatttgtccatgtcaggggtcaatcgtaggttccatctgccatacctacccatgcactataccaaaccttaccaatccatttctaaatctcctccttttttcccccgggaggcttatccaatcaatcggtccattttccttattagctttcatcaatcaccggcttcatcttaaaggccaaccgttacctccccactctaaacctctcaacactttcccataaacaaccccatgattcctttccacaattctcccta

SEQ ID NO: 36009 - DNA, 123 bp, Glycine max
  Clone ID: PAT_MRT3847_132519C.1
aaagcaccaaattttcctgggattccccactttgtaatgcacacccaccgtaatcaattatcacaccaaagtcacaaagagggctcaaacatttcccaaaatcaggagggaaatattttaccc

SEQ ID NO: 36010 - DNA, 476 bp, Glycine max
  Clone ID: PAT_MRT3847_13251C.1
ctttgggctgatttatgtgcttgtttatgtgcttgcatggtcgtgagaagatcatagaaggggatatccatcagcagcaagtgcggagcgtctaaagactcacgtccattttccttctcgtacgactccctctctccttgttatctttacctctggccgcggtcatcgcggtaaattttttaaaaagtataagttcggcaaaatattaaagatatttaaaatatttgccgccaagttattagctattactttctttaccaacgccttctttgccgcctccttattaacagcgaagtttttaggcacctctttcttaaccttaaccaccaatttattaattatattagggaagggagggaatatcttacgtttattattaaagttcctcgtgtaggtcatgcgttttaccgatatgtctaaatccggcgttcgcgcggactcctccggagggccggcctataccggccccggggggg

SEQ ID NO: 36011 - DNA, 313 bp, Glycine max
  Clone ID: PAT_MRT3847_132520C.1
gagtcactcgtgctaaagatggaaaacagcctatggtctatttcagaaggcggcggatttttaagccagctccaatatcccctcatatctctgaaagaaaccatcctagtataagtgcatccggttctgttgcctttgaccatatgtttggtggggttgagaatgtgaaaaatccaattgacaacagggttgaggttgggggcccattgttcttcacttacaaggctggagtatcaaattttttttgggacatggagtcagcatcattcaaatttggctttaactttccaatgcgtttggtgtcgagtgactc

SEQ ID NO: 36012 - DNA, 525 bp, Glycine max
  Clone ID: PAT_MRT3847_132521C.1
ctcgagccaaatcacgatcgaggggacaggtgcttgccatagcatacactaccagaactggacgatccacatgaatactgcgttcggtagcacaggacagcactgaagtgacatgatccccttggaagctaggggtggaaacagaaacttatctatgtggcatactagtgactgcaagctagagagagagtacatactctgactacccatctatagagaccaacatacatcaatattcataacagataaccaacaggctaatgtctatcgcttaaggcccaaactcaccaacaaattatgtcgggagtcgatggactagtgacgacaacctactcgtatctaatatacaaaatactgctaaccacgcataaactgtggaaccacacattactactgtatgaaacaactgggttcttgatgacgaggcatatcaactgccagagactcttaaaacgtacaacaaactgttgattctgactaataagattgactctttatcaaacagaccactgagtctatgggatg

SEQ ID NO: 36013 - DNA, 305 bp, Glycine max
  Clone ID: PAT_MRT3847_132522C.1
tccccccacgcctcactaccgcttgcagaagaccacagacggggatcttaagcctggactctttttttttcttggtacacaatcggacattctctttttattatttttcaacctttttcttttttttgcaaaaaaaacaatttaattcaatcaaattcctcccaaatggcttcttaaggttgtgaaactttggcttttatcaacggcgatgatgggttggaaatcaacggtgcttttttaatggccctgatgggacaaccatcaccaaatggtgaaaagtgtgatgatccattggataacttgat

SEQ ID NO: 36014 - DNA, 379 bp, Glycine max
  unsure (1)..(379): unsure at all n locations
  Clone ID: PAT_MRT3847_132523C.1
acaacaggagcagtaacaggaagagcaatncctttggaagtgcgtgaaatatagagccgaattgtctgaacaagatatatttgtaattccagtaggttattcagttgtggttaatgctaccttaaatctgaatttgtttgttattggtattaatgccgagaacaaccagaggaactttcttgtaggttcgtaagacaatgtgataagccagatacctagttaagtgcaggaccttgcattttctgggtatggacaagctgttgagaagttattaaagaaccaaagagaattttactttgtggatgcttagtctaagaagaaagaggaggggaataagggaagaaagggttctttgttttgaattttgagggctttttac

SEQ ID NO: 36015 - DNA, 264 bp, Glycine max
  Clone ID: PAT_MRT3847_132524C.1
cttgacagtttgatcactgatgatttgatgcaaactggtaattcctcacatgatgaagttgaggatgttgaggataaacttgtccctgtctctgaagaattggctgaccaactgaatggcatgggacatgagtccgaggtagataataataagaacaaagggagccttcttacttgtgatgtttctaatgaatctcaggttgatgcttcggctgcagttctagaagatatcaacaataatatttctgcaatggtcagcatgttc

SEQ ID NO: 36016 - DNA, 470 bp, Glycine max
  Clone ID: PAT_MRT3847_132525C.1
tttatccctgctagaactctgcttcattacattgcctgttgacttctgagtatagtgtagctgccctgttggctttttcttggatgttaattgttaggtgagtaaaaatttaaaggttttggtaggaggtgaggactgcaaagctttattggttggggcatgctgtatggtctatctggttgaagtgaaatatatggaatttcaaggagatatattatcctctatgaagccccgataattaacagaagatgggtgtccgatatggcatggacatggtgatacaagaaattcttaatttgaaatacattataacatagctatgtcacatgcaacacagttatagaaaatataattgaattaatgctaaataattggaaaaaaaaatacagctgtgtgtgatttatttcaatggtcagtgaagacgacacattgatagtcagtcagtgaatatgtgaatagatgcaatatga

SEQ ID NO: 36017 - DNA, 822 bp, Glycine max
  Clone ID: PAT_MRT3847_132526C.1
ggagccttatagatagggtgatggagtgttaccctgtgggagtggcagcgcgaagtttcattgtgcaggttgccatgaaactcataattcgtgacagcttcgtttgctacacaaagttcagaagagaaatagtgacggttttggacaatctacttgagatgccgtacaggaactgcatagctgctttcaatatatacaagaaagcagcagcgcaaacaaatgagctttatgagttctatgagtggtgcaaggcaaagggtctgtgtggtatgtacgagtaccctttggtggagccaattccatacatacaaatcaaggctttggaaagttttctgagtggcatgtggcagttaacggagtcttcaacgtcgccaactaccagtaccagcccttcatcttctggggattctccttcaaatttctctcaaggacaaatagtgatgagaagagacgttgttaacatcaagggtgaagaggagaagcctttgattgaactagaattggaagaagataatggggatgttagttgggaaacactgttggaaacctccattagttttagtcatgcttatcagagggacttgggcagcttgttcaatcatcggggatgggaaggtggatttcatatcgaacaacatggctttgatgcgaacgaagggcacgatcacgagcgtgcagatgccacatggaacatggcagtcaacaaaaatactactgctaataacccattctccgagccttattaaagttcccttccaatttaattacagtttcattatcattgaatttcccttttgtgttgttttttgtaagtgaggaggt

SEQ ID NO: 36018 - DNA, 160 bp, Glycine max
  Clone ID: PAT_MRT3847_132527C.1
ttttaatttgccttctacctcccaagtgaaacccttatttttgtcttcggataacttcacaaaacttccaggtaacttttctttgaatagaaaatatagtgacacaacagtacaaaaactagtttattgcttctccgctgctcaatcaccaccaccatca

SEQ ID NO: 36019 - DNA, 257 bp, Glycine max
  Clone ID: PAT_MRT3847_132528C.1
ctctcgagccgaatcggctcgagcttcatgacctgtgcccaggataactccaacattaatgacgctgaggaaaattcctgcaatgaaattgacgagtggtcatcatcaccgcacatggataaattggccaatcaagtgagctccactggctattcttcccagatgtttactccttctcgtggacaaagagttcaagaacaagggccggattcttttgatgttatatggtgaatactttcttgtctatatttttggcc

SEQ ID NO: 36020 - DNA, 385 bp, Glycine max
  Clone ID: PAT_MRT3847_132529C.1
agcgactaatctggagggaccagattcccataattcttctttattctgctcctcactcagggttttttccgatcagatggggcaatctctactactaggaagctaaaaagccttcttttagggcacaataatgactatattaattctctgatcccgaggtcgtcgcacagagattaactctcagggtgagatcacccacacgtttggggggccgccgcggcggtcttctgtgaacgaagcgcggcaaactgtgggtgaattgagtgaacaagaacactgacaagtggggcatggacttagcttccttctcccctccccaaatcaaacgcatccttagggttgcttcctcggaccatcttcttctcttcgaagctcttatgttggt

SEQ ID NO: 36021 - DNA, 466 bp, Glycine max
  Clone ID: PAT_MRT3847_13252C.1
agtcgtagccacactggcggttggaggcatcatttgagcgggatcacctcgtgcgcggcataatgttgatgctcacacgtgctttagtccctacgcatatatctgactttgctctgggaccaaagcgaagccctgtttctggtggctcatttggggcatctggtggtagtggttgagggggcggttcaaactatgaaggtggctggacaggtaattattatcagaccgggcatcgagcctttactccttgttctataacaggacgagttgaagcctggaacaatgatggtcatagcgaacattcgtatggagtgccttttgcttacaattccacacaacgtcctagccgtagccatagatcttataatcttagatgcgacatgtgggatcttgctagacttgactgtggttatctcactggatgcttttctaataatacacctgattctcctgatggattaatcaa

SEQ ID NO: 36022 - DNA, 736 bp, Glycine max
  unsure (1)..(736): unsure at all n locations
  Clone ID: PAT_MRT3847_132530C.1
gaagatatgctgttaggaagggatgggatttngnctgaggctcaatggcttcttgatacannncntcatccaaactccanttctgcaacaaaagcaattggttacagacaagccatggagtacttacaaagatgtagagagcaagggggtcacagttctgttgaagaattttacaaattcttgtttgaatttcaaaaagcatcacggaattttgcaaaaaggcagttgacctggtttcgtaatgaaaacatataccagtggctcgatgcttctaaacctctggaaaccattctcgacttcattcatggcgcataccatgattggaatggaagtattcttgtgcctgaagacctaagaatgtcgagagatatttctaatcaccgacaagctgcacaacttaaggcttaccgcaccagaaataggcatttcgtgaacggggaagattgtactcatattctgaactggataagaaagacccaaaggtgagatggatactttctttatgcattcccttgaaatggccttaaatttggaattatttaggcggctatataaagttttcaggttgaagagaaagttttattcttattgccgtttcttgattacatccttctgtcttttcgatagaatactgtaatgacaacctaatctgtaagccaatttctttcccctcctttcacctgcaaaccaatatatatacgagattgtctctcgatgttaagttaaaaaaaaaaaa

SEQ ID NO: 36023 - DNA, 443 bp, Glycine max
  Clone ID: PAT_MRT3847_132531C.1
cggatgcttccgctgtcttagagcatgacagagtgagatctgccatttcgagatttgctaagtgactaatacttttatggttaatatacacgcactgtgcctcacatattctaatgtgctctttactactgacatctgtgagatgcttagttctttctacttaaactcaacacaagacatgccttcgcctgaaatcgagtacgaaacttcgtcgttggtcaaattagcatgaagtatgctttcatatttcaagattagacatcgcgctgttacttgcctaggctgacaataacagtactgcaactgccctgatcctagctccatggattttttatttaaccacggtgcatgtgtgaggtgtcatagataagctgtggcatctgaaggatagtttactacaaaacacatatataataccgttggggcctacttcacacacatat

SEQ ID NO: 36024 - DNA, 201 bp, Glycine max
  Clone ID: PAT_MRT3847_132532C.1
accagctgctgctgtggttatggggaccctaagtagaagatagatttatagtgtgctgcagggaagtgttgacgagttctgctgtgaccactgtatatcagactctgttgttattgttgctgtagaaaatgctgtacatgcgtaaatcctctagaagaattatgttgtaaaaggctgtgtttttattatcgcatttgtttt

SEQ ID NO: 36025 - DNA, 223 bp, Glycine max
  Clone ID: PAT_MRT3847_132533C.1
gactgaagacagtctaaacttgccagaaaaataaacttgggtggaagggcatgcaccgactacaacaaatccgactctggcatagaatcagttagctcatgtagaactagacaagataaacaagccgcatctttcattaacatctggggaatatatcctcgaaactcacgtaactatagctgcatctattataattctgagtctagctgtatgaaacccaata

SEQ ID NO: 36026 - DNA, 414 bp, Glycine max
  unsure (1)..(414): unsure at all n locations
  Clone ID: PAT_MRT3847_132534C.1
ggctgtgtatgaatagaaagaggggttgagaaaggttttatcttgtcatttgagagagaattgggggcctttgggcattggaaggtgcagaccctcgaagttcactaagtaggcactgtattgaggggagaaatcctctattctttctaacaagataccaggtttctttcggatttgaacaaaacaacaaaagaaacatgctaacatcaggttagaatattgtaattctttatttgagaaaatttggggggtattgaggattntttntattanttgaaaagctttctaacattaagaaaatatttcatgatctaacatancttaagatttaggattttttatttattataataattcctgtggttgtgctgtttcgaatctttcttaacaagattattgactaattttagttta

SEQ ID NO: 36027 - DNA, 307 bp, Glycine max
  unsure (1)..(307): unsure at all n locations
  Clone ID: PAT_MRT3847_132535C.1
aaagaaaaaaaaattgtcgctttctggtagtgttggcgaaagaagttcattttttaggagaatgcgggttgtcttcaaattttgctgggctcgttttgccaatgtgaggaagaattgttttggggaatgaagagcaaatttgattggttgagtttaggggtgtgttgatgaatctgcattntaagttctacggggagtagtgtggtgatcatgtgtgcctattcaagagaaagcatgtttcttataatgagttgtcgcaccatcgctgagaacgatcgcatctgctggacttccatggttatcagaa

SEQ ID NO: 36028 - DNA, 221 bp, Glycine max
  Clone ID: PAT_MRT3847_132536C.1
tcgtcctttttttttttttttttttttttttactatgaaatggtggaaacaattcccattgggtattctgcaaataacagtacctttgaccattttaggccatgtggaaaaaaaattgtgactcaaagcagccaaatcgcactaccaacgcccgaggggggactacaaggctctggggggaagcgcgtggagggcgggaaccaaagggaaaataggggggg

SEQ ID NO: 36029 - DNA, 528 bp, Glycine max
  Clone ID: PAT_MRT3847_132537C.1
tggtgttgcgattctctttctccattgcaaaacctaacaagcgagagttcgatcacgtttgatggaagattcacacagcaacactgcagcggtgcaagccaccaacgatgacgcctccgccagcaaattgtcatgtgtgaaaaagggatacatgaaagatgattacattcatttgttcgtgagaagacctgttaggagatctccaataattaatcgaggttactttgctcgctgggctgctattcggaaacttctatatcagtttcttgatgttgagaagaagtcagatgaagatccccctataaagaagcagatattatcacttggagcaggttttgacacaacatattttcagttgcaggatgaggggaaagcaccttatttatatgtggaagtggattttaaggaggtaactagtaaaaaggcagcacttattgaaacttgcagcccattgaggaataaagttgacgagacagcagtcatatcaagagaaaaaggagaagtgttcagtgctcactataaactact

SEQ ID NO: 36030 - DNA, 269 bp, Glycine max
  Clone ID: PAT_MRT3847_132538C.1
ggtcaagttgcttcagactgcgctcttcaatggccacccttggtgttgataaccaggcttcttctgctcaagatgctgacgctctcctacacgctttacaaggacgtgcggctgatcacaccgccataatcgctctactgcgtcacagagatgatcatcagacgcaagaaatcattttagcttatgtcgcgatatatccagaggatctcatcatacgccttgagttcgacatctctagtgactattacagagctttgtaccgctggatg

SEQ ID NO: 36031 - DNA, 2029 bp, Glycine max
  unsure (1)..(2029): unsure at all n locations
  Clone ID: PAT_MRT3847_132539C.1
ggactcttccccgtcgatcctctttcaggtgcccatattgatcaatgaaagaataagcctcttagaagaagctgttcttaactttctattcttttttgtatgattatcggtctggtgacgacgtgagttcacagtccgaaaaaaagaatatggtgtggggactcttccccgtcgatcctctttcaggtgaagataagtactacattttcaagactggactttacaaagttggtcgaaaaggttgtgatgtaataatcactaaagataaaggagtgtctcgggttcacgcagaaatagttgttaatacagtgaacccggtaaatcctttaccaaatgaacgctctcatttgtcaagcagtatacatattagagattgctccaagtatgggacatttattaacaagaatgggggggccaagaaaaaagttcatgagctaccaaacaaagaaacagcattagagaatggtgaccttgtttcttttggcactggtactgctacctacaagttttgccatgtacccctcgtttttttcatctgttcgtcaaataaagtggatcaatcccttgaagagaaaatttcatcaattggtgctagtattactcataccttaggtgaagggtgcacacatgttttggtggatcaactcatgccattgaagaaggatcttgttgatgctgttgtggccaaaaaatcttgtgttctcaaaaattggcttgagttttttgctgaaaagaacattagcacggaaattcctagctgtcattcatatattccaacagtgtcagcagaaggagagtctattaaaattgctgaccccagaatgcgtgaagattgcttgaaaggatacacttttttgttggaatctgagcatttgtataaatttggggatcagctaaaacctttattggaagtggctggtgcaaaagttgtttcctctgaagatttttcttcaaatagccaaggttctgattatggagaggataatcatgtggtttgtgtcatcccaggaggaccagcatgcaagtctaatctcttcaataaactaagttccttgcttagagtgaatgagatggatgtaatatgtgctgctttcagtggacagttagatctgtctattttgaaatcaccatgcgtactagtttcatcatcatgctcgacagatgagacaattgtagcagattcagatattgaagttgaaacagccacatcagtccgctcaaatgatgcattcagcaatgacaataatgtaaaatatgaaaaaacaaaagaattatatgttgattctgaccctttggataagagaaaacatgagagaatagaggcatcctctgatgatgttttgcatgacactaaacgtgcaaaaactgaaacatccttggatggtgcttctgtcagatcacattctaccagcttcaggaatgataatgatggtatcaaagtaaagaaagacaaagtaatgatgatgaaagtggaaattcagatatagtttatatatttaattcgagatacaaacattcgtacagtactgcaccaacagcaattttaaacgttatcatactagcttacaatcatagaaattgaaactgaagaaaacgaggctcagctggttcacgaggcactgttggttctcttcgtggcattcttacttcatgaagtgggcatggttccatgctatagtagagagctttctccaaagatatggctttgaagatgctgcacatttgatgtgtgttccaattgaaggctaaatcgttcacttgtctctgttttgatcgagaatgaagagaggttattggccatatatggtgacactctttgttatttttgaaggatctatctagtttctcttgttagcatatgaagttaacaaagagctcatatttcagatgagtgagatgaccatgtctttctcttggactgtgaaataccatataatgtgatgtgttgatataaatcacatttttaccaatttaatttatatggtaaccctaanaaaaaaaagatggtgaaaatgcttntaaacttggg

SEQ ID NO: 36032 - DNA, 321 bp, Glycine max
  Clone ID: PAT_MRT3847_13253C.1
tttacgcgtgcgtcaaacaccatttttttttttataacatagttaggggggtgaaaatgatgaggtggcggacttgctgtgctctagatcataacacagggtttctgtgggagtaacttatctggctaaggcggttccagatccagacatatgggctattattgatgacaaagatagtccttatctaacagactgacccgtaggaaaaaaaacctaggatgttttacgtgtataagacgctgcagattggaagactgaagtcgtgtttctggatcagctaatgcatgcacatttcgcgaatctgattgcttgttgctgtga

SEQ ID NO: 36033 - DNA, 502 bp, Glycine max
  Clone ID: PAT_MRT3847_132540C.1
agctcacttggctggagccgcccttagtttgttaaccaacacttttctttttctgtctctcggaatccaaataggggttacgattcgcctggctggcctaaaaaagaaaggggcccggacatcgcctttttttaatttcccaaccctccgagttttcactttccctaagccgcattgaataattataacatctgggcttccaaatatgaatttcccaaagaaagcgtaagctaagagagtaaaaagttgtgtttccttgttaacaccaagcaattgcgacggggatagttctccccatgcagccaaagcaaatcccaccgttgtgtacttttaccgcgactcggctcccagcgccaccgatgcgggctttgaccgtattaacaactcgctgactgagtgggttctacctgaacccagtcctgctcattcacgcgcgccacttgccatacacctggaaccggtacagacggtcccttccttgagacgccaccgagttcaccac

SEQ ID NO: 36034 - DNA, 1429 bp, Glycine max
  Clone ID: PAT_MRT3847_132541C.1
cggttaggaattcccgggtcgacacaattacagagcattgccccacgcagacgacgggagcgggagagaaaggtgagagagaattacagagcattttccaacacgattacacgaccgaatcaaacccctctttctctccgaagctgcttttaatatcgtactggccttcgattgttctcctctttaatacatactgttctctcttcgatttgagggaacagtacaagagtctgagcatcggttaacccaactgcacaggtagtctccaaataatggagcctcatgatgagactggatgccaggctcctgaacgccccattctttgcattaataattgtggcttctttggaagagcagctaccatgaacatgtgttccaagtgttacaaggacatgctgttgaagcaggagcaggacaaatttgcagcatcatccgttgaaaacattgtgaatggcagttccaatggcaatggaaagcaggctgtggctactggtgctgttgctgtacaagttgaagctgtggaggtcaagattgtctgtgctcagagttctgtggattcgtcctccggtgatagtttggagatgaaagccaagactggtcccagtagatgtgctacatgccggaaacgtgttggtttaactggtttcagctgcaaatgtggcaacctcttctgtgcaatgcatcgctattctgataaacatgattgcccttttgattataggactgttggtcaggatgccatagctaaagccaaccccataattaaggcagataagctcgacaaaatctaggcatgcactactgaaggttaatgtatgaaccttgaagcttcatcttctatatgtaagtttcatatatgttgtcttcctggttttttaggtgtcctttagtgattaaaatgatccaagtcaagatggcaagggcatcattagggaaaacatttattgttggttgggagatccacttgttagctccagtgtgtttgtgctgctttgatggacactttggctcattttgtaatttgatttcctgcttggtctgcatttttcttcctcattgcatgaaaagtatttcctgcgtagtcttgtattggttttgcttttgaatcattataggaatgtttaatttttaatgctcattgctcaaaatacacgcagcaagttcggatctactggcaggacttcgttattgatataattctcaatttattattgttattggcctatacgaatgagagaaacaattttctggaacaaaaagattgaatgaggacctgtggaccaagtgcatagatccagagccctactagtagtgtagaaatgttatatgacttatgctatgaactaagtattgtttatatcgcattacctcgttgttttcatattctgcgtctgtctctaatgttattcaacaagtgatcaatgtgtca

SEQ ID NO: 36035 - DNA, 527 bp, Glycine max
  Clone ID: PAT_MRT3847_132542C.1
gcagactgttgtgaactaaagctataactactaccctgggagaattacgatcgacactgatggaaacactatgcaagcccatggagggggcattatatacgatgaatgaacacgaccatcctattgatccggcgaatataaatacggacctacctaccatgatcacaagaaaggagccgataaggcggacattagtggagctggctgctattcaactaaagactagtggaccaggaaacaccagaggatcgggtcggcagacatacgccacagatgaaacccatgacctgcacacgtttaatgtgcttgaacggccgactgttgattcacaatgatatgcctggtgagattgacatgcgcatgcacatcgatgaggccgactatacctaagcatctgtaggagcggcaatcagcgacacgccaagacggccactagatatctggacgacatgaccccaagatataaatcaggatggacagatgcaagacatgatgaggcgtgatatcactctcgacacataggactg

SEQ ID NO: 36036 - DNA, 750 bp, Glycine max
  unsure (1)..(750): unsure at all n locations
  Clone ID: PAT_MRT3847_132543C.1
ggagagaaagtgcgtccggattacagagcattttccaacacgattacacgaccgaatcaaacccctctttctctccgaagctgcttttaatatcgtactggccttcgattgttctcctctttaatacatactgttctctcttcgatttgagggaacagtacaagagtctgagcatcggttaacccaactgcacaggttttaaactgccgtcatggtatcatcgtggtgttgcgggaaattgtggacaaatgtgcccgttgtggctgtaaattgtggttgtggagacttcaaaaaccttgatgttgctggccaaaattaaggtagtctccaaataatggagcctcatgatgagactggatgccaggctcctgaacgccccattctttgcattaataattgtggcttctttggaagagcagctaccatgaacatgtgttccaagtgttacaaggacatgctgttgaagcaggagcaggacaaatttgcagcatcatccgttgaaaacattgtgaatggcagttccaatggcaatggaaagcaggctgtggctactggtgctgttgctgtacaagttgaagctgtggaggtcaagattgtctgtgctcagagttctgtggattcgtcctccggtgatangttggagatgaaagccaagactggtcccagtagatgtgctacatgccgggaaacgtggttgtttaaactggtttcagctgcaaatgtggcaacctcttctgtgncatgcatcgc

SEQ ID NO: 36037 - DNA, 388 bp, Glycine max
  Clone ID: PAT_MRT3847_132544C.1
gattcaaagaactcattccatgatttgcctcacgtgacaacaacaatctgtttaacactcgtctatacaaatatggatcttataactagtaaaaattagaatgaatgataattttccaattttgcattgtaacaaagaacaagagacacttgttttatttaggttggaggcagccttgacttttaattgaggaagataaacaaatgaatgcaatttcattcatcgtaatcataactaccatcatcatcatctaactccacttcagcatcatcaaatgaagtcataagtgtgaggaacacaacaactgcaaccaactgtgctaccacaaaatatttggccttccttttgaaagttttctcctcctgtgttttctcccttttgggcttac

SEQ ID NO: 36038 - DNA, 221 bp, Glycine max
  Clone ID: PAT_MRT3847_132545C.1
ctctgatattgttcattatttgaagtacgtgaccatacacaaatctaaaaactctcaaaagtcattttgggactttgacgctcactttccggggactatagacggtggcataggcccaggcgtcgatgtgacagggtcagccaggtgatcgatgaggatcttacaatggaccctggccggtgacaatggcctgaacaaagaagccaaacatagcgaacatg

SEQ ID NO: 36039 - DNA, 386 bp, Glycine max
  Clone ID: PAT_MRT3847_132546C.1
tgttcgctgcgcacgcccggaatctcggattgagcactcgagacacacgcatcaccaaattttcctttttacgaggctccaacgaacccccagcatagggggcatactccgatcacagaacaggcccatccaccgtgaatctcttccctgtatgcgtaacacacttttattcccagactccatgactggaagctgcattgctccatatgaagaaggagagccaacaaagctaagatgtaaagaatgccattttctacgcctataactgctcagaaccataacttcggcaactaccgccagattagttcgtaggacatctaacccgtttacattgtctgataatgtgacttaatagtcaaagtacttgcaaggagaactttatttac

SEQ ID NO: 36040 - DNA, 248 bp, Glycine max
  Clone ID: PAT_MRT3847_132547C.1
cactcatggaccccaaaaacgtgaaatcggacctggttctcattctcgattacggtgcccagtacacccaccttatcactcgccgcatacgcaacctctcggggatctacctaagcatctacggcaccatctgtctttcaaccatcaccgacctgaaccccttcgtcagcattctctccgggggccctcactccgttcacaccccagactccccccccccccctatgaatcaattttactaatattat

SEQ ID NO: 36041 - DNA, 311 bp, Glycine max
  Clone ID: PAT_MRT3847_132548C.1
ggctcgaggattctcctactctggatggaggaagtggcctaaaagaagttgctacatgagatgcttatgcgaaaggggcaaatactgaaggttcaacttcaagctcaatattcaagagcccaagaagctgtgaagtaatgattgaggctgcaagtactggggaattggctaaaaacatgggaatcagttttgggaaggaagaatgaaatgttgtccagaatggttattttagatggaagagacaaatctgaacttgagaagccaggaaaaagggtgggtgatcaatgaaggtagttacctataatattaag

SEQ ID NO: 36042 - DNA, 482 bp, Glycine max
  Clone ID: PAT_MRT3847_132549C.1
ggacccattaagggggaaattattactatccaaaaaatccggggaccccccaaagatttatagaaacaaataatataggggggtttttaaaaacaaaaattttcaattcaggggagttcccccaaaaacaaagttttaaaaacttgcaattttcccaggggccatgatccccaaaacccaccgaggggagtttatattttattgaaggccacaagggcacaactttggacaaattcattggggggctcaacggggaaaggttcctcaataagagtttcaacagaaactgggtcctccacaatagaaagcataattggcagttttttaaaaccgtatccaacaggaacaagtttggatgccccccaaagcaacccttccatttgaacagatctcactgatttttaaagctttttcagggcagtttcatcatcccagggttttacatccaacagaacagaggatttcccagacttttttttttt

SEQ ID NO: 36043 - DNA, 115 bp, Glycine max
  Clone ID: PAT_MRT3847_13254C.1
gataccctgtgtattttttggatgcaaacttaaacttattccattttctacccattattctacccttctcagcggttcatctgctatcccaacaaaggctaaagaaggaaatttt

SEQ ID NO: 36044 - DNA, 315 bp, Glycine max
  Clone ID: PAT_MRT3847_132550C.1
tctgccgaatttttattacggcggcagagatgcttcatgctttggtcgacccattcggataacactgagctctggcttgttgacaacaagaaggacactacctagaaactgtttgctagctgaggtaccgattatagtcgaattattgcttgctccgtgatagcctactggatgtccgactttctgaaaagttgggggggcagtttttccacagctgcgaccaggccttgtccttcgccagtgacttgaagcacgaatgacatgtacatggaccggctttatatggtgcgaaacatgctcacatacatagacatg

SEQ ID NO: 36045 - DNA, 1149 bp, Glycine max
  Clone ID: PAT_MRT3847_132551C.1
ggaactagttatagttcaagaaatttggttagttgggaagtacccgagacttgtgttgtagtagatccttctactcagattgagtgtgtcaatggagataataggaaattggaagcaaaacctaatgaatcagggttgaacaaggtgtccatgaaagtgacaaatggggtgtctgagactgataaaaattcatgtgtgattgatataaactgtgacagctgtgatgggtttagtgagaatttggaaggtgaaatgatttgtaggatttgccatctggcctctgggcaacgattggaagcagcagatgttggcactgcaagtagtgctactactaatacagatttgattcagctcggttgtgcatgtaaagatgagctagggattgtgcatagtcattgtgctgaggcatggttcaagcttaaaggaaacaggttgtgtgaaatatgtggtgagactgcaaaaaatgtttcggatgttacggataatggatttattgaagagtggaatgatactagattcatggacagtgataatacctcatccagaaggtttggtggatgcttgtgcggacaaccattttgtaacttcttaatggcatgcctggtaatagcttttgttctgccatggttcttccgtgtaaatatgttctagtggaggagtcaaacactattctttccttcaaatcttcatccctgcctaaatgatgagtgcatcattggttccttgcatattctttttctgaaggggtggtaatgcttaaccatgaccaacttcacatttctcagggtatgtagttccctgaagccttgaaatttggttgtaaagaaacttaccaacttggcaagttatggccaaattgtttcccaattgcattcttttgattggagtgcgtgtggcgtactgagatatatatataactgcgggattcaatttatgaaggagtaaagcaaagaagatattgtacttgtggcataaatgctaagttagaaacagtacattattcgctgtaaaacaatcaaacataaagagcctctccttgattttccttctctctttttcgttttttcacctttttctttctttctttaataatctctgtacacttgtctgctaatataaagttcaaagaatccaatgtcatttgttgtc

SEQ ID NO: 36046 - DNA, 327 bp, Glycine max
  unsure (1)..(327): unsure at all n locations
  Clone ID: PAT_MRT3847_132552C.1
cacacacangagagatatatantcctcaggcacattaanttcaagnccttcaagcacanaaaatggtaacccagtgtggcgtgtcttacaatgtcactggcaaatgaaccaactcccaaggatcctttatggctatccgatagtgacctaatcggcaacctaggtcacatatccgtcatctatatttacaaagctaaacacaacaccgacaccattgagaggttgaggaattcgcttagcaagattttggtctacttctatcccgtagctggcaggttgaacttgacaaaaagtggtcgaatagaagtggattgtaatgcaaaaggg

SEQ ID NO: 36047 - DNA, 236 bp, Glycine max
  Clone ID: PAT_MRT3847_132553C.1
ttcaaaaaaaacaacttaacgtttactttaacatctataaattgtcgtttcctgtcttataacataattttactacctacataaagagtccatttaacttaagttgctctatacctcaagcagaccatcttcaagataatccttctttgaaacacttttgtaattctcatatatttgttcttccaactcaaaactcataccatattcaattgtctttttattcttactgtctaaaa

SEQ ID NO: 36048 - DNA, 279 bp, Glycine max
  unsure (1)..(279): unsure at all n locations
  Clone ID: PAT_MRT3847_132554C.1
ctggagacgacgttcagaaatgcgcacctcgcaaggggaaggagaagaaggaagaacaggtcatcagccttggacctcaggtggctgaaggagagaatgtatttggtgtctgccacatctttgcatccttcaatgatacctttgtccatgttactgatctttctggcaaggaaaccatctgccgagtaactggtggaatgaaggtgaaggctgaccgagatgagtcctctccgtatgcagccatgttggctgcccaggatgtggcccagaggtgcaang

SEQ ID NO: 36049 - DNA, 188 bp, Glycine max
  unsure (1)..(188): unsure at all n locations
  Clone ID: PAT_MRT3847_132555C.1
cataacacctcaaattctgtnantcgggtaatgggccaccagtggagncgatgangtgccagnatanccctgnccttcgaacccggatttggattacnccggatgaacccgggatacacnangntcgnctggaagntccggngtcgggnttgacgtctctggngtaccntcagntgngnnnctgttgc

SEQ ID NO: 36050 - DNA, 223 bp, Glycine max
  Clone ID: PAT_MRT3847_132556C.1
cgtgctatatcgcggtcacatgtgctgtgcctggtgtgtctataatggaatgagtcgcctgcggaaatgtcaacgtccagtatgtaggaatcactactatcacttcccaacactatgccacttacatcgctatgtgcttctcaaaatctataccgctgcttacaaataaaggtacagccagactcttgaggaagaatggagatgctgcatttactcccctcaa

SEQ ID NO: 36051 - DNA, 402 bp, Glycine max
  Clone ID: PAT_MRT3847_132557C.1
cccttgtggttgagcattttatatgttaatgaaaaaagaagaaatgacagtgtaagttaaaacagggatcaataaagatgagcagaatatgaacatgttacgaacactaattcaacactttctccctcaatggtctagtattacagatcgagtatgttgtcaaagacaagataacagaatgactgttattgacatcaaacgcatagatggggtaggtgttggtgttgagatgcttattgcgttgaatatgttctagctgcttacatataaagaatacacgtcgttaatgatgaactatctatggcagttggaatataaataatggatggtaggtaaattgtagtattgggccagatatcaatctgctaactatgaatgtgagtattggaagacaatgtcttg

SEQ ID NO: 36052 - DNA, 289 bp, Glycine max
  unsure (1)..(289): unsure at all n locations
  Clone ID: PAT_MRT3847_132558C.1
aaaagaccaccgaaggggaataaaaattccaacaatccttaccttgcctccccataaaaaagggaaaaatttaaaccaaaaatcccctaataaaaactttacatcaacaacccccaataattgcaataaacaaataaattccacaatttacagcatcccaaaaaggattttcagacggtagaaaaccctcaaaaaataccttcagcanaattactgttacaacaaaagacaagacatctagcctaataccctacacngtgaggaaaaaattaacaaaaaaaccctagta

SEQ ID NO: 36053 - DNA, 415 bp, Glycine max
  Clone ID: PAT_MRT3847_132559C.1
gggtaactagaaaacttataaatggggacccaaaaaaaaagaaacccttttacccaaattggtaagggaaaaaaaacccgaactttaacactggggggccctattccaactgggggggccccaacaaattaccctccccccctccaaattaacttttaagaaaaagaaccctttttttatccctttgaagggggctcatggggccctccaaattaaaattcccacgggcccattcccgttcccaaggggcacccatgctttttcacagcctttacgaatcacaacaactttaaaagaacctaagggagggcttttgacaaaaccaatgaataatcggggccccttgctcacccccatgtttggcggggattggaggatttgcaggtcggaccctcttgggccccaaaatgggact

SEQ ID NO: 36054 - DNA, 522 bp, Glycine max
  Clone ID: PAT_MRT3847_13255C.1
tcctctagatcggccgccctggggttgcttttttaagaagtttgtaacctttatttagtactgatatcgaacagaatcaccaccaagtgtcatacttgtggtgttttattttactctacgccgatactagttctcaattacattactctgaggtctcgctttcggactcattcgataatggctgggtagtattgttgttgaaatctaggagtgaaggcaccgtgctcttctcccctgttgttcttgaggcttcgggcttgctcccttgagatgcgatacgcattagcgactacatcaactggcaaggcacggaatactgagtttttccctgcaaggtggctgacgaaggcgttagcgtttgtcttgattgcgatatattggcatccttcacgctctgctttcttcaaggacagcataatgttgcggaatgatcaataattgtcctgggcgaaggacaccatcaaacacagtctttccaaagttactaacgacttgaactcgagatcgcccttgaattcatat

SEQ ID NO: 36055 - DNA, 288 bp, Glycine max
  Clone ID: PAT_MRT3847_132560C.1
catgcatcctctgcctgagttcctcaggcttcacaggtataagggtttgaccatgatgttgaatgacatagtgcaaagcctggattctatacaacatgctgtgagaaaagcaccagagtatctgatttcatgggccactgaaacaccctactcggaatcagagaacagattccgggagatcggtctgaaaagggggtggaatgacactgcctagcgtggcctcgagacgatccagctcaccacggaccgtctggtggcacccgacccttgcacgcccaagacatttca

SEQ ID NO: 36056 - DNA, 351 bp, Glycine max
  Clone ID: PAT_MRT3847_132561C.1
gcgcccacgcgtacggttaccacaggagaccaagaatggtatctaccacctagaaaaggattccgatctcctaatggcaacgtaaaaattatacagttgcgtacagacattaggataacgggaattccaaaccccactgcccaccccatgttatcttgaatatagacaacaacagttaaacctatcagtgatgacattgcaacaatagcatagtaccagctgaagtagctctctttgattcctgcatttttgtccctcttactcaactgatcaacaccaaaggccaaggaggatgatcttatgccttcagcttcaatggacatgagggcaaaaaaggaatgcagaatcaaa

SEQ ID NO: 36057 - DNA, 399 bp, Glycine max
  Clone ID: PAT_MRT3847_132562C.1
cgttcgcgtgggcggacgcgtgggcggacgcgtggggctaaagctccaagtatgtttttacaatccttcaaaaattttgtttctttgtgtgtgtatggtgatgataacttaattagtgttgatgattatttcaagtcttactttgggggttctgaatagataaggtctgtagatggtgatatgctcaccatcactgatggagtacacaaaactattgcaactttgccatgcaaaaagctagctcattgtgatgttatgacgataaactctatgcatatgtctattgctgtgtgcgtggatcctgacgtcaaggcgagtttattgcaacaactagattttggttagtgatataatcacgaaaaggggggaccttatgttgataatatggccaatgggtta

SEQ ID NO: 36058 - DNA, 485 bp, Glycine max
  Clone ID: PAT_MRT3847_132563C.1
gttaatggctacccttctattccaccacaattcgcctcagatattctcttcctccttcttcttctcacagcattaaacgccgtcggtttcatgactccataattcaccggaagcagaacaacaacaagaagcagcagcagcagcgcgagttcacatgggattgggaacaaccgcgagaagcagaagaagaatcgaaattcgcgaggccgttagagaggagcgaaacgcgcaggtcgttttactcaactaccgcagagacggtacgccgtttggatgctttttccgggttcccctgttttcagcagcgacggtggcgccgtcgtgcactttgttgccgtacaggtaccgcttcagaaaaaagaagggtccggagtgagggatttcgggttcgggtgctgtcggaaggaagtgtgcgtggattcgttggcggagattgatcgcgtttgttcattggagcaagtgctcgaacctgatgtcagagaagt

SEQ ID NO: 36059 - DNA, 1826 bp, Glycine max
  Clone ID: PAT_MRT3847_132564C.1
tttccttccaatttttcaaacaccagtaaatggccacccatcaattccacccccacaattccttcttcttcttctttccacaacactaaacgccgtcgttttcatgactccataattcaccagaagcagaacaagaagcagcagcagcagcagcagcagcgcgagttcacatgggattgggaacaaccgcggcgagaagcagaagaagaatcgtcatcgaagaaggttctataagaacaacacacaccgccaccgccaccaacgccgatgccgatggagctggagctaggttcaacaactatccagcgatccttcaacacgcgctacacgcgccacgcgcgcgactcgctcgacgaattgcctgacagcttcaccatcaccgacccctccatccctggccaccccatcgtcttcgccagcccgggcttcctcaagctcacgggctacgcggcccgtgaagtcctgggccgacccgccgccatcttccagggcccgcgaacttcgagaaaatccgtcattgaaattcgcgaggccgttagagaggagcgaaacgcgcaggtcgttctgctcaactaccgcaaagacggcacgccgttttggatgctttttcgtgtttgccccgttttcagcagcgacggtggcgccgtcgtgcactttgttgccgtacaggtgccgcttcagaaaaaggaagggtctggagtgagggatttcgggttcgggtgctgtcggaaggaagtatgcgccgattcgttggcggagattggtcgcgtttgttcattagagcaagtgctggaacctgacgttagagctttgtgagatgcagaattggagagagaagagccgtgtgaggcaagtgatgaggagaagcgtagtgcagttaatgctatggacaatatattttctgtgctaacccattatagtgaggcgacgggcagattggtgtgtcaaaagagatgcagcattcctgatgtgggtcttttaagcacatccttgattatttctcttggtagaatcaaacaaagctttgtattaactaatccgcgtttatcagacatgcctattgtttatgctagtgatgccttcttgaaattgacaggttatgcaaaaaatgaagttttgggccgcaactgtagatttttaggtggaacagatactgatacctcgacattacatctgataagggagagcattaaaacagaacaaccctgcacagtacgtattttgaattacaggaaggacaaaagctcattttggaattttcttcatatctcacccgttcgtgatgcttctggcaagtccattgttgtgcctgattacaatttcacatgtgaagattcggtcttttgcttacctatttgataccaggatttttccacactctccttttcgttgtggctagaaggatgaaaattccaggttgcatactttgtgggagttcaaatagaagacagcaataaaaacgatgatagccattgtttgagtcctgagaagaggcagcttaatgtggttggtgtagtcaaggttgcagtgaggagtttatcaatgactgtgggatcttccaagtcgtagcaaaaggatcatgtgagtgtgagtttggaacatataatattgcctacttctcagaagtcagaaatattaatccattcggaaaaatgatcaatctcaaccagtgattgttgagatgatagaaaggtaaaagaattaatttgtcaagaaagaaaaagagagtccatattgtcaattgtaagaaagcattctctgttggaagtttataaataaaatgtattatattttccgtaatgtagcaataaaaattgacttgtact

SEQ ID NO: 36060 - DNA, 391 bp, Glycine max
  Clone ID: PAT_MRT3847_132565C.1
acaaaaaaaggttccgggcagaaaagaggcggcacccaaacaggggggggaagaaaacaagaaccgcgggcgaacccaaccggcgggagaagcaaacccaagaagccaactgagcagcccacggcgaacaggacaaaaggccaatgaacgacgcggggctcaacgaaccaccggaggaagaagaccaagaccggggcgaccacaggcaagagaggaccacaaggagaaacaacgggaaagaccagggggacaggggggaggaccaacagaggacgcccgcggagacggcgggggaagaccatggccaggggagcggcccagaccagaaccacgagcacacggccgggaagcgaagacacaaaaagggaacaacggggcaagaccccaaaaa

SEQ ID NO: 36061 - DNA, 697 bp, Glycine max
  unsure (1)..(697): unsure at all n locations
  Clone ID: PAT_MRT3847_132566C.1
ttgctagctaaaatcttctttatcatattattaacacacttgtcattagaatacacccttcattattggataaaatacatgggagattattaaaatgaaaactagcaactccccacaatactagggaaatgggcatttccatgctgcgagttatacctaaaggccacagggtcatattttttaagtataaacatacacacacattctacaggctcatgtgtgcgcatccacaagctcaaaagaatacgaagcacctaaatataaacttaggatgaacaaagtaggaagcactttacaagtccaaccttctgcatcttggtcgaaatttaaatcccctaaaactggtgaaacaaaacatactagttagtttttgtggcatataggattaaaaaataccaagcgcctaggttggactggaaaatagacttattttcataatcttgtaagttatagccaacaaaccatcagcggacaactcccaggaagacacatacaaaatatgagctttgtatgattttgtattacgaaccgcgacaatcaaaacaacggagtatgaggtctggagcatgcagcaacaaccaaaatcatcaagcatttacttaacgatcagataataatgggttaatatatttccatgtcttcagtacatatgcctcaataatgaaattcagaaactangtaggatgtcaagtggcca

SEQ ID NO: 36062 - DNA, 147 bp, Glycine max
  unsure (1)..(147): unsure at all n locations
  Clone ID: PAT_MRT3847_132567C.1
gcgtcgcgttcgcccacgcgnccgcccacgcgagcgagcatttggaaagaaggccgacgacaccaccaacacggaggccaaaccccacaagcnggcgcagnanggagagaancaggaaaaacgcgcaacgaaaaccccacaagagga

SEQ ID NO: 36063 - DNA, 651 bp, Glycine max
  Clone ID: PAT_MRT3847_132568C.1
tttgtcttgtaatttggcaacttagagtcttagactgggaatggaccattttgttatgcctttctcttattgcttacgttcagataagggaaagcattaaaacagaacaaccatgcacagtacgtattttgaattacaggaaggacaaaagctcattttggaattttcttcatatctcacccgttcgtgatgcttctggcaaggttgcatactttgtgggagttcaaatagaagacaacaataaaaacgatgatagccattgtttgagtcctgagaagagacaacttagtgtggttggtgtagtcaaggttgcagtgaggagtttatcaatgactgcgggatcttctgagtcgtagcaaaaggatcatgtgagtttggaacaaataatatttgcctacttcagtcagaaatattaatccattcggaaaaataatcaatctcaattggtgattgttgagatgatagaaaggtaaaagaattaatttgtcaagaaaaaaaaagagagtccatactgtcaattgtaagaaaacattctctgttggaagtttataaataaaatgtattatattttccgtaatgtagcaataaaaattgccttgtcctaactgcatttattttccgtaatgtagcaataaaaggtgaacttgtcct

SEQ ID NO: 36064 - DNA, 1932 bp, Glycine max
  Clone ID: PAT_MRT3847_132569C.1
agtacaagtcaacttttattgctacattacggaaaataaatgcagttagggaaaaaaaaaccatgtaatttaagacgttccaccgagaaaggtttttttttttttttttttttttttttttagtacaagtcaacttttattgctacattacggaaaataaatgcagttaggaaatataatacattttatttatacacgtccaacagagaatgttttcttacaattgacagtatggactctctttttttttcttcttcacaaattaattcttttacctttctatcatctcaacaatcaccaattgagattgattattttttcgaatggattaatatttctgggaagtaggcaaatattatttgttccaaactcacatgatccttttgctacgactcagaagatcccgcagtcattgataaactcctcactgcaaccttgactacaccaaccacactaagttgtctcttctcaggactcaaacaatggctatcatcgtttttattgttgtcttctatttgaactcccacaaagtatgcaaccttgccagaagcatcacgaacgggtgagatatgaagaaaattccaaaatgagcttttgtccttcctgtaattcaaaatacgtactgtgcatggttgttctgttttaatgctttcccttatcagatgtaaagtcgaggtatcggtatctgttccacctaaaaatctacagttgtggcccaaaacttcattttttgcataacctgtcaatttcaagaaggcgtcactagcataaacaataggcatgtctggtaaatgcggattagttaatacaaagctttgtttgattctaccaagagaaataatcaaggatgtgcttaaaagacccacgtcaggaatgctggacctctttctacacaccaatctccctgtggcctcactgtaatgggttagcacagaaaatatactgtccatggcagtaacagcacttcgcttctcatcatcactcgcctcacacggctcttctctctccacttctgcatcacccaaagctctgacatcaggttcgagcacttgctccaatgaacaaacgcgatcaatctccgccaacgaatccacgcacacttccttccgacagcacccgaacccgaaatccctcactccggacccttcttttttctgaagcggtacctgtacggcaacaaagtgcacgacggcgccaccgtcgctgctgaaaacaggggaaacacgaaaaagcatccaaaacggcgtaccgtctctgcggtagttgagtaaaacgacctgcgcgtttcgctcctctctaacggcctcgcgaatttcgattacggattttcgggatgttcgtgggccctggaagatggctgcgggccggcccaggacttcgcggagggagtagcccgtgagcttgaggaagcccgggctggcgaagacgatggggtggccggggatggaggggtcggtgatggtgaagctgtcaggcaattcgccgagcgagtcgcgcgcgtggcgggtgtagcgcgcgtcgaaggaacgctggattgttgttgaacctagctcctgctccagctccatcggcatcggcgttgttggtgttgttgtgtgttcttgttctagaaccttcttcgatgacgattcttcttctgcttctcgcggttgttcccaatcccatgtgaactcgcgctgctgctgctgcttcttgttgttgttctgcttccggtgaattatggagtcatgaaaacgacggcgtttaatgctgtgagaagaagaaggaggaagagaatatctgaggcgaattgtggtggaatagaagggtagccattaactggtgtttgaattattgaatggaaaatgaaagggggaactgggtggacacaagaggaaggaagcaactgagggaggaaccattcccctacgccattgaagggtcgccattaac

SEQ ID NO: 36065 - DNA, 1186 bp, Glycine max
  unsure (1)..(1186): unsure at all n locations
  Clone ID: PAT_MRT3847_13256C.1
aggttacgatccaatccttctcttcatcttggatggatcaacccagccgtaagttcttaatctcagcctcggaagccttggccatggcggagtccgccgccgtgaccctcccggaactcctccccaccctggtccccaccgcccagcccctggcccgcccccccatctccaagttctccgtcgccgccgtgggcctggccccctccggccgcatcttggtgggcgtgaacctggagttccctgggctccccctccaccactccgtccacgccgaacagttcctgatcaccaacctctccctgaatgcagagccccacctggtctcccttgccgtctccgccgccccctgcgggcactgccggcagttcctccaagaactccgcgccgccgccgacgtccaaatcctggtaacctcggagcccacagcagagttcgggccactctctgacttgctccctcagaggttctgtccccacgaccttctcccccttgaagctccccttctcttggaaccccaccacaacaccctcaccctcaccctccaccaccaacacctgcccaattataagttgaagactgcggctctggaggccggcaacaactctcatgcaccctacagtggctccccctctggtgtggctcttctcgactgccatagcaatgtttttaaaggttcctacatggaatccgccgcctttaatcccagcttgggccccgttcaggcagccctcgtcgcattcgtctccggcggcggcggcgactacgaccagattgtgggtgcggtcttggtggagaaggaggatgccgtcgttaaacaggagagcacggcgaggttgttgattaactccatttcgcccaattgccaattcgacacattcctttgccactgcaaccctaatcacattgtttaattctaattttattcgtttaatattaattgttctctagtttttcttccctgtcaattaattgaattgggtagatgaatacaagcaccaaccaaacgtctatgggagcgaccattctttactcaaggcaatacgtaaataaataaataaactagattttttctttttcagttgaagaaaaatagacgttactaaatattttatgtagagagctatacatgctcgttcttgatatatgtacgatcacttttgttcatattaaacanatgaaacaaaag

SEQ ID NO: 36066 - DNA, 514 bp, Glycine max
  Clone ID: PAT_MRT3847_132570C.1
gctcggaattcggctcgaggctgcgagaagacgacagaaggggtgttttttaagacttgtgaatttcaatgcaccatgaaaaagaattttggaacatgggtgactatttttgtgatggttgtagggtttcatcaaaggagaaaattattccgttgtgcttttgttggtttttattattgtgaactagttgagtgttgttttgctcagcgagagacaattttacttatgattataagttaaatttcttttcatatcaaggattagttggtgttttggtttgtcaaatttgttgcgagcaagataattatcatcattgaactagatgttgtactgaaaaaatataagttaattggagaacatgtcccaacatcaaaataataaatacaactagatttgtttaattgtttactgtttgattatcattatagagtgtcatcaattttccaccaaaatattaagtataattttttttttatagacgggtcatatgaatcaactaataatccatcgattc

SEQ ID NO: 36067 - DNA, 678 bp, Glycine max
  unsure (1)..(678): unsure at all n locations
  Clone ID: PAT_MRT3847_132571C.1
gtggaaaacgtgngagnncagagcgtcagaggagaggagagagagaagagtggcgcaagtctaagttcgggaaggaacagaggtacccctcattgagagcacctctgataataatggaagagatcaaaacacaagatccccccaagctgagggatggtggaacaaagtgttggacatggaagaggccaagcaccaactcttgttttcactgccaatgattcttaccaacttgttctatcacttgatcattttggtttctgtcatgcttgttggtcaccttggtgagcttcagcttgctggtgctactcttgcaaattcatggttcagtgtcactggcgtggcagttatggttggtttgagtggggcactggaaacactctgcggacaaggaatttggtgcaaaggaataccaaatgctgggaatttacctacaagcctcttgcatcatatctcttattttttcaatcattatatcncattatttggttctatacagaacccatccttagtgnntgcttcatcaatctcccgacattgcaagaacagctgcactattatgaaagnttctatccggggagagtgtttgcttatagcttcttgcaaaattttttgaaggtttctccagacacaatctgntagtattcatttggggttgtactctctgctcttcaatgctgt

SEQ ID NO: 36068 - DNA, 281 bp, Glycine max
  Clone ID: PAT_MRT3847_132572C.1
cgttacctgttgaaattcccaacctagactacatgtcttttgttctctagattcatcaaaggcccattgctaaggtttcctgctttttgtttttttttttgtttgatcgaaatgggggggaaatgagtaatccgtccttgcttaccgtctctgcctagaagtaagtttctggcctccgttattcagtttactgattcgcgttgggaagcccgcggaactgcgttactttggctcgcccttcacctgggtgcttgcgcgtaagcttttatttgggtagccct

SEQ ID NO: 36069 - DNA, 417 bp, Glycine max
  unsure (1)..(417): unsure at all n locations
  Clone ID: PAT_MRT3847_132573C.1
tttttngggggggggggcngantaaaaaanaattnantnnnnnnnnttttttaaaattaccccccctcacacgtttttacgacaattaaaagagggggggaaattttaaaagggcggacctttctcaaaaggaggggcccgcccaattcccttttttttatgagggggaccaacaaccaaaaaaaaccataaatcccaaatatttcggagggttccgttttttaaaaaaatctggcattaacccgggggaacaaaaaaagcggcgataaaaattttccccgccatttcaaaacttggaaagatccccaagaaaaatctaaaaactgaaaactggtggggatggtcaataaggaaacccaaccgcctagaagtttgatttcccccctcaaaactcccccttcaaaaccatttttggga

SEQ ID NO: 36070 - DNA, 345 bp, Glycine max
  Clone ID: PAT_MRT3847_132574C.1
ggaattcggcacgaggattaagataaaggaccaaaatactcatttagcctaatttttaccatatgacacttgtattgtgattcatatgcgggggattctgtttatttattcttttaaaaaatatatattttataataaactgaaagaaggatgctgactaagaaaattctagcaataaaatgaagtttagatctgtggtctctctgtttgcgctatgcatttgatttgtgtactatgaaactcaagcctcaaatccattaagcattgaacatataattattttgacatctgttagatgattgcaatgcccccgcaatcttgggttaggatccctgcattaactgc

SEQ ID NO: 36071 - DNA, 113 bp, Glycine max
  unsure (1)..(113): unsure at all n locations
  Clone ID: PAT_MRT3847_132575C.1
aaaaaagtgacatttcaagacttattcgnnngacaaanggaagcgcgacaccacacaagggcccgtcacaatggacgaagaacctatgtgccatgcacacctcccggcttgcc

SEQ ID NO: 36072 - DNA, 918 bp, Glycine max
  unsure (1)..(918): unsure at all n locations
  Clone ID: PAT_MRT3847_132576C.1
aagaggtcgacgacgcatgcagcacgaccacagcttcgaaattcgctcggtgagccaaacgaccctctctcccacttttcctctctctcttctttgttccgccggagaagtcagaacccaccggcgtcaccatacgataaaacccaaacacttaagagagaaagagaaactcactgacgttgatgctctagaaacttcactatgggaaactgcaacgtgtgcgcgaaagctgacgtggtagaagatagcaataacaacaggaacaagaagtctaatgaaacgaaccgcgctaggaagaaagagccgaaaccattcacggacgaaccggcccggtcgacggcggctccgatccgggtcctgaaggacgtgattccaatgagccaccggacgcgcataagcgacaagtacatactgggccgggaactgggccggggcgagttcggaatcacctacctctgcacggaccgggagaccaaggaagcccttgcctgcaagtcgatctcgaagcggaagctccggactgccgtggacatcgacgacgtgcggcgcgaggtcgccatcatgtccacgctgccggagcaccccaacgtcgtgaagctgaaggcgacttacgaggacaacgagaacgtccacctcgtcatggagctctgcgaagggggagagctcttcgaccggattgtcgccaggggacactacagcgagcgcgccgccgccgncgtggcgcgcaccatcgccgaggttgttaggatgtgccacagcaatggcgtcatgcatagggacctcaagcctgagaatttcctcttcgcaataagaaagagaattctgctctcaggccatcgatttcgnctctncgtcttcttcagccaggggagaggtttagagattgtgggagtccttactacatgcgcggagttttga

SEQ ID NO: 36073 - DNA, 707 bp, Glycine max
  Clone ID: PAT_MRT3847_132577C.1
gggcctcctttatttttcttttctcaacggctcgagcctctctcacacttttcctctctctcttcttcgttccgccggagaaatcagaacccaccggcggcatcacacgacgagccacttcacagtaaaccctaaacacttaacagagaaagagagactcacgttgatactctagaaagttcactatgggaaactgcaacgcctgtgcgaaagctgatgtcgtagaagacagcaccaacaacaggaacaagaagtctaatgaaacgaaccgcggtggtaggaagaaagagcagaaccagaaaaaaccgaacccgttctcagacgaaccggcccggtcggcggctccgatccgggtcttgaaggacgtgattccaatgagccaccggacgcgcataagcgacaagtacatactgggccgggaactgggccggggcgagttcggcatcacctacctctgcacggaccgcgagaccaaggaggccctggcctgcaagtcgatttccaagcggaagctccgaaccgccgtggacatcgaagacgtgcgccgcgaggtcgccatcatgtccacgctgccggagcaccccaacatagtgaagctgaaggcaacctacgaggacaacgagaacgtccacctcgtcatggagctctgcgagggaggcgagctcttcgaccggattgtcgcccgcggtcactacagcgagcgcgcc

SEQ ID NO: 36074 - DNA, 338 bp, Glycine max
  unsure (1)..(338): unsure at all n locations
  Clone ID: PAT_MRT3847_132578C.1
tttgcctaacatttttgtttactttttttatatatggggcgggagtttttatcnnncatcgtttatatttgaccgaaatcagattttggtgtacaaaaaagttttatcctaatctgttgggttatgaaagctgtcggctgcgcttatcagcagcaacaacagcattcatgaggtgttctcggaacccaccattttctaactgatgggggcccgtaattggtgtgccacctggagaaggcacttttattttttggctgtcccgggggcttaccagacttggagaccattgatgccttccttaattcctgtggaacacacaagttcgcaagtcatgcatt

SEQ ID NO: 36075 - DNA, 2309 bp, Glycine max
  Clone ID: PAT_MRT3847_132579C.1
tcctcaattcgcccgacgccccacgcatgcggtgtcttacttccttccttcctcttttcagaatcaatggttacctctctggctatcataattcttgtgctgctattccaacaaacttgccttgccaagcagcaccaccaccacccaccctgttattcttcatgtggcgaaattcacaacataacgtatccatttcgactaaaaggcgacccaatcggctgcggcgatcaagattacgaattagattgcgttgaaaacgtgacagtaatgactctattttcagggaaattccacgtgcaggaaataaattacaagaggtacgagatccggttgaccgatgctggtgtggtggaggacattgcttgctcaattcctcgttatttctttaatctctacaatttcacttacatcggtggtcttaactattctgcatatggtccgttaagtttctcggggtatcctcagtatgcggtgtttctaaactgcactaccccagtcaccgatgatcctcgatacgtagctgtgaaggtcaacggtaattgtgattcgagttccgtaggccatatctatgccattctggtcacagacgatgatgatcgctttgggtttacactgacggacatcaaggttgggtgccgattgaaggttgctacatttgcaaactggaaatataataacagggaggttaacgtttcttattctgatatcaacaagtggctgcaccacggaatttggatgtcttggttctttccagttatttgtagggaccgatgcggaaagggtgtgagttgctacatcgatcaaaccacgcgagaaactcgatgtgcagatagctactgccaaatctttggcattcaaacatacaagtgcggaattcgtaatcagattcttgaatatatgcggcaaattcttggctacacagtaggttatcttaaaagcgttataatgggtaatacaacttatctattaatttgtcaactgatttcatatttgaataaacttatcgattagaccgaacaaaatgctatagcaatattcctggcaaccagattgctatttggaatcacacttttactaatgctatatatctatatgtggcgacgtagacattattcaatgtatgaaaacattgaaatttttttgctagatagcaatctaaatcctattagggatgaatacagagaaataaaaaaaatgaccaaagatttcaaagtgaaattgggtgaaggaggtttcggctctgtatacaaaggaaaacttcgaagcgggctagatgtggcaataaagatgttgaccaaatcccaaactagaggacaagattttatcagtgaagtggctacaattggaattttttatcacgtgaatgtggtgcgtcttattggatattgtgctgaacgagaaaagcatgctctagtttatgaattcatgcctaatggttcattggataaatacattttctctaaagaagaaagtgtctccttaagttatgacaaaacatatgaaatatgtcttggcatagctcgtgggattgcttatttgcatcaagattgtgatgtgcaaattctacattttgatatcaagcctcataatattcttctagatgataacttcattccaaaggtttcggattttggacttgcaaagctatatcctatcaaagataagtcaattattttaactggactaagaggaacttttggttacatggctccagaattattctacaaaaatattggtggagtgtcatataaggcagacgtctatagctttggaatgcttttgatggaaatgggaagtagaaggaggaactcaaatcctcacacagagcactcaagccaacatttcttccccttttggatctatgatcattttatggaagaaaaggatattcacatggaagaggtctcggaagaggataagattctagtgaaaaagatgttcatagtttccctttggtgtatacaattaaaaccaaatgatcgtccttcaatgaagaaggttgtagagatgcttgaaggaaaggttgaaaatattgatatgcctccaaagcctgttttttatccccatgaaacaacaatcgactctgatcaagcatcatggagtgattcaactagttcttgcaagaacattgacaaaaccaagtccaatttttcactggagaacaactcttgacaaactatggttatgaataaattcaatctccaaaattaagagaaaatatgttatgtgttagaataattctacagcatcaattaattataaatcagcatatatataataaatttattgatttttataataattaattt

SEQ ID NO: 36076 - DNA, 1450 bp, Glycine max
  unsure (1)..(1450): unsure at all n locations
  Clone ID: PAT_MRT3847_13257C.1
ccacgcgtccggcagctgtctccagcccatgttgaagcagttatatatcccttgttagcatattgagttttgagtcccaggtcccaacccttggtgaatttctgagcagtgagcagcatgttgtcattattccctaacttgttcctcttcctatcactgttaattggtctatgcaattgcagggtgcaaaccctaaacactaacccaactcacttcaacccacaggtcccacccctccgaaccctctcgtcctcgaagcgcttcgaggggtcctcggagttcgtcaagctgaaataccacatggggccggtgctttcatctccgatcaatatctacctcatctggtacggcaagtggccccaatcccagaagctcctcatcaaggacttcctcaactcaatctccgaccaccgcgccgccccctccccctccgtctccgactggtggcgcaccgtctccctctacaccgaccagaccggcgccaacatctcccgctccgtctccatcgccggcgagtactccgacctccgctactcccacgggacccacctcacgcgcctctccgtgcaggaggtcattgccaccgccgtccaggccaagcccttcccctatctaacgctagggtttacagagaagctaagaggcgcagccgtagcaaaagctcgtggaattgctagcaatggcgaggatcaaggtttacgagctgaggcagaagacgaaggctgatctgctgaatcaactgaaggacctgaaggcggagcttgccttgcttcgtgttgctaaggtcaccggtggtgcccctaacaagctttccaagataaaggtggtgaggttgaacattgcccaggttttgacggtgatttctcagaagcagaaggctgcgttgagggatgcctacaagaataagaagtacttgcctctcgatctccgccctaagaagaccagggctattcgcaggaggcttactaagcaccaggcatcattgaagacagagagggagaagaagaaagagttatatttcccactaaggaaatatgctatcaaggtgtaactttagagcaatcttatcggttaattggacatttacctcctttatactcgacaagttttgatatatctcgttttgtagtttcatgtttattgcttattggctgtgttaaacttcatgtcttctttagacctggggtttcttgaagctaccaggatttatgggtatcgttagtttccgtttaatattgatgaatccgttgcatttttgggccgctctaagagatccaagnaaaaaanaaaaaaaaaaaaaaaaaaaaaaaaaaaaaaaaaaaaaaaaaaaaaaaaaaccccaaaaaaaaaaaaaaaaagggggccctcaacccccagtttttgttcctttaagggagggtaaattgccccctgggggaaaaaagggcaaaagcggttccctggggaaaat

SEQ ID NO: 36077 - DNA, 376 bp, Glycine max
  Clone ID: PAT_MRT3847_132580C.1
aaaaaactgggaccaattttactaaattaagatttaaaattaactgggatgaaatgtgcacatgaacagtgaaaagcaggaggaaaatgtgaacaaatttagaggaggaaaaacaaaaaacgccagcaaatttttatctctctcttttacttcatctgcttttaatgccctagaagactctatgaacaccaacgcccttactttcactgcaaaagctaacaccaaagaccctagtttttttttttttataaaaaatggagtacaaccccagaatgaaggccctctattttatgaatttagattcatcaaggtaaagaaactttgattgtggtaagaatgttgacttgggacactgggtgagacaacaaacttagga

SEQ ID NO: 36078 - DNA, 428 bp, Glycine max
  unsure (1)..(428): unsure at all n locations
  Clone ID: PAT_MRT3847_132581C.1
gacccacgcgtacgcccacacgttcgaccactcgcgcgcgacgcacgagcagcatatgtcacagagggccagaagcccacactgctactncatagccttcgcactacattcccatctactcgtctccagtgagatgcgccccagctcctattggcagcactaggaatagaaaagattgctccgcccttaatagctctcgtgcggttgggctctccttacctttggattcggttgctttcccgcccatttgtgaagaggaggagcaatggggttcaagggacttggggagggtggcatcgcgtccatcgtcgctgggtgctcgacgcacccgctcgatttgattaaggtgaggatgcaactgcacggtgaggcgtcggcggcagcggctgcggacgcgccggctcaagcggccctgcggacggccctgg

SEQ ID NO: 36079 - DNA, 540 bp, Glycine max
  Clone ID: PAT_MRT3847_132582C.1
caactccctttcactcttccttcatggccactttgcttcttctcttctttgtgtggcaatggttcaatccacgtttgtgtcttcttcttcctctttgtgccttctcgagccaccttcgtttcgctacaatctccaatcgcagtgttcaatcttgattccatcaaatccacctctttaggcacctcattttttagatttttgttaatttccatgtgttgaggttgttttgtgctgtgtttgtttgtccctctcaatgtgggcctgaatattggtccacatcaacgaccaccagcaacattcttcgtttgggttaaggctgttttggaagttaaaagaaaccctcacacttgccgttatcagcgctcccatttctatttcttctccctcactcacccttctctgcttccggttcattttttctctctatgtctcttttcatttcctctaagtttctttcaattcttatgtaatgtgtctttttgcacttcttagtagtatctttcaattttttattgggccaccaatctaggtgtacaggag

SEQ ID NO: 36080 - DNA, 109 bp, Glycine max
  Clone ID: PAT_MRT3847_132583C.1
ggctcgagcggttgactacaactcaatctttactctatcctaaccaatctgccagagtttgaatgggctcgtgtgcagaagactgcatcattcccgtcggctactgaat

SEQ ID NO: 36081 - DNA, 250 bp, Glycine max
  Clone ID: PAT_MRT3847_132584C.1
ttcccatttttcacaacacctacacaagatgtttcttcacattgcggtcctacatttccagcgatgatgcactttccatgccgggttccaaaacttctatgtagcacaccttaaaagttcaaacacccctttatgctaacccttcaatccaccttctaatgtcactctagatgactttgtgtacacctgcttaactcaaacttcaaatttcacaaacataaatcaatgcttcttttaccccaacttttgt

SEQ ID NO: 36082 - DNA, 439 bp, Glycine max
  Clone ID: PAT_MRT3847_132585C.1
gcggatcgtgcccggcagtgttgacggtagcaaggtcatcattcgggagttccaggagcactgccgccggggactgataagaaaccacaccggcagccagcggagcccctacaccaactacctgcagacccacaccctgagcgaggatgcctccatacactataagtcccggctcaagcggctcatttacgagaactcagtgtatgagaagcggactgacttaaggatgtgctgatacgtgcacccgcaggtgctacagagctctcagcacagagcacctgcccgtgccgtgccagtggagctatgtgacatcggtgcgctcagtccacagagaggacagtggcagcgtccgatacacggggcccagccagggcactcccatgtcgcttaagaggaagtaagcggacagcatgtgcatcacccaattcatgaagaagcg

SEQ ID NO: 36083 - DNA, 228 bp, Glycine max
  Clone ID: PAT_MRT3847_132586C.1
cctggttacaccaagggtgatggtcttggtgctgagattgtgggcactcacatcctagcaaacactgcgttgatctctaccgatgccaaacgtagcgtcagagactccgatgttcacattgcttcacccttcacaattggaatcgctgatctcttggaaaagtcggtaaccatgcttgattgtcaaaaccggcatcgatgctgcccgcaaatacagcgcgattaagcc

SEQ ID NO: 36084 - DNA, 436 bp, Glycine max
  unsure (1)..(436): unsure at all n locations
  Clone ID: PAT_MRT3847_132587C.1
catcaccctcacccatgacgacctaaagagactcgtcgacgacatggccgtgtattccttcaagaccggcgtggtcctcggtctaggcgccgggtccaatgctgacttagtcgtagacaatgttggcgaccttctcgcactgcgaccactctgtgacatcttcggtgtcgctacctaaaacgcacggaggagcaggcccgaatcattccgattacacctctccgtcctagactacaacccacgcctgcatctcgccagtcacggctgcgacaacgtccaacccgacctgaagctctacacacgccgctgacgcgcgctgctgcgcgagaagatagtcgaggccacctacgacaagttcgtcgtgatcgntggcgacaccaagctcgtggacggcctatgcggaagcgggctcgccatgccggcggacggcgtacag

SEQ ID NO: 36085 - DNA, 731 bp, Glycine max
  Clone ID: PAT_MRT3847_132588C.1
tatcaagctagctaggtataccagctaccctctcttcttccatttcaaagatatctctgcatcggtaccatattttggctgcttttcaacaaatatcagatacatatatacatgagtcagaggtattagctgcagatattagcagtcataaatctcaaggaaaagcagttgaagcatatctatccttctgcaaaggttttcaagattcccctattcagaaggcaaaggaagctactgtgtatttttttggaacgatgagtagtttccagaacgggtctttgcccgcgttcgcggaacgcggcggagagtgacatagaggccgggacctccgctcgccgctctgatgacctcgacggcggcgatttctccgatccctttgacattgccaggaccaagaacgcttcggttgaacgcctcatgcgctggagacaagcagcgcttgttctgaatgcttctcgtcgatttcgttataccttggacttgagaaaagaagaagagaagaagcacatattgtgaaagattagagcacatgcacaagccattagagcagcttatcttttcaatcaactggtggggggccgggagtgaacctattaaacctcctccggtccccactgctggtgaatttccaattggacaagagcaacttgctttcatttctatggagcatgacactgctgctctgcacatatggagaggggtggggggactatcaaatttgttggaaacca

SEQ ID NO: 36086 - DNA, 496 bp, Glycine max
  Clone ID: PAT_MRT3847_132589C.1
ggaaaaattggagggactaaaagcaaaaagctacaagaattatgaagaaaaattgaggattcaacatcaggtccagtccaaaggcgtgcttagcgcgcaaactagcactggcgctaagcgcgaaaacatgcatctgtgctgatcaagcagagcacgctaagcatgagtatgaaggcccaagtccacttaaaaaattataaaaagagagtcaagccaagaagaaacaacacacgaagtctcagagcactctcatacataccaaagcctaagaactcttccttagggaattctcttatctctctctcatcattttttctattcccttcttccatcccttctcctccaccaattcttatacccccatttcagtgtaaggtcttcaatgaccatgagaggctaaacccctagttatgtcctggcaggcctaaaaagccaaagagatgtatgatgtacttcatatttatcaatgcaacaggtgttttctatccaaaaaaaa

SEQ ID NO: 36087 - DNA, 320 bp, Glycine max
  Clone ID: PAT_MRT3847_13258C.1
caccatggtaaacggaatccgtacaacacacatgaaactcaacatctcacatgtgtcatttctgtgtcatgacctgaactcttctttcctgggaatctcatgaggctggatctccgttctgtgagtcataatgctcgcagaagtatgccaaagcttgggatcaggacacatgattgaagttttgcgggatatgctgcgacaagtgcaactgtgtcccatctaggacttatcgaatcattgaccacagtccctgctacacggacatgattaataccaatggcaatgacaaatgcacttggacaagatacaagttcatcatc

SEQ ID NO: 36088 - DNA, 1374 bp, Glycine max
  Clone ID: PAT_MRT3847_132590C.1
ggctcgaggtcatttgtccttgcaacactctaaaaaaccatgaaggcaacactaagatacttagcaggaatggcaggccctagtggttttggctcaaattcaacagctgaacaagtcactgaagattgttcttccttccttccttctgctctaaccgctctgatcaccggggcgagttctggtattggagctgaaacagcaagagtgttagcaaagagaggagtgagagttgtgattgctgcaagggacttgaagaaggcaaaggaagtgaaaaagaacatacaaaaggagactccaaaagctgaggttattctgttggagattgatcttggctcttttggttctgtgcagagattttgttccgagtttttggctttagaacttccccttaacattctcataaacaatgcagggatgttttctcaaaacttggagttctctgaggataaaattgagatgacatttgctacaaattacttaggtcatttcttgttaacagaaatattattagacaaaatgatagagacggcagagaagacaggtattcaaggaagaataataaacgtttcttctgtcatacatagctgggtgaaaaaagatggttttttcgtttcaacgacatactcagtggaaaaaaatataatggcacacgcgcttatgctcagtcaaaattggcaaatattttgcatgcaaaggaaatagccaagcaactgaaggcaaggaatgcaagagtaactatcaatgcagtgcatccaggcattgtgaagacaggaattattagagctcataagggcttaataacggattccctattttttattgcatcaaagttactcaaaacgacatcacagggtgcatcaactacgtgttatgtagcactgagccccaaaacagaagggataagtggaaaatactttgcagattgcaatgagtgtaaatgctcgagcctagcaaatgacgaatcggaagctcaaaagctatggaacaacacacatgccttgcttcacaaacgactgcgtcaagcaacgatttgaagcatttctccttttcaagacaccatgtatattaggttattcatttacgttaacctgcaggctcaacacaaaatttgagtcttaaaaggcaacttaaaacatcataatcatgggggtttcttgttagtgaccccatttcctgtgtagctccatgttgattaattgtacaaataagagagcaatgaaacataaaatctctctacaataacaaagcgatagttgatatgctctatagaggaacacccttcactatgtgactttacgatgatttattgtacaaactactaaatagaggagaacccctttttcaaaaaaataaatagtggagaatcgatggtga

SEQ ID NO: 36089 - DNA, 487 bp, Glycine max
  Clone ID: PAT_MRT3847_132591C.1
ctcgaccgatatactagagctaatgcgaagagatggttcagatcacagtgctgatagacttgctgatatagtctctatgcacctgaaggacacacctagaatgcactctaaagcgaatggtccaatgcttactcgctcctactcaggatgatgcgactaatcctccggagactgcatggatacaatgattgacctagttcatagcatgaaagatagataaattgttcctgctaaccttcgtggagagttgtattatctagcctaaagctctcaaaaggctacatcagcatcctcttcattatcaaccttattggaagactctggcaataattaccacactgtttccaacacataggaagctggagaaaatcctgtcacatacacaggatatggaggcttataagaaatcatgaggtgtggcgacgaaaaaacagacattatcgaggtgcgactcgttggtttcatacataatagatctcggcaacac

SEQ ID NO: 36090 - DNA, 361 bp, Glycine max
  Clone ID: PAT_MRT3847_132592C.1
tagactcgtacgttctcaactacggttctttaattttgatacaataatcgggtggctttcggggggggactggtggatacaggggccctcacatgcacaaacaaggttactcattgcgctccctgaaaagcgtgtggcgcgttaaacccgggcacgaaacctcaagaacccgagtcctacgctgttccacatgtaccccgatcacatcactctttaagatttcgcgcattatgacagactccgtctcgaatcttccttcatatcaacacaccaaggtgaggtgtgaacggaacaaactccgatcttgcacattgaccatcacgaaatagctttttcccctctcagagttccctacatttgc

SEQ ID NO: 36091 - DNA, 499 bp, Glycine max
  Clone ID: PAT_MRT3847_132593C.1
ctatgaatgcaaatcattttattgcggcttcatgttcttatatcatgttacagggatgaatgatattatgctataaagggacataaactaattttttttaaaaaactaaaaataccccggctgccacaagttggcactcaaaaaagaaaaacacactcttttaaaaaaaccattttgaatgagaagggcgacaaggattgcttcgcccaccttatgctaaaaatgggatctaaaaaaaaaaggcgtcccccctttttctatgccacatgggggacacaaggttattttcatgttccaaaaaaaaaaataatcaattgcgcctaaatggacaagaagtgatttaccttaaaaaaaaaaaaaacaggccccccccaaaaaggttttcttttccaaaaaaaaatttcccccccaaaaaaaaaggtttaaacacatggggttttcgcccccccgccgaaatttcgagttttaccacccgggaataaaaaacaaaacttttttt

SEQ ID NO: 36092 - DNA, 1320 bp, Glycine max
  Clone ID: PAT_MRT3847_132594C.1
gcgtccgaatggcaagaagacgacagaaacgctaactcctacacggaaaataaataagaatttagaaaccttagctaagtcaccatgtctccaaaatcaaaggctaaagcaatgttcttcatcttgaaaataataatgttaaatcttttgccaccaatatatgcatgtgggccatgcactccgccacgtcaccacaaacacccgccgcatcacggcggaggccggccgaaagtgtcccctccgctgccgccgatcataatcaaccctccggtggtaccgccgccggtggtgatatacccaccaccaatctcaccaccgtacccgccgccgcacggtggcagtccttttcctcaaaggacttgcccaattgatgccctaaaattggggctttgcttggatgtgcttggagggttggtgcatgtgggaatagggaacccagttgagaacgtgtgctgtcccgttatacaggggttgcttgatcttgaagctgcaatttgtctttgcactgttattagggctaagcttcttaacctcaatatctttcttcctcttgcacttcaactcttggtcacttgcgggaagactgctcctcctggttttgattgtaccccaatactcaagcctatatagttctagttagttactacttactactagattaatatgtctttatcttttctattagggtttatgtaatgactcttatttcgttttatgtgtatgagtttacgctttaattaattatatacttctcaggatttactgctaagttttcctgttacgaatttgagggttgtagtttctttgctataaagttcgtttaatgttgttactgctattccgtgcttcatctattttttctttgctacaactcggaatacgtacgtatatacaagggtttacgttaaagtatatgtttcgattgggagagttcgtacgacctatgtattatgtataggtttgaaagattttttatttttgtagttttttacttttatttcgtgaaatgagtgttagtaaatagcaaaacaccattagtgcctgagaaaaagtttatgctttttaacaaattttaactaataaagagtcagtcggaaaaaatgtgttaacattttgaaatatatattttgtctcgtgagtcaaaatacttcccttcacatttcattattcattattctgacttcacgaagtttaaatagatatcgttaacttaattaaaaaaggttataaacattcgctgaacaaccttatgcgcatctgcacttttttgtgaactgtcctagttttctgtttatgtgcgtataatttgcggacgcgtgg

SEQ ID NO: 36093 - DNA, 2061 bp, Glycine max
  Clone ID: PAT_MRT3847_132595C.1
gggggcctttttgcttattaccccaccggggaaaaggggatgtttccccaagggatttaatttgggaaccccaggggttttccaagtccaacgttgtaaaaaccggggccattaattttatttaggcgcccccataaaaaaagatttgcctccccaccccggggacgttaaatttgcacccctaaaacggcccgccccatttattttttccatttgtcatttttgtttgcaacgttgttgtttgtttgggttgttttttattaatgtgcggcctgtcattgttgtttgtgcgtgttcatatatgaaaccaatttcatccaatttttacatacaaatacaaaaacggctagtgtacgtggaatgaggcttataataccctatattgcttttcttcacatacgctggcagataaagtttcggaactgcagtgccctctaaacacagtcatcaaaacaccaacactataattattaaaagacattttttactcagactgcccaaacacagaaaatcctacatttagattggtgaaccctccatctaacacaagattgtgaccactaacatactttgactcatcacctgccaaatatagagcagcttcggccacatcgtttggcacaagatgaacaccttttaggttggaataaatctcaccatttcggtcttcatcaagattgaaacatttcttagtcaatggtgtggcaaccacataaggggacaagcaatttaccctaataccaaactgtccaagctccaccgcagtgtttttcatcagtccaattagtgcgtgctttgaacttgtgtaggcatgtgaagcccctccactaaaggttccagcaacactagcagtgttaattatgcttccccttttagcaggaatcataaccctagcagcgtgctttgttcccagaaaaggaccaaccaagttcacacttatcactctctcaaaatcaaacttgctgttgtcaagtatgcttgtttttatctcatcaattatgccagcattattaaacatgatatctagattgccatgcttggaaatagctgtgttaacggcgttttcacagtcgtttttgtctgagacatcgcgaccaacataggaatctgatttcaagttaatacacataattagtcgcatatagtcttactcatctcttgggcttaagtgtggtcattacttactatcgagtgtaagttaatgcgatccacgcgtccgagacgacagaaggggatcttggatatgtttattccgtttcagttcaggaaattggtggtgtcagggtgaccattgtgaaaaatgaagagggtggaaattctgtagccactgttgttttacgaggaagtactgatagtatactagatgatcttgaaagagcagtggatgatggagtgaacacttacaaggcaatgtgcagggatagccgctttgtacctggagctgcagctactgaaattgagttagctaaaagggtgaaagacttttccttcaaggagacagggttggatcagtatgctattgcaaaatttgctgaaagttttgaaatgattcctagaactttggctgagaatgctggcctaaatgcaatggagatcatatcttctctgtatgcagaacatgcatctggaaatgccaaagttggcattgatttggaagaaggcatatgtaaggatgtctcaaccttgagcatttgggatctccatgtgactaagttatttgctcttaaatatgctgcagatgctgcatgcactgtactacgtgtggaccagattattatggcaaaaccagctggtggtccaaggagagaacagcctgctggtggtatggatgaagactaaaattattgtgggaattgatggtttgctttggtcatgtttgtatctcagcatgatggcttgaatttgccttaggcatgttttcttgatttagactttttagtagtggtggcgatcttaacaaattttgaattttgttttgctatgaaatactaagagatgtggtctgtaaatttacattttattcatagccttattgtgagtggtgatgttaatttgctgagc

SEQ ID NO: 36094 - DNA, 519 bp, Glycine max
  Clone ID: PAT_MRT3847_132596C.1
cactgagcatcgtctagctatctcgatcgaactgtccaaggtcctgtcacccggcgatattcccgcttagcatagaagagtgtgttgtagtagtatttgtgtattaggtagggtttgagagaacatgggttgaggttgttggtggttgtaggtgttagggttatatgtgtgtagttcaggtcccgatcccgggcgcggagtccaattggtattccaaaaggtgtacgtcatcgactcaaaaccatccgagtttgagtcatcacctgcgcgtcaccatcagtcttatcgtggtgtgcctctctactggggtgagcgtcgtacgccatgttcaaacccacggtgccggatgcatctcagtggttattcggtcaggatgttttctcgttagacgtcccttttattctgcacacaggtcggtcaagtctacccacgagtggacgttggttagtggctaggtagataacaattttcgcaatagacgccacccgaacaaatacgattgcggtcatcacaccccac

SEQ ID NO: 36095 - DNA, 382 bp, Glycine max
  Clone ID: PAT_MRT3847_132597C.1
ctgggagaggcctcacatcatggatgtggtgggcatcctgcccatgatggagcacaggattgcttggactattgacgatgctaaatctgggaaccaacctatgagactctatgctcgcgtgtggaactgctgtgactgacccaccgaacgaggttgggtgataactgataggacgaacccacgctatacagcatactacctcactgatagaggcacagagttgtacaactataatttcaatactttctctgatcgctgcatggaatagcaacgagcttgatgcctatagcatacgaagactgagatgcgctcatgaataacttcatgatctatcactgcttgcacgatcttaagcgattcccacaaggcattcccgctgagt

SEQ ID NO: 36096 - DNA, 220 bp, Glycine max
  Clone ID: PAT_MRT3847_132598C.1
cacgaatttcattgcagagtgatatcgtgagtatcaggatgaatggcgacaattgcagggggaaacgggattctagacggaattctgggttacttggatggagaaaacaaagaccagactgtatccaatcagtcaatcgccaccggaaagtcagtcatgatatgtggggctcgcggtggatggactcctacttgcagtatgaagtacgttcctgggatca

SEQ ID NO: 36097 - DNA, 235 bp, Glycine max
  Clone ID: PAT_MRT3847_132599C.1
cattaactgtccttatctgaccaaagcggcctatagcactgcttgaattgcggtgaacacggatgaatccgaaaagggctaatgtggtgaaacgggaatagaagaacccattctcttgcccatgcccaatgttgatttgaaccatatcttggggcctagctgttatcaagctggagaccgaggatcagttcctatgaatgaaaagttgaaggatctgcggtgtgtgcaattgcat

SEQ ID NO: 36098 - DNA, 1427 bp, Glycine max
  unsure (1)..(1427): unsure at all n locations
  Clone ID: PAT_MRT3847_13259C.1
agtccatgtcccacccttggtgaatttctgagcagtgagcagcatgttgtcattattccctaacttgttcctcttcctatcactgttaattggtctatgcaattgcagggtgcaaaccctaaacactaacccaactcacttcaacccacaggtcccacccctccgaaccctctcgtcctcgaagcgcttcgaggggtcctcggagttcgtcaagctgaaataccacatggggccggtgctttcatctccgatcaatatctacctcatctggtacggcaagtggccccaatcccagaagctcctcatcaaggacttcctcaactcaatctccgaccaccgcgccgccccctccccctccgtctccgactggtggcgcaccgtctccctctacaccgaccagaccggcgccaacatctcccgctccgtctccatcgccggcgagtactccgacctccgctactcccacggcacccacctcacgcgcctctccgtgcaggaggtcattgccaccgccgtccaggccaagcccttccccgtcgaccaccgcaacgggatctaccttatcctcaccgccgaagacgtcaccatggaagacttctgccgcgccgtctgcggcttccactacttcaccttcccgtcgaaggtgggctacacgctcccttacgcgtgggtggggaactccggaaaacagtgccccgaggtttgcgcttatcccttcgccgtccccgggtacatgggcggcggcggacccggccacctcacgccggccgaacggagacgtcggggtggacggcatggtgagcgtgatcgggcacgagctggcggagctctcgtcgaacccgctcgtgaacgcatggtacgccggcgaggacccccccgcgcccaccgagatcggagatttgtgcgagggcttgtacggaacgggtggtggcggcggctatattggttccgttatgaaagacggcgaagggagaacgtttaatcttaacggtagaaatggacggaagtttctggtgcagtggatttggagccccgttttgaaggcctgtgctggtcccaatgctttggattgagttccttcatcctcttttttttttttttttctttttaccctatgtatcatacctaatgatgctgtatcatttttattttttttatttctctacttaacgaaattcatttttatttattgctcgatcctttctgcggtttttgatttgagtccctgagctgattcataatcaccaatgaatgggctttaatcaaagtgccatttgagtgttcccaggtttctcctcctttcaaatcacactatcacagttagtcagtgatggctttctttcactcggttgctaaatatataatatgtattggtaatcatgaanaaaaatatctaatgtaaagaaagtttctaacactgtgcactt

SEQ ID NO: 36099 - DNA, 240 bp, Glycine max
  Clone ID: PAT_MRT3847_1325C.1
tttcgactggaagtttaagctccggatcaagaagaacgggtaattcagtgtacaactacgaattcataagagagaacgtgaaagtagtggtagaggaactgatgattaaattgcatacagattgagacagatgccatagttgataatgggctgacaaaataaaacaaccttttaaagctactagggagtggttaggatcatttgaaaccgttgttgacgcagacagagcctactattaaa

SEQ ID NO: 36100 - DNA, 253 bp, Glycine max
  Clone ID: PAT_MRT3847_132600C.1
atcacaattaacatctccttatcttgtatcctgcatttcaagtgcattctgattgcctcaaataaacttatactccgaattagcaaagccatatgtttgtggcttcgacccatcaagttctgcacgccttccttggtcaataagatgtgtcttagtagccattacatttctactattcgctctagaaatcgtcttactagttcctctcgcatgagcgattcatacaaccaataccactactaaatagctactg

SEQ ID NO: 36101 - DNA, 239 bp, Glycine max
  Clone ID: PAT_MRT3847_132601C.1
cgcgtccagagcaacaaagagatggtgctggcgcgaaaatgcatacaagagactctgatgaaaatgaacatctgatacgaggtatacacactgtgataagatgtgataaatgcacaatattcataaactataaagagagattgatcagtgattgctctgtaatacataagtagatcagtggatggtgatcactcacaaaaacaatgctcgcgatcttgacaaagaccttttttacacat

SEQ ID NO: 36102 - DNA, 420 bp, Glycine max
  Clone ID: PAT_MRT3847_132602C.1
gattctatcagtacagacatgtccaatccattaccggatctaccattcccttcaccatttcaaaggatccaaaataacccactacatttacaggggggcgcccatccacatttacctcctggtcgccctcctgctgcatgcttaaatgataccccatccaaatgctagagcattcacgccaagccaacagccaactgatgcatatactaatttaattagctttataatgtctcaaggcctgatctcattggctaacccacttactgctcaggaactagttggaacttgagttaatccacatattcatgaagatctcacatgagttctcatgaccatgccttatatagtgatctccctagacaatgcacacacttgtgcgctccgattcaaacgccaagatgaacacactagtcatatgga

SEQ ID NO: 36103 - DNA, 223 bp, Glycine max
  unsure (1)..(223): unsure at all n locations
  Clone ID: PAT_MRT3847_132603C.1
tncntgcacgcggacgtaatctctgaattcggntcgagnaacaagcanagcngaagcgnaacgntggctaacngatcggcagagnngcnnngtcananccgcgatctcgngnagntnnncgcganttcggnnatcntnnccnaggnagccgnncncgnnnactctaaggntccgncnagagcctggccatcgtcgaagtcctctgctccgccgacaagccaat

SEQ ID NO: 36104 - DNA, 453 bp, Glycine max
  Clone ID: PAT_MRT3847_132604C.1
acgagatttattgttgtttgatgttttgttattaccaataccgataagtggattacactacggaacctgctatcaactcttcattgttcgctgctattggttgcatgccacttgccactgcctacttaagattttccatctttgcatgaccaaatccatgacttcacacagaattataactttgcatatcgggtaatcaccgtaactacagaccacaaactctatattcgtcgtgcaaatgcaaacagtgccactataaaatttgtgtttgattttgtgcacacacataattgaatggttttacgtgaactccatttaataataaaaagtgtgggtgcgctgaaagagtgagtcatcaacataatacatagttttttttttttaacctatagtttatatttccagtagagaagttgtcaaaaaaaagtttatagctatccaaacaagcactag

SEQ ID NO: 36105 - DNA, 1156 bp, Glycine max
  Clone ID: PAT_MRT3847_132605C.1
attcccgggctcgaccccacgccgtccgaaagtttgtccgctgtggcatgaggagcgaagaggcacctgcaatcggagaagagtagagaggtagtgcatcagtatcaatttctgatccattttctttcctagggttccgttccgcttcttctcgccgttagcatttcgactctgcgcaattcaaaacaatcagatttgacgctagtcacaaacttgtggaaacatggccaatctagctttgactagcatactagaaaagatgactgggaaggacaaagattacagatatatggccacatctgatttgctcaatgagttgagcaaagcaacgtttaaggccgatgctgatctggaggtcaaattgacaaacatcatcatacaacaacttgatgatgcagctggtgatgtttctggacttgctgtcaaatgtcttgctccgttagtgaggaaggtgagtgaggtaagggttgtggaaatgaccagtaaactatgtgacaaattgctaaatgggaaggatcagcatcgcgacattgctagcatagctttgaagacagttgttgcagaagtttctactcagtctcttgcacaatctattctccagactctcacgccgcaattgataagaggaattactggtcctggaatgggttccgagattaaatgtgaatctctggatattttatgtgatgtccttcataaatttgggaatctaatggcagcggatcatgaactattattaagttccttgctttctcagttgagttctaatcaagctagcgtgcgcaagaagactgtggcatgcattgcatctctctcttcaagcctgtcacatgatatgttggcaaatgcaactgttgaagttgttactaacttcaaaaataaagttgccacgtccgaaatgatccgtacaaatatacagatgatcggcgctttgagtcgagctgttggctaccgatttgggccccatcttggagacactgttccagtgctaattaattattgtactaacgcctcagaaaatgatgaagagcttcctgagtacagcatgcaggcactggaaagctttctccttaggtgtccaagggatatttctgtttactgtgatgaaattcttcatttgacactagaatatctaagttatgatccagatctcact

SEQ ID NO: 36106 - DNA, 740 bp, Glycine max
  Clone ID: PAT_MRT3847_132606C.1
gaatattagcaagctgttagtatttaagttttgtgttgcacttaaactctatataaagagcttatgaataaaaacaataagttcctccgcatgatacatctcttctttcactattattttttctaagaaaagcatcttattacttcctcctatacaacaaatggtgctactaaatctcaggttcttactatcaatctacactttaatgtcctgaaaacgcgagatggatggaagtacccacaatttcagccaattactgcaagcaaactttgtctgactactggaattgagcaaagtatagatccaaatatcccagtcagaccataagcaatggcacaaaatggaagagcctcaggttccttggcagataaagctgctgttccgagcccgtggcaactagatgcggttgctattccacgagcaattggatcacgaagacggagtttatctagtgttgcttgcacaaaatttgctccaactaaaccagttactacaactgcagctgctgtgacagatgcattggcaccttcaaaaaaggacacaatgctgagagccaacgccactgttatacatctgggtagaatggatacagttaaagatggctctaaagcaactagacgtccaacaagagcagttgagtacaatgagaataaggtagaaattatgacagaggtgaaaatctcagctgcatgcctttttacaagctttctttgtttgaacatagagaaggcaaatgagag

SEQ ID NO: 36107 - DNA, 261 bp, Glycine max
  Clone ID: PAT_MRT3847_132607C.1
cgctttcgtttcactttgtatttttcactctcccaacttctaattcaatttcttttttccaaatttcaggggtggtggtggaaaatctgaggaggttcttcttacccacccaattgcgtttttgcaccgaatgaaacttatggggaaatggggttctctttgacagggttttgaagttgaggaatcgtgaaagattgaagttttaggggtggggtgtttgtgtgtgtgttttttttttgcatgtgggaatggaagcgagga

SEQ ID NO: 36108 - DNA, 197 bp, Glycine max
  Clone ID: PAT_MRT3847_132608C.1
aaatgattatttttttttttttttggtgtataacacgaccctttggtccaccctttaatacccaaccttaatttttaaacaaaccaccttttcctaaccagaaattaataaaccgtcccctaaacaaaaccaaatttccttttaaaaagaaaatttaaacccttcacaaaaaaacaaaaaatacaccatcctaaaaa

SEQ ID NO: 36109 - DNA, 110 bp, Glycine max
  Clone ID: PAT_MRT3847_132609C.1
gatgtgcgataatgatagaaaagtgcagggggcggatcagatcatcccgcgaacgaaccaggcttggtcacttgcgcttctgactacttgcgagcggaatcaactgcatt

SEQ ID NO: 36110 - DNA, 3128 bp, Glycine max
  Clone ID: PAT_MRT3847_13260C.1
ggaaaaacacacctaggcgctgttcaaacctggccgaacccgaaacatcactctatataaataatgcaaacctaaaacagaggttcgtccctcttactaacactaagaacagaagtcctcgatccgctaagaccaggcaggaggcaagcggcatcttagagaggaagaagaaagagttatatttccgaaatatgctatggtgtatttagaaatcttactagcatgtacagagaagcgaacaggcgcagcactaagcagtaactcgtggaattgctagcaatggcgaggatcaaggtttacgaaccgagtgcgaagtcgatgccgaccctggctgaaattgtcacgaccatgttgtcattattcaccaacttgctcctcttcctatccctgctaatcggtctatgcaattgcagggtaacaacaacaaatgaagaggtgcaaaccctaaacacaaacactcacttcaacccacaggtcccacccctccgaaccctctcttcctcgaagcggttcgagggttcctcggagttcgtgaagctcaaataccacatgggacctgtgctatcgtctccgatcaacatctacctcatctggtacggcaagtggccccaatcccagaagctcctcatcaaggacttcctcaactcaatctccgacgaccaccaccgcgcctccccctctccctccgtctccgactggtggcgcactgtctccctctacaccgaccagaccggcgccaacatctcccgctccgtctccatcgccggcgagtactccgacctccgctactcccacggcacacacctcacccgcctctccgtgcaggacgtcatcgccaccgccgtccaggccaagcccttccccgtcgaccaccgcaacgggatctacctaatcctcaccgccgaagacgtcaccatggaagacttctgccgcgccgtctgcggtttccactacttcaccttcccatccaaggtgggttacacgctcccttacgcctgggtggggaactcaggaaaacagtgtcccgaggtttgcgcttatcccttcgctgttcccggctacatgggcggcggcggccccggccacctcacgccgccgaacggcgacgtcggagtggacggcatggtgagcgtgatcgggcacgagctggcggagctctcgtcgaacccgctggtgaacgcgtggtacgccggcgaggaccccaccgcgccaaccgagatcggagatttgtgcgaggggttgtacggaacgggtggtggcggcggttatattggttccgttatgaaagatggtgaagggagaacctttaatcttaacggtaggaatggacggaagtttctagtgcagtggatttggagccccgttttgaaggcttgtgctgggcccaatgctttggattgaattccttcatacattacaagctctgcctgctactctttttttgcttacttaccctatctatgtatcatacacctaatgatgcttttttttattattaatgacgatattcatttttatcttctccacaaacactagggtttacagagaagcgaagaggcgcagccgtagcagtaactcgtggaattgctagcaatggcgaggatcaaggtttacgagctgaggcagaagacgaaggctgatctgttgaatcagctgaaggacctcaaggccgagcttgccttgcttcgtgttgctaaggtcaccggcggtgcacctaacaagctctctaagatcaaggtggtgaggttgaacattgcccaggttttgacggtgatttctcagaagcagaaggccgcgttgagggatggctacaaaaaaaaaaggtggtgaggttgaacattgcccaggttttgacggtgatttctcagaagcagaaggctgcgttgagggatgcctacaagaataagaagtacttgcctctcgatctccgccctaagaagaccagggctattcgcaggaggcttactaagcaccaggcatcattgaagacagagagggagaagaagaaagagttatatttcccactaaggaaatatgctatcaaggtgtaactttagagcaatcttatcggttaattggacatttacctcctttatactcgacaagttttgatatatctcgttttgtagtttcatgtttattgcttattggctgtgttaaacttcatgtcttctttagacctggggtttcttgaagctaccaggatttatgggtatcgttagtttccgtttaatattgatgaatccgttgcatttttgtcaagggaatccagtcattaaacattgttgttaggaacatactggatggtggtgtcaactgttctcgacgaattgatcggcatggaaagaccatttcagatctcattctgtgtcagcaagttgtgttgcctccttgattgtgtgatttactaataaggtggcaatgttctcctgaatggaatgaatagagcattgcaaaacttagaatgatagaatttattgaagcttggaagtgctttaattgaagtaggactcatatggggagggaggattccattttgtgctctttagcctacatattcttatgataataattagcaaaagctgtgctgtagccacatcatcctttttaaagattatggtgggaagcattttgatctttagattatgttgtttctttttctttgtaatctactacataactagcttctattttattttttaaactttgttctgtagtttgagaactaagttttttggcttagtagaaatttgagaagttagagaaagatggagaaaagacattaagatgtaccaagaagagcaccaacacaagtgagattaatcaaattagtgagagtcggcaaactctttttttttttttttttttttccttttaccctatgtatcatacctaatgatgctgtatcatttttattttttttatttctctacttaacgaaattcatttttatttattgctcgatcctttctgcggtttttgatttgagtccctgagctgattcataatcaccaatgaatgggctttaatcaaagtgccatttgagtgttcccaggtttctcctcctttcaaatcacactatcacagttagtcagtgatggctttctttctgaaaaaaaaaaaaaaaa

SEQ ID NO: 36111 - DNA, 467 bp, Glycine max
  unsure (1)..(467): unsure at all n locations
  Clone ID: PAT_MRT3847_132610C.1
aggcggaacccccggcgggacccggcccggaatccccgggcggaccacacccgccggataacccacacgcangggagaccgcacacagggagacatggacaggggaggccccaacgaccgccggacacgagaagagacaaccacgacagaaaagcagnccgagcccgcggcccacaacggccacggcgcccgacagcagccgcagcgacaacggccagaaacgaagggagcagcgcgcgaaaggcaacaacagacgcagcggaaccaacggctgcagaagggggacccgacaagggactaacnaaaaggacacgacgaaagcangcacagccacaaggggccgggcccagacaggaggacgacaacaaaaagcagaaccgggcgccaaaggccgaaacgtagtggcaaagcagtggtgacctcgagacaccccaaagacgcaattggggaaccactgaagacgcagc

SEQ ID NO: 36112 - DNA, 154 bp, Glycine max
  Clone ID: PAT_MRT3847_132611C.1
cacttaccaatcaatagatttagagaagaaaatgatagacgagtacgcataattgaacagggtagagatgagcatatgggaatgttgtgatctccttaatgacgtggttgatgacatggaccctgacttggatgatccatagattgagacactt

SEQ ID NO: 36113 - DNA, 157 bp, Glycine max
  Clone ID: PAT_MRT3847_132612C.1
tctctgtacattctctaccgtgacatgtggctttaggtgttaggttagggattgaagattgaagaacgaacaagtaggattagtagaatattcgtaggactcagttctctagttatttgatgataattcttgcttttcatggaaaaaaaaaaaaaaa

SEQ ID NO: 36114 - DNA, 481 bp, Glycine max
  Clone ID: PAT_MRT3847_132613C.1
gaagattttttttttctcaatcaaattaggtatagaaaggaaaaataatctacatccggtatctcctctggctctgtttttttctattgcagcaatccttcaatgtaagtacaaaagacttgtaatgattggtgactggacataaaaacaactttatctcttcgctgccttcttggtatttttttccccttaatttactactgagctatgatggttattgctaatggatggttcttgacttataagtaaagatttaaccttataatgcaatttataaaacaaatggtcaaaagtttcagcgtctaatgctgcaaaaacctctgataaaaacattttagctggtacctgtaaaatgaacctttgtgtaaaatttgctgatggctggcacagtaaccttttttcctttctccaatatctattcgtgatggctgcttgcaattctatgtatgttgatctgtgtacatatgcagattgcagtgaa

SEQ ID NO: 36115 - DNA, 282 bp, Glycine max
  unsure (1)..(282): unsure at all n locations
  Clone ID: PAT_MRT3847_132614C.1
tcnttgtngtncgtcagnntgnctgtntccccacangctcgagccgtgtactntgtttcnntcnctgagantgaacngaaagaacattaacacagcgctgacnttgacgnacnttagcannctctcctcanncggggcgacacnctnnnngncntnatgnnggcncnccttnttcngattttnacngggatncntaactgcngggnnanngctcngtncngnngnnncagcatntnnnatggnacnnatnaanggntngcaanccnacgnggcanttctggt

SEQ ID NO: 36116 - DNA, 572 bp, Glycine max
  Clone ID: PAT_MRT3847_132615C.1
actctcccaacaacgcgtctctcgcgagcatattttccgatcgcaggagaggagaagaagggaggggaaggagcagaatgtgtctgtgctatcgacgatctcccgagagaactcgattgagacgatgttgcagagccaacatcgacgtctaggactaccaggaccctgcggcggcgccgctcgtcgatccgacggagttacgacatggtcgtcttacataccacggatatcagagtttgtggccgctttctctgcttctctacatgaccgtattagccgccatggcagtcgacgtctctaatgctaattggaacaccgctgtgattcaaggaatggcttgtgccttcggcgtcatgatcttcaccctcgcttactgcgcgctggcatctcagggggacacatagagccgtgcctgatcttcgatttgtcattgccgagaaaattgccagtgacccaccggatactgtacgtcacgatgctctggttgtatggtatgagagtggcttcacatttgaattgtttcacactgagtatgcaactgcatgcgacccaaggaaggggacactgtgtat

SEQ ID NO: 36117 - DNA, 469 bp, Glycine max
  unsure (1)..(469): unsure at all n locations
  Clone ID: PAT_MRT3847_132616C.1
agntgatagtttcttttctattataggatctatgttaatagaatacttataatacatagaaaaaattttagaaaagttactttatacttatatataaaagatatactatcttctctccttttggagactagaatatattatatatatcaaaaaaaacttttttgtagtattatatttaaatacataacacatttaaatttataattaaaaaaattttatttacataaatttttggtaatttataataaaggtatattacaaggcattatttcaaaactatataatatacatgggactagtataataaatgcaataactattggtaataaaacagttcaacaataggacataagctgatcgtaacgaatacgcgggaatgaggctctcgctcagataaaagtaaagatcattacacaagttttaagtcctattaccacaccacttatagntggtcctattactggattgg

SEQ ID NO: 36118 - DNA, 925 bp, Glycine max
  Clone ID: PAT_MRT3847_132617C.1
gagaatagttcatgcatttatttcttgcattactactgggaatgttaaggtccagtggaatgtttgtcatgctctaggcaacttattcctcaacgagacattaaggctgcaagatatggattggactccagttgtgtttggtgttcttctgcaactattacgtaattcatcaaattttaaaatcaggatacaagctgcagcagcattggctgtgccaatgtcaatgcaagattatggcctatccttttcagagattgtgcaatctgtagagcatgtaatggagaatattgacgatgaccaaatttctgggccatcaaatttcaaatacagggtttcgttacaaaagcagcttaccttgacaatgttacacattctacgctttacctcaagcacaaatgatcaaaacctgaaagattttctagtgaagaaagcatcgatccttgaagattggttcaagggattatgctcatctggcgagggcatgctcgatgttcaagataagtgcattgcagaccgaaagagggttttgatatctggtgcgctacagtcgttgattgaagtatacaaagaaaaacaacaggatgcgatagctcagaagtttgaggaattgaagaacaatatgtaaaggagttgtaaaatgacaatggttcgtattgttttcaggcctattagtgtcaatgttttcccatttcagtaggtggaaatgaatggccacgggagccgaacgattggaatattggtaaaagattcaatccagtcgagaggaatttatttaatgaagcactttatggatggattatatcagttgtagaagagattgctatactgaacaggaggatcgtattgtgtatgcatatttctggtttgtggaatgctttcagttttctgaacttaatcaatgttataccacattcagattctgtaa

SEQ ID NO: 36119 - DNA, 305 bp, Glycine max
  Clone ID: PAT_MRT3847_132618C.1
gtgcggttgaggcggggatcgctgctgccggtctctcgttttcatcgcagacacttctgctgcaaagatggtcacgtacctaaaacccgaaggactttctgtaagaaatgtggcaagcaccagcctcacaaagtgacccagtataagaagggcaaggattccctgtatgcccaaggaaagcggcgctacgaccggaagcagagtggctatggcgggcaaacaaagccaatttttcgaaagaaggccaaaaccacaaagaagttgtgctcaggcttgagtgtgttgagcccactgcagatctaaga

SEQ ID NO: 36120 - DNA, 304 bp, Glycine max
  Clone ID: PAT_MRT3847_132619C.1
gattaatcatatgctatccctacgccggtaactctctgtcactctggagctctctctctcacaaccttcactttactctctctgctgacatgcaaggaggattccaaccatttaagcaacacgggaatgacattagaaatgctgttctacaacgggagcgcatggcgaaccccctgttacagccaaccgtgtataccgggccagcactgaacaccgtgctcgcatagaggagcgtggatctgagagcaccacacatttcagacatcttggaagacacaagcgagggcagctgatggctcctggc

SEQ ID NO: 36121 - DNA, 211 bp, Glycine max
  unsure (1)..(211): unsure at all n locations
  Clone ID: PAT_MRT3847_13261C.1
acatcagtggctcaagacgtcttgcccgtgttgactgatgcgtttgatggcaatcttttgagccttgagtttgataactttgctgaagtgcgcaaactctatgaaggtggagttacactacctacaaactttcttagcaagaatgccccaanaccagaggataaggaaagttttcgaacatacggcgaacagtactactagnatctaccac

SEQ ID NO: 36122 - DNA, 2116 bp, Glycine max
  unsure (1)..(2116): unsure at all n locations
  Clone ID: PAT_MRT3847_132620C.1
gagaagaagaatgataaaagccttgacannngaatcannngagtgtnnnaggatgaaggaaatcaacatggagttgtcccnnnngcttgaggtccagacacaaagattagagcttttgactgctcaaagcatggtcattccttgttgtcctgctatgcagcctcatgctcctgcgatgtatcaggaccccccttttgccgttggccgtctggagggtctggaatggggcctcggttcgcctatgttgctcctgcctgggggcccttcaagacggagaaccagcaaacttctttgattggatttacattagacttgtatttgttgtcaccaaagtcttactcaactgttaggaaggatcatgaagctgttccccagtatgccactaatgaagacttttctgccatttcaaaccctgatccacgagtaacatgtcgacaaaagtctactgagttgctttttgttcttgtaacctcctcaacacactggaggtcgtaatctgtatcttttgagtgaattattcaacaaaatccttgaagaggagtgtcgtcgacttattgaaatctgacatggagaatttacaagaagatatcaaagcccgactggttgagtttgaggctatcaagagtgaatatacaaatgcacaaattccatgtaatgcagctgatgagcgtgccatgttattggcatctgaagtaattggtttagaggagaaggcactgagactaagatccagtgagctaaagctcgagaagcagttggaaaatgcaaaagaagaaatttcttcatacagaaagaaaatgtctagcctagacaaagaccgccatgatttgcagtcaaccatcgaggctcttcaagaggaaaagaagatgttgctttctaagctgcgaaaggcttcaggaattggaaagtctattgagagtcaaacaagtaaaagggatgtttctacatctacagacgatttagcaagtgaagatcctgcttctaactcttccaacccagaaatcaatgataatgctgctgaggcctctagtttgtcctctgttactgaaactagacactcatcttttggagtttcaactgtgaatattcctcacgatcagatgagaatgattgagaacattaatgcacttatttctgagctggcattggagaaagaagaattgataaaagccttgacatctgaatcatctgagtgttccaggatgaaggaaataaacaaggagttgtcctgaaagcttgaggtccagacacaaagattagagcttttgactgctcaaagcatggtcaatgaaaatgtttctgcaaagcaaccagattctcgtgctatgtatgagaacaccccatatgcagatgagggtgatgaggtcgtggaaagggtgttaggatggattatgaagctctttcctggtggaacttcaagacggagaaccagcaaacttctttgattggatttacattagacttttgtatttgttgtcaccaaagtcttactcaactgttaggatgcggacgcgtggggtttcctagtatgcaaggtaaagaatcagcaaatttcaaccccggatccacgagtaacatgttgacaaaagtctaccgagttgcattttgttcttgtaacctcctcaacccactggaggtcgtgatctgtaaattttgagtgaattatacaacaaattcttgaaaaagaaatgattttctcttctgagctgctgcttattgatcgatgaatccagctgcaattattttcgaagatggcaataaaatctcttctgcggtgttatctctttgactgaattccaaattttgtaagtataatagttggctatgaaagagactgtaccaagaagcatagtgtgagagtcagagatcagttgttaagtatgagatgtgagaacatttgttgaatgtatattgctaaatagaagtgcaaaagatgattatagatacataattgatttatttttaagtgcttcaacttcaaatcactcatgaacattatatttgctcagtagtgaaaacagcatttacccattatgaatgggaagagagtttgtgttgacaagatgacatgtataagtcatcaatttgtattctttaaataagagttattgtttcc

SEQ ID NO: 36123 - DNA, 893 bp, Glycine max
  Clone ID: PAT_MRT3847_132621C.1
catggatttgtcccgaaagcttgaggtccagacacaaagattagagcttttgactgctcaaagcatggtcaatgaaaatatttctgcaaagcaaccagattctcgtgctatgtatgagaacacctcatatgcagatgagggtgatgaggtaacctatgatcagttttactttagtttggttacgtgaacttgttgttgtcttgcatgtctagtacacatcatttatacaccctcatggtgttttaaagtcttgatgatcaatcccagcctactattttgtaattgaaagcttcactacttgaggagtgcaagtatcttgaaaaacattagacctagaatatattgttagggtggaagtagtttgtctgttatgaaaacctgtgaagtagtaatgattgttcagattataaggattagaaaacttgaaagtgaaaaaaaaggattttatatctctttttctggtaccaggttgtggaaagggtgttgggatggattatgaagctctttcctggtggaccttcaagacggagaaccagcaaacttctttgattggatttacattagacttgtatttgttgtcaccaaagtcttactcaactgttaggaaggatcatgaagctgttccccagtatgccactaaggtcaagaatcagaacatttcaatcccagatccacgagtaacatgtcgacaaaagtctactgagttgctttttgttcttgtaacctcctcaacacactggaggtcgtaatctgtaaattttgagtgaattatacaacaaattcttgaaaagaaatggctttctcttctgagctgctgctcattgatcggtgaatcaggctgcaattattttggaagatggcaataaaatctgttcttcggttttaagaaacac

SEQ ID NO: 36124 - DNA, 397 bp, Glycine max
  Clone ID: PAT_MRT3847_132622C.1
tcgcccacgcgtccgtacggctgcgagaagacgacagaaggggcatagaattctttcaccaaagctaggtctatgctcccatcgaccaaattggtgaggcgtttatggaaattatgcctctccaattcagccttaaattcatctagctcaaaatgatatatctctactttcctctctagtaaaatatttctcccctgaacattatctgtgtatctagtccaagaatctaaggaagagaatctccttgtgttatactgcactgtgggtcttgaaccaatacttttacgtttcctagaaaccatttgcaaataaagaaaccaaatagttgatcagggcccaatttataaaaaatcaaaactgaaaaagacactggccgcttagctggcctttacaataa

SEQ ID NO: 36125 - DNA, 381 bp, Glycine max
  Clone ID: PAT_MRT3847_132623C.1
cgccaccggagggggccgcaccggaaccaagcatggaacagtgagagatatggttctgtctaacgagtctacgctgaactttgtgctttcttgaagatgtcgttactcttcgatcttatcaaccttaacctatccgacatcaccgataaggagatcgccgagtacatatggtctgctggatctcgcatggatatgcggagcagagcacggactgtctggtgactgcataatgacccttacaagctattcaagcggaactatgatggttgcagctctggtcaagcttctggacaagatcttgaaggggacttatgtccacaatcaatttttcgggatccattttcgaggggtctacactgttctggatatgtttgatgctta

SEQ ID NO: 36126 - DNA, 442 bp, Glycine max
  Clone ID: PAT_MRT3847_132624C.1
ttcacgcgttcgtccacgcggacggccacgcgtccggtccagtggcttgggaagtggaattggttcattgacagtgagagctaggtgggtatgagggggcgtgatgcacagtaaaatgagatgatggtgctgcgttatatgtgaaacggagatctatgtgtacatgccgatctgcagggagcttctagtacatttatcaagaatcacacgcctgcacagccagttccaccgctgtccctgaacgcaatctggatgtttgaccgagtgcacatagggcggcctgggatctaaaaattgttactagtgcctggtgggtatatcctatcaggctaggaaactgctactactggcgaatatctgactaggggagggttcatgatccgtgaaaggaaaaagctgttccaccacacggtataatcatgggttttggcctactatttcg

SEQ ID NO: 36127 - DNA, 295 bp, Glycine max
  Clone ID: PAT_MRT3847_132625C.1
ggcttccaaggctgcacttctcttgtgtttcaatgttctcttcttcaccgtggttagctccacatatgtgccatgcaacccaccccccaaaactccaaaacacccacctgtcccaaagccaccttccccaaagcaagcaagttgccccaaagacactattaagtttggtgtgtgtgctgatgtgttgagtttgatcaacgggcaactttgggaaaccccccaaaaccgccatgctggaaccttattgaggggtgtcgctgatctttaaactgcaggggtgcctctgcactgctct

SEQ ID NO: 36128 - DNA, 509 bp, Glycine max
  unsure (1)..(509): unsure at all n locations
  Clone ID: PAT_MRT3847_132626C.1
cggagctgattttaagatttttcatttcttccaaactaaatcaaaccaaacaaatacataaaatcaatgttattataagttaaccaaagccatgaaatcagtgtagctccgaggaaaagcgacattactatcatacccttctcgtgtttcttcttcattttttctctcttccactgtcggtgacggtttctgagattctgagaaagtttatgtggttgatttgaatcggttgtgtggtgtggtgggaaaataatttcggttacatgtttaaaaaggcaaagattttggttgtgtgcttgtttctgaaacctcgtactgagttgtagcacttggatcttgtggattgagcctttaagtcgctatcttactcagcgattgtggttatggagaccctttttgttgttgagcagcataataagaaccaatactacaacaggtccaagtcacanggtcatgctcgatttggggggtcaccttcaaggggctttanggatatcaattgcagaact

SEQ ID NO: 36129 - DNA, 571 bp, Glycine max
  Clone ID: PAT_MRT3847_132627C.1
gtgcttttacataagcatataataaagctacgcgttaacaacattttttaagctttaccatgtagcggctggaatgacaattaagtaattaaccgaaagtataatgaacactagtaaaaaaataaggctcaaaataaagagggaattttctcccccaataagtcttgatgtggacactcatttatcagtattaaaaaattgtagggtaggtgtgagtctaaatattttattatatatctcaactcatattcagacgtttatttaataaattcacaaacaaaaatttaatgttacatttgtaagattcacactttattctcgcatataatatttgtgtaagatttaaatttattcggacattttatttgtgttgcattataactggaatataaatgatttttaatattttttaacaaagttagtatcatatttttagagtccatttgattgttagattatgataaaatataaggataagataagaacataataaaataatgatatataatgtttagtgtatttaatgatatacagtaaataatgatgatagtgataataataacgaaagaga

SEQ ID NO: 36130 - DNA, 358 bp, Glycine max
  Clone ID: PAT_MRT3847_132628C.1
cttccatcctattctttattcgatggcgtcagctatagaacactatggtaacttcctcttactttctctgtcaagaagggcacaggaaagggggggaaaattgcaccccgccaccctcaaaaagggagtccgggaacccaagggccgccgggctgggatcaaaaaaacccccaccactggggtcaaggaaatgtaccagccctgagaccccgaaaaagaaaaaccaggcctggatgaaccccccccacaacaaggggaagaaaaattgccgggaaagaaaatgcccccaaaaattcccaacaacagcctgagaaaaaaaatgggtgggaagggccacaaaaaaaggaccggtttattt

SEQ ID NO: 36131 - DNA, 147 bp, Glycine max
  Clone ID: PAT_MRT3847_132629C.1
gccttcctttttttttttttttttttttattgttcaatctttggaacttgaacagaaacaggcctttcatattcatatccatgatccaggagacacgagcgagcagcaagacttgtcctaaagctgagcatgaatttttttttttga

SEQ ID NO: 36132 - DNA, 2495 bp, Glycine max
  Clone ID: PAT_MRT3847_13262C.1
cacaatctcattcgatcatcaatcctcactcgtggatttcaatctcgttcagttcctcccattttcatacacaaataattttctttatatttctgcattgctttgagtggattttgcataatcatattatcaatttttcattcattttgggatatgagtgcagaagtactcttgtgaaggttggaaaaaagaaatctcaatttgatgtatgaaccaggggtgtaagaagaagttgaggtgatggaaccccaggatgaagaagagatccataactgtttgatcaagctgagaagtaatccggaaaggcgaagggataaggtttacattggttgtggagctgggtttggtggtgacaagcccttggctgctcttaagttgcttcaaagagttcaagaactaaattatctggttcttgaatgcttggccgagcgaactcttgctgatcgttatcaaatcatgatgtctggtggtgatggttatgattctcagatttctaactggatgcatatgctgctgcctctggctttggaaagaggaacttgcataattaccaatatgggtgcaatggatcctctgggtgctcaacagaaggtcttagaaatagctaacagcctgggtctcaatgtttctgttgctgtggctcacgaggtgtctgtcactaatataataggttcaggattttcaccagcaaaatcatatatcatggagggtggtatcagcacctacttgggagctgctcctattgttcgttgccttgaaaagtaccaaccaaatgtaataattacatcgagaattgctgatgctgctttattcttagcacctatggtttatgagctaggatggaactgggatgaattagaacatctagctcaaggatctttggctggccatcttctagaatgtggttgccaactcacagggggatatttcatgcatccaggagacaagtaccgagatatgtccttccagcaactactggatttatcactgccttatgctgaaatctgttttgatggccaagtatgtgtatcaaagtctgaaggaagtgggggagttttaaattttaatacatgtgctgaacaattactatatgaggttggagaccctggggcttacgtaacccctgatgtggtgattgattttcaggatgtttctttccttccattatcaagctctagagtttgctgtcatggagcaaaaccatctactatttcagttcctgataagcttttgcagttggttccacaggattgtggatggaaaggatggggagagatatcttatggaggttatgaatgtgttaaacgtgctaaagcagcagaatatctggttagatcatggatggaagaaatatttcctggtcttaatcaccgtatactttcttatataattgggtttgatagccttaaagctaccagcgggaatggaaatgagtcatcacagacaactagtgaagataataggctacgcatggatgggctttttgaacagaaagaacaagccatccaatttaccagagaatttatagcattgtatacaaatggaccagctggtggtggtggtatcagtactggatataagaaagagactcttctagagaaacacttggtaaagcgggaagatgttttctggcgaactgggataaagaggagcacaagaagtcagtcaaataaagtagttgatcctgaccacaatctgaggcacatattgacattgccaccgaggctcgaagctgaaacagacaaatccttggaatctgtttctcttggtagtagttgctcacctgctccatctggccagaagattccactttacagtgtagcacacagcagagctggagataaaggaaatgacattaatttttccctcatcccacattttcctcctgattatgagaggttgaaactaattattacatctcaatgggtaaaatcagtggtctccaatcttctggatttgtccctttctcctgatttagatgcaaaaattccaagagataaacgggtcaatgaaaatgttaaggtggagatatatgaagtcaagggaatccagtcattaaacattgttgttaggaacatactggatggtggtgtcaactgttctcgacgaattgatcggcatggaaagaccatttcagatctcattctgtgtcagcaagttgtgttgcctccttgattgtgtgatttactaataaggtggcaatgttctcctgaatggaatgaatagagcattgcaaaacttagaatgatagaatttattgaagcttggaagtgctttaattgaagtaggactcatatggggagggaggattccattttgtgctctttagcctacatattcttatgataataattagcaaaagctgtgctgtagccacatcatcctttttaaatattatggtgggaagcattttgatctttagattatgttgtttctttttctttgtaatctactacataactagcttctattttattttttaaactttgttctgt

SEQ ID NO: 36133 - DNA, 261 bp, Glycine max
  Clone ID: PAT_MRT3847_132630C.1
aaagtttggctattctttattacaccttatttttctcaatcaaacaaatgatattagaaatccacattatgaaagtatgtatgtggatttctaatatcatttgtttgattgagaaaaataaggtgtaataaaggaggaaagtttggctattctttcaaccatgtgacttgatggccaattgtactctatcaaataacatatgttaatctgtcattaattatatttttttattttctcgtggaattaactgtttcctgtgtg

SEQ ID NO: 36134 - DNA, 1344 bp, Glycine max
  Clone ID: PAT_MRT3847_132631C.1
ggcggcggcgagaagacgacagaagggggaagaaaaataaagttattattaaaactgaaatatccaaaagtcagaagatggcattgcgaggattgagtgcggtggcggtgacggcgtcaatacgccctcccggtcctcgattcagagtagacagcggcacatcaaggattccctcttccggatgcagaatctcggtgcggtgtaaagctgtcggagaaagccgacaaggttccttggaggaaaccgttgtttatgagggtatttatggcccctggaccattgacgactccgatgttcgagaggtaattttgtacagatcaggattggtaacagctgctgcatcatttgtggtcgctggttctgctgccttttttcccgatactctgaagcagaatgttgatttattgtatgtccttgggtctggtgggttgggtttatcgttgctcttgattcacatatatgtgtctgagatcaagcgcgccctacaagcactatgggggcttggtgttgttggatcggccacaacctacttttgccttgctcaaccagctaataagaatctaatacaatatgttgttgacaacccatcagctgtctggcttgtcggtcctctttttgctgccttgacaggacttgtcttcaaggaaggactctgctatgccaagcttgaagctggacttctcacctttgttattcccatacttcttcttggccatctgactggtttgatggatgatggagttaagcttactttacttgcttcgtggatgactctttttgtgatatttgctggaaggaaattcacccagcccatcaaggatgacatcggtgacaagtctgttttcatgttcaattctcttcctggtgacgagaggaaagccttgcttgagaaattagaacagcaaaaaattcagaattaagatggattgctttaactggatgtgggaaaattttgaaaggaccatctcacgctctgtgagcaattatcccatgtaaaaggaaatattttcagcccctcccctagaaattaaagatgataccacagttactaaaccactttcccatgtcttccttgatctctgcaaaagttacactacatggtctatactatacacatatatttagggtcgttgtcctgtgcaaatgataatgcatgcttgactcagaacctgcagaatgacaatttagtgaaggttggtttgtgtagaagtgtttcatttagttcgtttattaattaaacaagtattatattatcagtacatgaactaaacaaaaagtctctatgataattaataattatgcatgcttgcagtccaataaaaaaaaataaatatattataaata

SEQ ID NO: 36135 - DNA, 655 bp, Glycine max
  Clone ID: PAT_MRT3847_132632C.1
gaaatatccaaaagtcagaagatggcattgcgaggattgagtgcggtggcggtgacggcgtcaatacgccctcccggtcctcgattcagagtagacagcggcacatcaaggattccctcttccggatgcagaatctcggtgcggtgtaaagctgtcggagaaagccgacaaggttccttggaggaaaccgttgtttatgagggtatttatggcccctggaccattgacgactccgatgttcgagaggtgttgtttataatttcatttgattttgaaaaatgtttcttagacaacccttgagagagaaaggaagagatgagaaatgagtgattgatgatgtagcgtgataagaagagagaaaagataattgttggttgagtgtaagaaacttttgtacgtggattcatcatcaattagttaattatgctatgctatggcaggtaattttgtacagatcaggattggtaacagctgctgcatcatttgtggtcgctggttctgctgccttttttcccgatactctgaagcagaatgttgatttattgtatgtccttgggtctggtgggttgggtttatcgttgctcttgatttacatatatgtgtctgagatcaagcgcgccctacaagcactatgggggctttggtgttgttggat

SEQ ID NO: 36136 - DNA, 106 bp, Glycine max
  unsure (1)..(106): unsure at all n locations
  Clone ID: PAT_MRT3847_132633C.1
cgatctgtgtagaaacgatgaaggaactatggggcacaaatggggttcactaatggccactattgngttccatngtaccanaatcctttgagtcngctncctctcc

SEQ ID NO: 36137 - DNA, 337 bp, Glycine max
  Clone ID: PAT_MRT3847_132634C.1
ataaaaagaaaacttaccttaaaaaactgagtttgcgaaaagggggccctggaaaatttggaagtccttgaatctcctacacctgtgcccccccaaagggtgcaggctacggaaaaatcactagacaaaattctttttgccttgaatggccttcttcatacattttgcccaactataattctttgcccgcgtaattcattgaatgtccaaaaacggactcaatgttttttgatagactcaaattgatcctcgatgaagccccatcccccgatgacgacttctaacccccaattgcccttaaaccatgcggggcccactgcctgggggggcggaaaaa

SEQ ID NO: 36138 - DNA, 328 bp, Glycine max
  Clone ID: PAT_MRT3847_132635C.1
acagagcacaatgttgttttcagttatttctaaaagaggcccagggcactgcattttttaagccccatagcccaagagtttttttagagttaccctccatactgaataaacaaaaacctcgtttctttaaaccagccaaaaaaatcttggaaaataaaaaaaaagaacactgcctaaatccattgccccagggcaaaaaaatccatgtgggggcactaaaagttgaaaaattgctctgcttatccaccaacaagaaagttaattaaaaaaggggccctattaggtgtgggaacccccccctctgggatgggaccagggaaatgaaaaa

SEQ ID NO: 36139 - DNA, 226 bp, Glycine max
  Clone ID: PAT_MRT3847_132636C.1
cccacgcgtacgaaaaggaaagggttctatttgtttcaacaactgtaaaaaatacctggacaggattcatggttatagaggctccacataacatgatgctataagacgcagtgacaatttcaaggtataatatgttaccaacaaatcggatagtatacatattatgcttaaaacctataaatacttgtctcaacttattataatatctaatgttaactaaaaaata

SEQ ID NO: 36140 - DNA, 265 bp, Glycine max
  Clone ID: PAT_MRT3847_132637C.1
acagcgtacgaccagactacagatgactatagatatattaccaatgcacgggcctccatactgtaggggggcacctcggacacagagtatgggaaaacatctcttatgctgactgcgaaaccgtcgcacgatctaactgacatgacaaagctcgaataagcactgctatctgtacatacaaaatgcgcgcttacaggtgcattcaaactactaccttgtgagtcctgtactaacacaactgcaaggatacttactattgcggatg

SEQ ID NO: 36141 - DNA, 298 bp, Glycine max
  Clone ID: PAT_MRT3847_132638C.1
gggaaaaagaccaagggggcccaaaaaaaaaaaggggcccccaagggacaccctcggggaatttttaaaaatcaacaataaaaggaatgcccccatggggggttccaaatcccccctgggccccaaacatgtttttttacaattgagggcatgcccccatgggtttggccttttttcccaaaaccccccacaattggtttgttttggggggaaaatacgaaaatcccctagtttgggcacgccttatccattgtcccaaccctcccaaaaaaaaaaatttttttttttggggggaaaa

SEQ ID NO: 36142 - DNA, 482 bp, Glycine max
  Clone ID: PAT_MRT3847_132639C.1
ctacttatgtaacactttacttatacaatatgcagaagcccttcttcactctctctctttcttccctttgcttgctactctcggcgagagcatgctctgctattacctccaccaagtccaacgagtgccaacttaacaacctcaacgcgtataaacccgaccaccgcgttgagtgcgaacgtggtcttattgaaacatgcaactctcaacaccctgagctgcattgctccgttgtcactgattccaaacgcactctcaaccgcatccgactccaattgccatcttactcaccttatacccaaatgatcatgtgtcttcaacggaatggagcaattgtattcgcattctcaggatgagctgagacgtttgagaagccacaacagcaatcaaacgcaacaggctcaaggccgcaagggcatctactagacagacaccaaaagattcgccacttctacgaatgagacgtactagagattcctcct

SEQ ID NO: 36143 - DNA, 1481 bp, Glycine max
  Clone ID: PAT_MRT3847_13263C.1
gctcgagatcatcatttggtgcagatcaatttgatgatgctgatgaagctgagaaggagcacaagagctcttttttcaattggttctacttgtcaataaatatttggtgctcttattgctgcttctgtgttggtgtgggtacaaaccaatgtcagttggggatggggatttggaattccagcagtggccatggcaattgctgtggtgagtttcttctcgggtacgaggttgtatcggaatcagaagccaggaggtagccccctcactcgcatgtgtcaggtcatagtggcatccataagaaagagtgatgttcaagttcctaatgataagtctggcttatatgagatagaagaagattcagagtcagctattgaaggaagccggaagcttgatcacacaaatggattaagattcttagacaaagcagcagttctaggagattcagacaatgtgaaggacccggtaaacccatggagactttgcactgtgactcaagtggaagagctgaaagccagtataagattgcttcctatttgggccactggcatcatattgtctactgtctatagtcaaatgggaagctaatttatactgcaaggacacaccatgaccaaccgtgtgggcaacataaagttacacatctcaccagccactctttctggctttgataccatcagggtcatcttttgggtgccagtgtatgacaggatcattgtgccagtagcaagaaaattcaccggccgcaaaaatggcatagctcagctcgctagaatgggcattggccttttcatatccatatttgctatggtgtattcagtaatcttggagagcatgagacttaaaatggttagaagacacaattactatgaccgtgagcaggtccccatgtcactttatttgcagattccaccatattttatcataggttgtgctgaagtgttcactttcattggtcagttggagttcttctatgagcaagcacctgatgccatgagaagcacatgttctgctctccaactcctcactgtttcatttggatcctacttgagttctttgcttataacaattgtgactaaggtcactactaggaatggtggccctgtatggctacctgacaaactaaactatggtcaccttgattattttttcttgctgttgacagtgttaagtgtgctgaattttgttgcgttccttcaggtgtcaaagttgtattcatataaaaatccggttggaactcttcactgaaaagtgggttaagttggacaaaggatgttcaaattatgcagtttctatgtgcccttttttagtgtcttgttatgtaagtttatgttctggtgcatgcaacaaggtcgcaacatatgtacagcaagttgcacattagaaagtcttatttctctatgctttgttttccaccttgtattacactttataccatcaactatggtcaaaatcaatgtataaagcccttgttatttgtgcct

SEQ ID NO: 36144 - DNA, 484 bp, Glycine max
  unsure (1)..(484): unsure at all n locations
  Clone ID: PAT_MRT3847_132640C.1
tcctctatcttggacgagcggggagaggcggnnccaagaaaagaaccagaacccngcaacgaaagacgagaagagaagagagaccaaacccgaggagaacacggcagggagtaactctcgctctcactgcaactgcacatagctaccttggagagatctccaataccctccgttaatggtttccaagacaagacagcatcggatttcgaaaaaaccatcctcaggggaggcaccatagaacacaaagattgtgcaataggaatagaacgacgagcgtgagagcaaggcctagcgagtcaccgaatgatgtatagggagtgattgcatcagcatctcgtcgacgaattcacaaaggcctatcggaaactcgctctgtaatatcatgcttatgctaataaacaagatatggcacacgacaacctctgaggataaaacatgcctacgatacagggctgacttctaatccccgcaaaaatatgattct

SEQ ID NO: 36145 - DNA, 246 bp, Glycine max
  unsure (1)..(246): unsure at all n locations
  Clone ID: PAT_MRT3847_132641C.1
tacaacccatttcttttttttaggtaaggtgctaaccccatttacaacctttaaccatnggattagaaacaaattgggcatgaattcactttgttgggacaggaccaaaccataaggggtaatccctggccctgagcaaatccaagaagtctccaacctgatccatgactttgataaacccaggttgtgtcccatcgtcaagttgggggactctggcacttgcacatttataacgcgagaaatggc

SEQ ID NO: 36146 - DNA, 287 bp, Glycine max
  Clone ID: PAT_MRT3847_132642C.1
ctgccttgctcatttacacacctctccaacctcacactttcagctttatttgaatccctctctctcctttccacatagtcagcgctgacgttgcacatcattcaccaacaacagttccagaaaatgcaacaacagaggtaatcaagactcaggaaacaaccccggaaccagtaccagctcatgaggctcctgcaacagaacaagaagcagctgaggttcctgctcaagaagcacaacaagcaactgaggttcctgccccagaatcaaccacgaagcaccaaaggaag

SEQ ID NO: 36147 - DNA, 271 bp, Glycine max
  Clone ID: PAT_MRT3847_132643C.1
gaccaccaaaagggctcatgctactttatctaccgttggggattatctaacaggctaaattatcccaactacttttaatcatgattctctctgttaaattactgattgtgctcctgatcagaacgaagataatgctttccctggcatgattaaaccttacaaagctgttatcttccacaaaacctgtgctcgcctctaataagacgctcatactgtcagactatacgatcataagcttctcctgctggcctttagccctatagataaacaa

SEQ ID NO: 36148 - DNA, 355 bp, Glycine max
  Clone ID: PAT_MRT3847_132644C.1
cccaagtaaatatataccgtctatcactcttaggaaattgtctcatggtgtgtgtgtttaattgagagacatcctaactacatttgttccacatccgttagaaaactttctaaccacgccagtgggttcgctatgtcttgcttctgtagtaatcagactcattaaaaacagagctgacaccaattattgcctaagtgttcaatacataggaccaactttcttttcatgagctaatcaacgtgcttgtctgagcagaaaaatgttctccttacatgattatctcaactgtcggtgccattcattggctgaatttgccagttcctgcttgtccctggagatggcccgtaaatgcaat

SEQ ID NO: 36149 - DNA, 224 bp, Glycine max
  Clone ID: PAT_MRT3847_132645C.1
cgggggggggtattatttcaaacccaataaacaacctcaaatagggttaaattaacctgattttttctgtatggaccattaactgcttttaacttacccaagagaacatcttctgtttggaccataagccgcacatatcccatgtcaccctgaagaagtttcaaaatctgttcccccaagatttggaagacaatcgccacattcctcaaaggcttatgttgttg

SEQ ID NO: 36150 - DNA, 368 bp, Glycine max
  Clone ID: PAT_MRT3847_132646C.1
aaaagattccttgattaaaaatttttaccccctttttccaaaatttgggaaaaagggaaaattggcctcaataatttcaaattttgggttttgggggggaaaatgattcagggcttttaaaaatttggttgaattggaaaccctttttccggtggggcccattgggacttaaaaaccccccttcacccattttttcttcgaaaaaaaaaaaaaattccggttgttggcccttgggggggggttaacaataacaataacaagcttgggcttaacaatttttttttttttaagtttaagggcaatcctctttttaatggttttggccctcgaaaccccgaaccctggggggaaccctgggttcaccccgg

SEQ ID NO: 36151 - DNA, 407 bp, Glycine max
  Clone ID: PAT_MRT3847_132647C.1
ttcgttacaataatcttacgcttttctaagacggttcttcgtccatttggtctcgcgggcataaaaggttcttaaaaaaaaaagacctcactcaacactggggccagccaaattttctgggttcttcttattcccataatttaacatctttggcccagaaaatccttatctaaccacgctatctccatacagcatatgattacccacctgggccaaaagcaatcctttttgccaatcccttccattggaaagcctttgttttcgatctccttacccttttgaccatccaatcaacttcccttacaaggctgcttattatggccctcttaacatctgtaattttcaacccagttccccactccttacaacataacccacatttggtttgttgctctgcaaagaaaggc

SEQ ID NO: 36152 - DNA, 480 bp, Glycine max
  Clone ID: PAT_MRT3847_132648C.1
atccaagatgaagaagatgaagaagaagatcgggttgtggttcgtatgaccattgttcggaagagcggtttggtaaaaaagcttggagatgattttgacagggttggcctgaaaaacgatgagtccaatacggtgtcgtcgctgatgacgactgagtggatggaaatcggtttataatggtgaacttggtaacactacggtggttgatgtagctgactaatcaaacaccagaggaaagaagagtgcaagtgtaatctacaagagctctggggtgagaacttcttccagattggctaaacgtgtgtgcaatcaaacgtcttgtggttagatgtttgataaaattgcggtttgccttttccttttattattcgtcaactagctattctgtgtatgttacaagatttacgatttgctcaactatagggatttctcactacttcttacctgaatgaatgactgcactgggccttattttttgct

SEQ ID NO: 36153 - DNA, 240 bp, Glycine max
  unsure (1)..(240): unsure at all n locations
  Clone ID: PAT_MRT3847_132649C.1
tttttgttnnnnggcttgctgagnntttttgtgtttttgactgtcttgtagtgaaactatgaaagtagaggttgtaataaatgcactaccacgctgaatatgttaggtcataattttttattttggtgaacttggagtttttaatttagttactttgatactgtcgaatgtattgcattggccataggccattatatcaccttcatctgtttccattttgttaccgctggtgccgaattc

SEQ ID NO: 36154 - DNA, 341 bp, Glycine max
  Clone ID: PAT_MRT3847_13264C.1
gggtcgagctctctctctctctatttctttcttatccagatctcgcaaaaaaaaaaaaaggcggggggcaattaacgctcccactccacgcgaacagttcgtatacatggctaaattggctgattaggactaactttacgaggcgatcgtgacatttgtgcttaaggacttcttcttcaacgatggccaggcgctcgacttagcgaaattgaacctgatgttgattccctacgaggacatagtgaactcttgactgttacagagctttaacggcgttagcgcgaagactatagcggtgaggacggagactccgtccgtcgctaacggcgttttgtatgaac

SEQ ID NO: 36155 - DNA, 369 bp, Glycine max
  Clone ID: PAT_MRT3847_132650C.1
cccacgcgtccgaactaatatattcaaagtttatcacacctacaaacaacacaggaaactgccataataaaaatgggaaatggaacttacaactatatttatcacattcaaccaatacataatctaccataaaaagtaaaaacggttctttggtctaactattctcacaattaaaaattctatatcactaactacctatttacaacatccaatcttacgtacacgtacatacgacctcatatctcttttatattgaaacctaaaatcaattactttatcacatttttacaacgtcatgactaagaaaaccctgaccttatccaacttaatcacacttcagcacatcctcatttcactagcattcataat

SEQ ID NO: 36156 - DNA, 375 bp, Glycine max
  Clone ID: PAT_MRT3847_132651C.1
cccacacgtccggaaacagggaggtgaaagtgaacgtccttgcttcattcgttgctgcaaggttggtagcatggcactgccatgcctacgatatgatgaatattcgaatgaacactggctatggtgcccgtacttccgaagtgaaatgcgcaagttggaggcttgctgtggaagcacacaacatgactagctttgagaccattcctgaagagtgcgttgaatccacacatggatacatccatggcgaacaatatagatcagactaccaaacagcttacctacaagcttacttttatgccagagacctcgaagaccaatccaaggacacatttgagtgcagcatagatggctacgtactctactatattccatact

SEQ ID NO: 36157 - DNA, 1067 bp, Glycine max
  unsure (1)..(1067): unsure at all n locations
  Clone ID: PAT_MRT3847_132652C.1
acgagggttcgccatattcataggtagtggttgtgagcgaaactatgccatataccacaacacaacacattaatataccataacactcctattgttttgtttctgtgttccctggctccgtcgcgttagtagttactcactttccttctcttcacaaacctacttgtttctctctcattttttccccactatagcatgtctctaagtctagccatcaaactacacctggcttcttcttctccttctttttccctccttaccctcaacaaccaccaacatgcaaacaagttaacaacttccgaaacttgttccaacaccaaggttcgtcccaaacccatttatagcaccaaccctttgatcattcccacgtgtaaagtgaggccaagagtgcaatactgtggcaccatgatcaagagttctttgatagagcctgatgggggggcattggtggatcttgtggtgcctgagggtgagaggggtgctaagatcaccttggctgagtcactgcctaaggtgcagctcacaaggattgatcttgagtgggtgcatgtggtgggggaagggtgggctagtcccttgaaagggttcatgagggaggatgagtatcttcagagtttgcatttcaattcccttagggtcaaggatggttctgtggtgaacatgtcccttcccattgttttggccattgatgatgagaccaaagagagaattggatcctcttcccatgtggggttgctcgggcctgatggagattgtgttgcaattcttcgaagtattgaaatctacaagcataacaaggaagaaagaatagctagaacttggggaacaactgctcctggattgccatatgtntgaggaggtgattactccggcaggaaattggcttattggaggagatttggaagtgctaaaacctatcaaatataatgatggcctagataactacaggctctctcccaaacaactccgtgaagaatttgacaagcgtcaagcagatgcagtttttgcctttcagttaagaaaccctgtacacaatggtcaatctttgttaatgaatgatactccgt

SEQ ID NO: 36158 - DNA, 262 bp, Glycine max
  unsure (1)..(262): unsure at all n locations
  Clone ID: PAT_MRT3847_132653C.1
ccgctcaagctaaacctctacagccttcatggccaanctcattacaggattcaaggccacttgtaacgaatttggctctnttttcaaagccatccttgcatacaccgtgttatccaaagaattcaagattcggagtttcacacgtgatgtgtccaaaccatcatcgcatgccctcgcgaatcaagaattgtattttgctgctgcctacttgatctccaatccattctcttaattactcttttaaattctcacacactttttt

SEQ ID NO: 36159 - DNA, 186 bp, Glycine max
  Clone ID: PAT_MRT3847_132654C.1
gacatataccaactctctgagttgtggggagtacttgcgttaatcagcgttgttggtgtaggaaaatgaacctgaataaagaatgatgatgaactctgctatgagggccctggcgcttgctgcactgaggtgagttgaagtggggcccatagctgatgctgtggtgacttgctacccaacacaggg

SEQ ID NO: 36160 - DNA, 986 bp, Glycine max
  Clone ID: PAT_MRT3847_132655C.1
gtggggagagagagagagagagctaaaaagggtaaggagagagagttttaatttgtggagcgaaatggatgcggcattgtcgtccatctctccaaagagctcaagcgcatcatcactgccactgctttcatcctccaacaactatcgccctgccgttattctcccaggcttagggaacaactccggtgactaccagagtttgaagcaaacgctgaacgacaagtacggcgtggccaccgtggtggccaaggtgtcgaggcttgattggttccgcaacgctgctggtttgctcgaccgcaattattggcgtggcactctgctacccagacctgtcctcgattggtatttggagagggttcacgatgctgttcaagaggctaaggagggtgctgcaaatggaactgtgtctttgattggacactcggcaggaggatggctcgcgcgtgtctatatggaagaatttggagtgtccaacgatatatccctcttattgacccttggaactcctcatctaccacccccgaaaggcgtgcaaggggttattgatcaaacgcggggtctccttgattatgttgaacaaaattgctccaaacctgtttacacccctcaggctcaagtcaagtatgtatgtatagcaggaaggtatattaaaggagcaaggctttttggcaactccaatccaaatccagatattgagggcgaggctcagctagtatccgatgctgctattctcaccacctatccatctaaatctaatacaacattacgtgctcgctttgtggggcaaggatacaaacaggtttgtggccaagcagatgtatggggcgatggtgttgtaccagaagtatcagctcatcttgagggtgcacttaacattagcttccatggagtttatcactcgccagttggtgcagatgatgcaaccagaccatggtatggttcacctcatgtcttggaccaatgggtacaacaccttcttaattaat

SEQ ID NO: 36161 - DNA, 651 bp, Glycine max
  unsure (1)..(651): unsure at all n locations
  Clone ID: PAT_MRT3847_132656C.1
ggcttgcatgaaaggggatgagaagaaccgaatgattatagaatcaatgtacttcagtcctggaatcagaaacattgtggctgcagaaggagcagaaagaaggagcaggagtgtgaagattgatgtgtggagggccttcttctcacgctttggaatggaggagaaagaattgagcactttgtctttgtaccaagcggaattggtggctaagagatttccttgtggaaatttttgcacatttgaaaggaagggccattgccttcttattgggtggaaagggacaccaattaactctgtttctgtctggaaattcctttgatggaaagtgcaacaaggttttaaaaatcagtccataaccacgattttggtcgtagcgttaaggatctttggctctatgtggccataacctacaatgttatgaatcgagacaaaaccgtgactggaatttaaaatcttaaagttttctttcatgttgttcctaatcaatgtgtgtatcatctcatgtgcagttctcattactagtcaccaaccacagttgttggttaatggtgttcgcctttgtttactactactattaagtacaaaagtcgtttgtgtgatattttgctatgttatattaataaataaaaaaactttagtttccttctnncg

SEQ ID NO: 36162 - DNA, 379 bp, Glycine max
  Clone ID: PAT_MRT3847_132657C.1
gagagagagagagctaaaaagggtaaggagagagagttttaatttgtggagcgaaatggatgcggcattgtcggccatctctccaaagagctcaagcgcatcatcactgccactgctttcatcctccaacaactatcgccctgccgttattctcccagttaatatctctgtctctgtctatgtctctcgatacatttgcaattgcattcattgtctttctctttctgcagggcttagggaacaactccggtgactaccagagtttgaagcaaacgctgaacgacaagtacggcgtggccaccgtggtggccaaggtgtcgaggcttgattggttccgcaacgctgctggtttgctcgaccgcaattattggcgtggcac

SEQ ID NO: 36163 - DNA, 271 bp, Glycine max
  Clone ID: PAT_MRT3847_132658C.1
cgtcatttccaaggccagctatctcatcatcatcaatcgcctctatgagtgcatttgggatcgagcagttcatctagctgactagcttctttgtggtgttctgctaggaggtgtctttttcagatcttcaggtagattgacatgtgtcacatgtatcttgttcttaattcttgtattttcccttttattccttgaggatttcttatcctttttgtacctctcttttctctcttaataaacctttatttataataaaaaatatagtcaaaca

SEQ ID NO: 36164 - DNA, 342 bp, Glycine max
  Clone ID: PAT_MRT3847_132659C.1
gtgcttgtttgtgctttttttttgggatttcatggactaagttataaccatggttggctgcattgagtgcaacagttgctagcgaaaaactagaagctgatgatgtgcctgttaccttggtggggttgcgatcaggagtgctgatgtgcgcaacggattcagagatcaccatgatcgtgatcggacggtactatggagtttacgtgagagtgctagcatgagcaggctggaccttggacgagctcgcttgtgactgtgacgatctgaccagaggaaacgacttgagtctcatataaggggttgcgaggcctgaaaaccccatggatccgcagagcgtgcgtt

SEQ ID NO: 36165 - DNA, 383 bp, Glycine max
  Clone ID: PAT_MRT3847_13265C.1
gggacaaatttagtgtttgaagatgaaatcactgcattacaacctgaagtagataagttgaaaactctaaatgtgaacaaaattattgcactgggacattcgggttttgaaatggataaactcatcgctcagaaagtgaggggtgtggacgtcgtggtgggaggacactccaacacatttctttacacaggcaatccaccttccaaagaaggtgcctgctgggaagtacccattcatagtcacttctgatgatgggcggaaggttcctgtagtccaggcctatgcttttggcaaatacctatgctatctgaagatcgagtttgatgaaagaggaaaacgtcatctcttcccaatggaaatcccattcttctaaacagcaccat

SEQ ID NO: 36166 - DNA, 668 bp, Glycine max
  Clone ID: PAT_MRT3847_132660C.1
gttctgggccggaattcccgggtcgggctctttctgatctctctccccctctctctaacaataaccctcgctgtcgctggttccaattcaccatgaccgtgatgatgcccgctcccattgatcagcaagaggacgaggacgtgctcgtgccggacgcggatttgcctgagaacaatcaccaacccatggaagttgtagctcaacctgaaaatgccaatactgtggagagtcagcccgttgaagatcctccgtcatctagatttacatggagaattgataacttttcaaggctgaatacaaagaagctctattcggaaatatttgttgttggtggctataaatggcgtgtgcttattttcccaaaaggaaacaatgtggactatttgtccatgtatttggatgttgctgattcagccagtttgccctatggttggagtagatatgcacagtttagcttggcagttgttaatcaaatgcataataagtattctgtgagaaaagacacacagcaccagtttaatgcacgtgaaagtgattggggtttcacatccttcatgcctcttggtgaattgtatgatcctagtagagggtatcttgtgcatgatactcttatagtcgaagctgaggttcttggtcgtaggaatggtgattactggacttatgattca

SEQ ID NO: 36167 - DNA, 467 bp, Glycine max
  Clone ID: PAT_MRT3847_132661C.1
ctctctgctctagaattattgatgtctgtttctcacctttgattctggctgttaattgttatcactaggaaattttttggtgtggttggtttctttctttacagtgtgtgtgtgtggttgattctgctttgtttattcctttcttggtggtttggttttctcttgtttgtgtttttcattttgaaatttgaaaagctggacatgtttgtattgtagctgtttattgtatgaatgttttcggtttcaatgtgctttcattttggctttcggttgttactggctctttcttttttggttgagtaattattagggcttttgtttttttgctggttgattctgggttttttgtttggatattttagcttggtttgttctgaatttggccacattttgctctggttcttgtaattgcatgaaatgggtgtcatctctccgaagatcttcccagcatgtgggaacatgtgtgt

SEQ ID NO: 36168 - DNA, 418 bp, Glycine max
  Clone ID: PAT_MRT3847_132662C.1
gttgcaaggtttggagggagaaatgttgaaaatccttatgtaaagatgaaagatttgaagcaaacagggactattgatgactgtatagaagcttttatattcttgtctttctaataggaaattgctagaggaccaatacttggcttattttgtagaacacttgttacaacttaacattaaacagaaactgcagagtggcagagataaagcttggcattcccattggtggaaggaccttagaagactttataatcagtctgatttccacagtatccagtagaatatggtatggaaggttggttgtggggacaaaatcaaattttggcaagattcttgactgagtgaaggctgtaagcatttcaaaaaaaagattcttggcaatatggaaggaagggtagtttattaataatattcaaag

SEQ ID NO: 36169 - DNA, 878 bp, Glycine max
  Clone ID: PAT_MRT3847_132663C.1
atttgttttcccttctcacttttctcattgggaggggaaaaaatccaaaaaaatttcggacagtgaagaatatatcttcttcttcttcttcttcttccaccagtgaacaaatctagggttttagtctcttccttcagcttatttactgtgagttgattcattctcttcctttatttttttctttgatttgtttttttctcgttaaaggaaaaagccactgcgaatgcattgcttgccgtgagagctcatcgcttttgattttcatatcagatatccatgatttgagctgagcttcttcggttagctcacgctcgtgtcttgtagttgttatgttttagggtctgttgtgtttttagggttttatgcgatttcaatgtgaaggttcggttttatccgttccttgttctgtttgattctcagattttgggtactgatatcgcaattgatgctgggtagttgatttggtgtgcttttagatgtatcggttttgtcttggtattttcgagatactttaagtgagggtgtgactgtggagttctgttgatttgatagcctcgtgcgaggaaggaatgactaattcgttagacgattagttaacgtaatgatgtatgaataactcttgaaaatagatttggttgctttggaacaaattttgagtgtgaacttgaagtttctttttctgcttttatttttcagaatgaagaccatgagagagtttgtccgtgcccggcaattgtgtcaccacaggaagatgcagtagatggtcatgttagtcaagactctgacactgcaatggaggtagacataaacaattcatccaactactcaaattcagggagatgtggcaatcagatgcttgctttaagcacaacaaatgt

SEQ ID NO: 36170 - DNA, 251 bp, Glycine max
  unsure (1)..(251): unsure at all n locations
  Clone ID: PAT_MRT3847_132664C.1
aatttttataataatataatatctatccgaaaagtcatataataatataataactatccgaggttgtgatattattttacacttttaatacatcaaccttaaattcttaagttattagtgaacatgtatatcgtatgcatgtgattttgttgggtancgtttgtngcagcaacctaacctanctgggattgcgtgcactgtacataattgaactgtgaccaatgtaaggnatgaatagtgcaatgatgggt

SEQ ID NO: 36171 - DNA, 194 bp, Glycine max
  Clone ID: PAT_MRT3847_132665C.1
tttttatagcatgacaaataatctaaaatatatttcttctttcaccctgtttacccaagtgacacactcccatgaaattagtaaggaggcatctggttcccgactaattttcaattcatatcagtttaacttccaaaacccatacctaaaaaaaagagcttccaaaaccagagtttgatctccttgtgtttgcc

SEQ ID NO: 36172 - DNA, 288 bp, Glycine max
  unsure (1)..(288): unsure at all n locations
  Clone ID: PAT_MRT3847_132666C.1
ttgaacaccgaggnacttgaggcaangttgttccctcaccagaaactgcttcgtgacangacagtggttaaggataagggctctgtngtggatgaagagaaggtgctgagtccggttgacgataatttggttgcggtcgagtttttggctctgattgataaagagaaaganaaggtgaatgctggggaggatgtgaaggaaangggtggaggtgggaatgttaagangaacaatggcattgatgtgctgctcggggcggatgagaagctcgaggatttcatgatgatc

SEQ ID NO: 36173 - DNA, 172 bp, Glycine max
  Clone ID: PAT_MRT3847_132667C.1
cacaaaccttttccgtttttagatatacagaaaaagtcaaccttctcaacttgttaatgggaccaaattgtaataaatttggagggcattacctagcaacacaaattttcttaaaggccttaaccaaaaaaattccattggttttttttataaaaaagttccgcccccaaaa

SEQ ID NO: 36174 - DNA, 152 bp, Glycine max
  Clone ID: PAT_MRT3847_132668C.1
cccacgcgtccggaggaaacaatgagtaacctcatcccatgctgactctaatgcacattattattgcaccacatattgcgctggtaatgaaatatatcaattgaagagtctctacacgaaacaggtgatagaacaataatgacttctacagt

SEQ ID NO: 36175 - DNA, 417 bp, Glycine max
  Clone ID: PAT_MRT3847_132669C.1
aaacaacaaaagcgacaaaatgcttgactgcaaagggcaaaccagcccaaagggtacccagggacccaaagagcttccacaatgaagggacctacacggaaaaaagtgatatcttctaacttagaacaagatagcttactggcattacctacaaagggagagggaagaaaacccccacccgcccccacgggaaatcaaaaactgatggggacagttgccacccactcgacaaaaaaaaaaaggaccatccccctaatccacaaacaaaacaaccgggttaaaagacaacccatggggccctgagtgagagcccgcatagggagacccatggccacgcacacccagacttgaaaggccaaataaaggaggaaaaccttcccagaccctttgcatggacagcagaacaaacccctgcaa

SEQ ID NO: 36176 - DNA, 638 bp, Glycine max
  Clone ID: PAT_MRT3847_13266C.1
aagtatagatcaacttatggatgacttgaaataatctatagataaatcagtatagactagactaatagcaatctaacatattactacatacatgagtatactagataaatagaatcagaatatatttattattaatctacaatatagatagaagggggtatatacgcaagcatagctatgaatgcacatgcacgcatgcgcggaattggaattgagaacaaagaaaaataaaaagaattatccattacaaccatcatggccaccgatgatattgaggaatgagcatttactggtcaaactgctcagaagcaggtaaatgagataaggcgtaaaaccgtgggcaccggcaaaggacacactaacatgcgccgaactgtgaataagtgcttattagagcaatagagatggacatggacgattcaagaaatcgggttcattctgagagcaaagacacatcatgacctgacaaggagaatatacctggagaatactgaagggacactgatgaataagcaagtgacacaaaaaccttagataggaaccaggatactgaggagagtgacagtcaaaaggggaaaagacatggagcaacttggaaagcaccttactaggaaatgggtgatgaagaatggagaaaa

SEQ ID NO: 36177 - DNA, 207 bp, Glycine max
  unsure (1)..(207): unsure at all n locations
  Clone ID: PAT_MRT3847_132670C.1
gggggctcgtgttggcccttcgccttggtgggcctttttnccggccgctgtgttggnngccgcgtgctcggtgtttcttctgngggtcggcgtgggtgtgttgttttctgtgggctgtttgcgttttgtttgtggctgttttggtggcgnnttgcctgcttctgcttcnccttgtgctgccccgtcctgccttgtctgctggggctg

SEQ ID NO: 36178 - DNA, 274 bp, Glycine max
  unsure (1)..(274): unsure at all n locations
  Clone ID: PAT_MRT3847_132671C.1
agcgtcgcagtcgcaaccctaatcagaagaagcgcagttcaagcgagtgacagccaccagccatgggtcgtatgcacagccgcggtaagggtatatcctcttctgctttgccctacaaaaggacacctcctagctggcctcaagantctcttcgcaagatgtccgangaaaatatctgccaagtttgcgaggaaaggtttgaccccgtcctcagatnggtgtcattctcagagattctcanggtattnctcangtcaanaggncntgggagcaa

SEQ ID NO: 36179 - DNA, 1626 bp, Glycine max
  unsure (1)..(1626): unsure at all n locations
  Clone ID: PAT_MRT3847_132672C.1
cctccgcaagaccgtcgacggcactgacagagtcggcttcgctcagttcctcggggtcatgggagtggcgtgcaagattccgatgagggaggcgatgacgctggcggtgctcatgaacactaagggattggtggagctcatcgtcctcaacattgggaaggaaaaaaaggtgttaaacgatgaaatgtttgccattttggttcttatggctctattcaccaccttcattacaaccccaatagtgttgtccatctataaaaacactaatgacatatcctttcatcaaaccctgagaaaactaggtgaccttgacactaatgataaagccactaacgagtttcgcgtcttggcgtgtgtgcatggccccaacaacgctccttccatcattaacttgattgagtcaattcgtagcatccaaaaatcctccatcaaactcttcatcatgcaccttgttgagctcacagaacgctcttcatcaatcatcttggctcagaacactgataataagagtggctctagccatgttgagtggctagagcaactttatagggccttccaagcccatagtcaattgggtcaagtttcagttcagtccaagaccactatctcttcgttgtccactatgcatgatgacatttgccacgtggcagatgagaaaatggtgaccatgatcatcttgcctttccacaagcggtggaagaaggtggaaatggaaaatgaggaggagaacagtgaggtttcccaacaccaaatggaggaaaatattggccatgggtggagaggtgtgaaccaaagtgtacttaggaatgcaccttgcactgtggctgtgcttgttgatcgaggatatggacatgggcctcagaatttgggcctatataccactgtgacccaacatgtttgtgttttgttctttggtgggcccgacgatcgtgaggccttggagttgggggatagaatatctaaccatccagcggttaaagtgactgttgtgaggttcattcacaaagatgtgttggaaggtaacgacatgtcacactcttcaccaagcaaaactaatgggaaaagttacaatttagccatatctaaagtgtaccctccaaaggaaaaggagctagatgatgcaacaatggcaaggttccaaagaaagtggaatggaatggtagagtgttttgagaaggtagctagtaatattatggaagaggtgttagcattagggcgaagtaaggattatgatctcataattgttgggaaaggtcaattttcgttgagtttggtggcagatttggtagataggcagcacgaggaattaggtcctattggagacattttagcatcatcaacgcatgatgtggtttcttcagtgttagtaattcaacaacataatgcgctactgaatggggagacccctttatctatgagaaatgacaatgtaatataaatgtgtaacaagatataagcaatgtactaggcttcgtttgaaattacaccaaattcaaacattatacatcttaaatggtattcgattttttttaaatgaaatattctaaaaaaaaaaaaaaagaaaaaaaaaaaaaaaaaaaaaaaaaaaaaanaaaaaaanaanaaaaaaaaaaaaaaaaaaaaaaa

SEQ ID NO: 36180 - DNA, 390 bp, Glycine max
  Clone ID: PAT_MRT3847_132673C.1
aaaaagaaaaatggcttttggggggaaggggaaaaagttattacataagggccacaggaacccatttaagggcctcacccaattagaaactaactatcaacaacaaataactaaaaccccacaaactattttttaaacgggcccctaaaaatcaaacggacccccacaatggggggaagaaaaaagctggggccttgaaaaaaaaacccacaagcggggggcaatggaaaaaaactagtttttaaaacagggaagtggctcgggaaagggctttttaagctaaggaaaattcggaaaaaaagcggtcttataaaaaaaaaaaaaacaacccccttaacattttaatatccccactctttcaattatagaatcccaggggcccaaaggaaa

SEQ ID NO: 36181 - DNA, 505 bp, Glycine max
  Clone ID: PAT_MRT3847_132674C.1
gtgacctccaagaagaagaagataaaatttaggaaaggctcatttcattcatgaatctgcagtttattacaatatgtatatttatactgaaatcccctaacaaaattgagattctatgctaggaaatatcctaaaccaaaaccagaattggttattgctgccccctgctggacgacaacaatattctgcaaatccttctattgccagctcaatcacgatcatatcacataatccttcaggcttcttgctagttgcttgttgcacccttgcttccctatcattcctcgggccttgcaaaaacaccttgtcctcaaggtgttgggggttcaacacatggtttccaaaagtgataccgggatcccaaagtttattccgacgaattgcacctggtttagcagttgtgcataatgcaaaggcaactgattggagcttgtatgcggccatgacaatcccataaggaggaacaatgttgaggaacctgttgaaagaaatgatggtgcgaacg

SEQ ID NO: 36182 - DNA, 882 bp, Glycine max
  unsure (1)..(882): unsure at all n locations
  Clone ID: PAT_MRT3847_132675C.1
aagcattctgctgcattttcannaatgggaatatcccctgtacgtggaattcttctccatgggcctccaggatgttccaaaactacccttgccaaagctgctgcacatgctgctcaagcatctttcttttccttaagtggtgcagaattgtattcaatgtatgttggagatcgggaagctttgcttcgtaaaacatttcagagagcacgccttgcggcacctagtataatattctttgatgaggctgatgtggtagctgccaaacggggtgacagctctagcaatagtgctacagttggagagagacttttatccactctgctgactgagattgatggcttagaagaagctaaaggaattcttgttttggcagctacaaatcgcccctatgcaattgatgctgcactcatgcgtcctgggcgttttgatctggttctgtatgtaacaccacctgatatggaggctcggcatgagatcctttgttatacatggcaaaaatttaaaaaggagaatgatattgatctcagtgagatagcataagacacagagttaagcacaggtgctgaactggagggattatgcaaggaagctggaattgtagctctaagggaagacatatctgccgccgtgntttgtgacccgccattttcangattgcgaagagttctttaaaaccagcattaaccaagtcagaaattggctcgtactcatctttcatgaagaccttatctcgaactttgcctggccacttttgaancaggtttgaaaccngaccaaagcaaaaaggaccgggtggancctttttctttgggcaaaaatggagttggcagctggttggtacttgctgtgctgtggtggaactgaaactatatcaggattgng

SEQ ID NO: 36183 - DNA, 417 bp, Glycine max
  Clone ID: PAT_MRT3847_132676C.1
ctgaaattgaggagatgtgcaagacccactacgaggaattcatccttgcagttgatgagcttcgtggagtgttagttgatgctgaggagctgaagagtgagctccaaagtgacaattttaagttgcagcaggttggcagcgcccttcttgccaagcttgaagagcttcttgagtcttattctgttaggaagaatatgactgaagctatagaaatgttgaagaactgtatacaggtgttggagctttgtgtcaagtgtaacgatcacatttctgaaggtcagttttattctgcattgaaaactttggatttagttgaggaaagttgcacacagaatattcctgcaaaggctatcaaaatggtcatagagagtagaattcctgttataaaattgcacgttgagaagaaagtatgcagtg

SEQ ID NO: 36184 - DNA, 511 bp, Glycine max
  Clone ID: PAT_MRT3847_132677C.1
gttttaatctcaaaatttaaaaagaaggaaacaggctcgcaaaaagacagaggtacaaatgaggagttttttgcaaggatattttacgttgttcataagattaactcgttctcatgagaaaggtttgctggagggaaatttttactttgaaattaaatcttgctttatattgtaaaaagttccttgtcaattagctcaatacgctagtgttgagacacactcaaataggacataaattgagctggttcacattcttcacaagattgtcctgaaaaggaaaaccaagaaaaacccaaatcagattgctgccccgattgagacaaataacagaatctcaattcggtgaggttcatgttcaaatgcaaacaaacttgtgtatatggtctttcgacgaagtggaaccgcctaaaggccccatcgtttagctcaaaatctttcactctaaatacgactttccaaaaacacatttgggggatccattctgcgtatttagcatgggcatttttttggc

SEQ ID NO: 36185 - DNA, 641 bp, Glycine max
  unsure (1)..(641): unsure at all n locations
  Clone ID: PAT_MRT3847_132678C.1
gaaggccttttataggttttaaaccccannnnnnctatttaacccgggggaaccatattttaataatatataacatgggccaagatatttttcctttacaccctatatggattatgaattaagaaaaatgggaaaccaattccggatttacacccaaaaacatttcttacaggaataataaaaaggacccgaaaagggctatttattttgggtaccaaatgggggtggagggaaaaaagtttaaaagttaaattggggatttttaattccttaaaaagaatttggacacttggtttttcttggcaccgaacacagaggatttattttttttaaaaaaggccaacacggaaaaaatggggatgggaaacaccccagtagcaggctcctcgaccagaatactcaccccctggtactcataccaaagaaatgggtttaacgccaacatgacaaaacgcggggaaaacaagtagcccatgaccaccagggttaaacggttggtaaaaataaaatttataaattgtggaaggttgccttttggaaattttccnnnnnggctcatgggcccaaccacaagggaaaccacgggcaaaccagngaagaacttggggccaaattctgnnngnngggggaannnnnannnt

SEQ ID NO: 36186 - DNA, 410 bp, Glycine max
  Clone ID: PAT_MRT3847_132679C.1
gggtgtttttttttttttttttttttttttttttttttttttttttttttttccaaacaaaagggttttttttttttgcccgctccaaaaattatcgttcctttggggcccccccgcaaaaatcccaaaaaaaacttccggggggaaatcaactttttccctggacctaacaatgttttttggatgaaacattttccccgaccccaattttcttttcagcaccctgattccctttttgttgggggggaaaaaaatttgggcaacaatagtacaatcctgggcagcccccgaaaaaaaaaaacaattctgccgccccccaaccttgttcaaccccccaaccaaaaaccaatttttaattttttttgcttcccaaacagtcctttttaaaaaaattaaactttcccgagggg

SEQ ID NO: 36187 - DNA, 361 bp, Glycine max
  Clone ID: PAT_MRT3847_13267C.1
cccacgcgtccgaaagagcagcttcaactttttgcatacctgtaatcaatgcggggcatttgcattttcagaatggcactgtgacactgattgatctttataccattgaaagagacatacgaaaactggaccgaattaaagttgggcttgggggagaccttgcttatgtgagaacagttctctcacttgcatacttactagccaaatatcaggatgtgaaaatttattttgtttcttcaaacgcggataaaatgaacgatgacataaaatactatctgacatcaaatggagtacagtgggaagaaagtgttgatttgttggaacgtgcttataaatgcgatgtggtttatcaaactcgcat

SEQ ID NO: 36188 - DNA, 867 bp, Glycine max
  Clone ID: PAT_MRT3847_132680C.1
cttaggggccttttttttttttttttttgaaaacgtatttaaaaggattttttttatataaaaaaatagatttttaccccccttttcttttgtaagcatcagtcaaaaaggggggttgtaaaatcttacataatacacagatcatgttcatttctctctttcctttccatgattaggactaaataactataggggatataaatcgtttagaaaaacattcaaggatccatatgtgcacttaattaaaaatttaaaattgaacttaacagacaaaatagttgaaaaacagacctcagttttcttttcattggatcaaatatttaccattttcatagacaaaactttgtattatgaatcaaatagatacataaggtaaaggccaaagggatgcatgccatgacaaaaaggctacaaaggtagtattgaatcttcataaaccttgcagcacaatgatgaatgcaattagaatagtccacacactaaaaccttgaagtattgggaccccaacagctcaagtccatgactttcctcatggactcctccttggtcctcttgaccttattggagacagcagcagaagtagcagaagacaaggttttggcctgagtgtaggatctaatgttgctcttggcatgctgctgcagtgacctcaatgcatggttccacctgcacacccccaattgatccttcaatgcctccactgctccaatgcttgatgccacaatccaagctctgctggctgcactcatgtttaattgttgttataagcttttgatgaatctaaatgaatgaatattggtctgtgtccccttctgtcgtcttctcgcagccggacgcgtgggcggacgcgtgggcggacgcgtggga

SEQ ID NO: 36189 - DNA, 382 bp, Glycine max
  Clone ID: PAT_MRT3847_132681C.1
attatgggttctgggtttttgttttttatagtttcaaccaaggccatacaaacacccccgagaacaacgctgcaaaaaagagcggcccacaaaacggcaaagacaccatcaaagaagggcaagcgctaaaacgctcccgcatcaccacgaggaaacctagaaacgagaccgcaagcacaaccaaagcagagagagcaccaagaacgccagcgcctctacaagcaatgccttaaagccgcaaccgctcaaggacatctcagccaataccgagctgcgaccgcaaggcggatcgcgagaaattgggacccagcataaaagaaccgcagcgagaaaactgcaagatgaagcgaaaagacgacaaaaataccgattcggagaatcc

SEQ ID NO: 36190 - DNA, 720 bp, Glycine max
  unsure (1)..(720): unsure at all n locations
  Clone ID: PAT_MRT3847_132682C.1
ccacgcgtccgcgacatttggtgtggtgaactcataagcctcactttgctactcctgacaagctccgagactatactttttggagttaggagcttggggatcaatatatgttgcacccatatgtggcgatcactcccaactgtcatccatgtggttgtgtaagaccaccaatacctgggaggcttggtgacattgttgggccctgttatgtgttgagtgtgatagtcagttgtatccattgtgattatcaaggatgtcaagtgtagtatttgactgtgtcaagagtgatagtaagtgatgttaagtaatatagtcatttacgtcaagtatgatagttatgcgctctaggacatcaagaatgttgtttgcctagaaaatccatacgctatggctatgtaagttgtatgttttgtgtgttctttgtggcatttgaggagtagaggactcacccctacaaccaacaacttttaagtatcattgtcaaatgagaccatgatgatctcatgcttgcggagattgtaacaccctctaccctcacaaataacgaataaaaggaaataaaatcatgcagatttttttttaaaacatattgactttaaattgatttcaaaagataaagggttcgcattcacttaatgaaaacatagtagaaattattcgaataaaaacaacaaagttatcgtggctcaaaacagggtcgtccatactgaatgaatanta

SEQ ID NO: 36191 - DNA, 116 bp, Glycine max
  Clone ID: PAT_MRT3847_132683C.1
aacggcctaaattcttccaatttgaggcaatcaaatcgttcccaaaatacaaattgcagatgaaaatccaggagtgtaagcggacccctgggcggacccgtgggcggacccgtggg

SEQ ID NO: 36192 - DNA, 486 bp, Glycine max
  Clone ID: PAT_MRT3847_132684C.1
cgccgtcatgaaccatcccggaaacccactaccttggactggcactcccataaagtatggatcttgcatggcaggtgatagagatggaaacccaaatgtgacagcaaacgtcacaaaatatgtttcacttctatctagacggctggccattgacctctatattggcgaagtgcatagcctcattatttgagctcatccatcgaaccagctgcagttgataggcatgtcaagattgccacatgaaattctagaacctaagcatgataatcgccgcgagaattggaatcagtcttgcaataataaaactcacactgtcaacacaacttccaactggagctcatttacccttctattgctgaaaatgagtgaatcttcggcatccccaaagctagacattccagcactctgattgcatgcaattcaatcacaaggaagggggggttcctctaagatcaactacatacaaacttgccaatcaaaatactt

SEQ ID NO: 36193 - DNA, 448 bp, Glycine max
  unsure (1)..(448): unsure at all n locations
  Clone ID: PAT_MRT3847_132685C.1
ataaccnaaccccaaacccttggnaaggttagctccatatgtctaatccatntntggttttacttnttctgtatttcattggtanaaacagncatttatntnagnctacttctgnattctgctttngtatatgaaatnataatanntatngtnnatcttcccanantgnacannctttctgagtccnaatatnttatnttcntatnngtantnatatnacanatntatatgaacnnnntatncttnacttntaatgcgannacngtnattnanantcncncanngattaaatgtaaaaaacctgnccggtatacacattacncttgtttgtcgagtggcanggttanccacnaataantgtattgagttgtcaatttcngacaaaagcntttttttaaggacanaaaaacataaaacccaaattacncgagggggggcccggctccca

SEQ ID NO: 36194 - DNA, 451 bp, Glycine max
  Clone ID: PAT_MRT3847_132686C.1
acaatataaaatctcttgaaattttattaaatatttattgagattaatataggatactcatgatcatgaacaataagacactagtattttgtgtttgtcttctttttcagatgcaacatacaattaacttgataaaacgataccctcctcataactttattgtccctatattatcagttttccatactaattaattaacttcactaaatctagcataacactaagcattggtctcatacaataattatggttccacaaccaatatctcataaatctaagtgatataacgatccgtgggaaagccatgaagaaggccataagataaagccatgagcaagattgcagcctccttctcatcctgagggaaaacttgctggagagcgaagttcttactcaatctcactgtcaaatcctcaaaagcaccaaacctctttctatacctggctccgag

SEQ ID NO: 36195 - DNA, 260 bp, Glycine max
  Clone ID: PAT_MRT3847_132687C.1
gatttgtttgcagatcaacatggagcttctaaaagtgtatttgctgcttcttttccttgtcctggggacaggggggcgcgtggaaccttccttcttcaaaagtgatgaaatcacaacttatcatgaaaatcaatattcacaaccatgttgtgatctctacaggtccttaccctcaatacctcttcaatccatctgtgtatatatcagacaaagctcataccattcagaatttacttcctctatgtttacacgttcacaac

SEQ ID NO: 36196 - DNA, 482 bp, Glycine max
  Clone ID: PAT_MRT3847_132688C.1
cggcttcagaaccagagcccgtagttgaccggtgggcctgaagatttaaactttgcttaagaattgacattttccaaagagtcataatttgcaatgatggcaagagggtttaaaccgtatgccattggccccaatccaaagccctatgcaacgaaatctctaacaggtttggatttttttggaaaggccagggaaaaagattgagccgcgaccagagccttgaaaaaagggttggttttagagccatagtgagccttttgcccagggagaaagaattcaatggtcaataagcttcctttctatgtgcttcgggccacaatattcttgagccacattgcttgcaagcttgacttgaaaaaagatgggcatgcagttaagacaagctgttttaaaatgaacttctcattccttccttaactctttcactggggacacattgtttgacgtgaatacagtgcagaagaaaatgtctaattaccttg

SEQ ID NO: 36197 - DNA, 604 bp, Glycine max
  Clone ID: PAT_MRT3847_132689C.1
ataaacacgaatgttaataatggtccgatttttcttcttctgcttcttcatttccacgttattaatacaaggcaccctcgctataattactccaaatgagtcaatccaaggcaataggaccctagtttcttctgctggaacttttgaagcaggattcttcaactttggaaattcacaaggccaatactttggtatatggtacaagaacatatcaccaaagactattgtgtgggttgccaacaaagatgccccagttaaagactcaacagcatttctcacactaacacatcaaggagatcctgttattcttgatggctcaaggagtactactgtgtggttctccaattcatcaagaattgctgagaaaccaattatgcagcttctagactcgggaaatcttgttgtgaaagatggaaacagcaaaaaagagaattttttgtgggaaagttttgattaccctggtaacacttttcttgcaggaatgaaacttaggacaaacttagtttctggtccttataggtctctcacatcttggaaaaacgcagaagatcccggttctggtgagttttcatatcacatagatgctcatggatttcctcaactg

SEQ ID NO: 36198 - DNA, 344 bp, Glycine max
  Clone ID: PAT_MRT3847_13268C.1
gggggcgggggttttttttttttttttttccccaaccaatttcctttctcttcaattccaaacattttccttttttttaaatcccaaattttactgggggaaaaaccccttcttttttttttaggtggatgttttttgcctaccaggggaacgaatccatttcctaacatggctttttttatccccaaagttgggaacaaatttttgatcaacatgcccaaaggattgaaggcaggccctttttactagaaaggaaaaaattttctttccctccaattttttcctcatgcggggaataaatttaacataattgcttaaatcctccctaattttgaattaacttt

SEQ ID NO: 36199 - DNA, 273 bp, Glycine max
  unsure (1)..(273): unsure at all n locations
  Clone ID: PAT_MRT3847_132690C.1
aaatactatttgggtactccttgcatgacatcatatatgaaagagcagtgaagactgactatggaacatgtattgcattcatataggactactaactttgcgatttttatgattgatcatgtgaattgcggtgagtttctatgatgactagtgtaactataattgcagtgagtatgaatctgcttgactatgaatattaatatatttgcttgggatatactccgcnnaaaaaaaaaataaaaatgattaataattaatattaacattccctat

SEQ ID NO: 36200 - DNA, 935 bp, Glycine max
  unsure (1)..(935): unsure at all n locations
  Clone ID: PAT_MRT3847_132691C.1
taacagtatggccaagacaaataaacantggaaaacaatttctcccacgcgcccaattttgctgttaatctcaatcaccttcctccaatcaacccctttcgaatcaccaactctaagggtcaaatgaacaattcttgtagcagagctgctgctaaagctgtgaagcgaaaccccaaccagagaatgaagttcgttgcttctgataaagacattgtcaaaaatccctccttgggaatgggaaacattgtcgttgaagacacatcttcaacttcatctaaccaaaagattcagtcttgtggcaacacaacctccccaactcagacagaagaaggtatgaagaaaggaactgctaggtctactttgtacgagatctgtgctgtgaactgttggaaacccccaatatttgaatgttgcaaagaggaaggcccaggtcataagagaatgttcaccttcaaggttattatagagatagaagcatcgagaaacataatagagtgctacggtgcccctcatggaaaaaagaaagcagcagcagaccatgcagctgagggagcattattgtacctaaaagtatacaagatgtatgatgaaaaaccaataaataaaaagtagattattggatatcatcagcagccaagatttccacggccaccaaatctatttcattcttcagtgatactctctagacttggttgccaatgctcagaagaccatacattcttaggagagcttcttaaaccattccctgccaaatcttttgtcctcttcctggttaatgtattattgccatcacaaagatattggattgctttgcactgcttttattcctgaagacacaacaagtggagagcataacatcatcttcctctttgctggattgtgtgtttctaatttcatcaactgaagaactgatttcaatttcgcaagcaggagca

SEQ ID NO: 36201 - DNA, 241 bp, Glycine max
  Clone ID: PAT_MRT3847_132692C.1
cggtctccaagatccagtcgagcggcagaatgtgccaaaggccagtccgcgtctttatctgcatccctcaccagcaattctccgatactcggctcttcgtccctttcatcaagtagagagcagcagtctcgtccgaggcgctcgctccatagagctccctctgcactcacgcaagccagcctgcccctccttccgatcacgaagcatgcacaccatactcgcgctcgcagctttcaatctt

SEQ ID NO: 36202 - DNA, 277 bp, Glycine max
  Clone ID: PAT_MRT3847_132693C.1
gtccaaacggcgacaaaacgacaacggaaggggaatactgcacgatagattttttctaactagtccagtcaccctaccaacctacgatcgacaatttcaggagtcacaatttcctcaaatgctcaccccatcgctgtaacccacatccgccatagccctcccacaacttgttcaacaggcagtcaacctacaagcaactcagaaggagtgccaattcccgacactcacaccatgaacaagggtatctccgaacttgttgtctgggccggcgataaag

SEQ ID NO: 36203 - DNA, 456 bp, Glycine max
  Clone ID: PAT_MRT3847_132694C.1
gatataaaaaaacttctaaattgcagtttgatctttattaaggaatttctcttaaaattgtgtctgaaaattagtcttttatactctttcttgctaatagcttatgttttacttgattaattattagtctgcttgtatgcaatctacacagtatatttgcatctttcatatagtcagtttcttgaaaattttggggatgaatagtgtgtattaatctgtcttagttatactgctatgtcataagcgaaaattgttgcttcttggtataggattaggtggtctgtttcttaatttgcttcttttttcttcttcacattaatagattttgtttgttttgatcaatttcttgctggattattaagcaattgtgtctggcttgtggtgtggtcttcttaattatgttatattttgggttttgtttaaagctcctactcgatatatgtgctagtgagccgt

SEQ ID NO: 36204 - DNA, 342 bp, Glycine max
  Clone ID: PAT_MRT3847_132695C.1
agctcggaattcggctcgagcgagaagacgacagaagggggggggggagtataaacagaagtaggcaagagaaaaatataaagagacaaaacaaggaaatataatatctattgattatattcagagatttttctataaaaatattagtcgagctcaatcccagattattaagtttatgtactttgagaacatagaagtgtttttaccatgtgcaaccaaaacagaaatttgcattagataatgtaaaacacaacagttcacaattaaaacaaacaaatcacctttttaattagctaatctttgataataactattggtaaatttacagttctcagacattta

SEQ ID NO: 36205 - DNA, 489 bp, Glycine max
  Clone ID: PAT_MRT3847_132696C.1
ttacagggttgcggagttgtgggatgcatatttattcaatatagctgcagatccagatatggggccaaagagattcatggaactcattgaaagggtaccaccatcttatagacagaatcattaccccctttacaaaacaatcaacagctttctcaagacacattcaggtatttcccaagatgataagggagcagtgtgttagtatctggactgtcaaaggttatcacaagaggcatgcattgaagctgttcaagacgaattgatgcctctacgtctaattgtccaagcactttttgttcaacaactcaatacacacaaagccttcaaggaatgctcagattcatttagatatgcacattgtggagacatgtcaggaagcctatcaagctctaggtatccatattctgcaagtcagaatctaggagagagcccatacactgatggacctgagctcagtagcaggccattgagcttcctgctgcagaaaga

SEQ ID NO: 36206 - DNA, 384 bp, Glycine max
  Clone ID: PAT_MRT3847_132697C.1
aaaccaaggcaaaactggaatttttacagatttgtccaacagggtagggcttcatagggtcctacaaaaaattagatgtaacagtgaacatttaacctatacaaactttaaaaaatcaaaaaatgatctgctgggcaatgttttttagcctgttctgaaaaaaatttactttgcctaaaaaaacatacaaatttcgggtttttaaggaataacgttagtccacttgtagggataggcgtgcttgacattggggcttttaaaagatgatgcttttaaaagctgttgtttccggggaaaatgacacctcaagcaattcgcaggggatcaaaattatattgccaaaactagcattgcttccgggtaatttttggaacaaaagctttg

SEQ ID NO: 36207 - DNA, 477 bp, Glycine max
  Clone ID: PAT_MRT3847_132698C.1
gtcatgaattgcgtgtccttccaaaatgacatcatcgaatggtctcgggaccaccgatgccaccacaaatggacggacactgacgccgacccacacaacatcaaccggggcttcttcttcgcccacatgggctggctgctggtcaaaaagcatccgctggtcaaagagaagggcgcctccctggacatgtccgacctcacctcggatccgttgctgatgttccagagaaagtactacttgcccttggtgggcatcttctgctctttgctgcccactgctatccccgtgtacctttggtctgagtccgtttgggtgtccttttgcacttccgcactgttccgctactgcttgaacttgcacgccacgtggttcatcaactcggccgcgcacacttttggctacaaaccgtacgatgtgacggttatagcgaccgaatcactgctgaccacgctgaccgcctggggaggagggggacac

SEQ ID NO: 36208 - DNA, 200 bp, Glycine max
  Clone ID: PAT_MRT3847_132699C.1
tactttgatttcaatccaatattattcttaacttatttttcttatattaattactctgccatcggtacattttaaaccattcacccactctaccttatcaaacatccaatgcaacttcaataaacccacactcttcatccatcctttacctttcacactcccactccaatgcctcctcctactcccttcataccccatct

SEQ ID NO: 36209 - DNA, 601 bp, Glycine max
  Clone ID: PAT_MRT3847_13269C.1
cgctcccgaacgtccgccgagtcccaaagatctgagagtccccagcaccaccgccaccggaatctgttagttaatcgccgataacgattcaaagccttcgtccctctctattgcgcagctatatcatcatacccacaagcctgcgactttgacgcgaatgagaaggttcacgtggttcacgccgtatcggcgccatttgctttcgttcctgaccttagaatcgctcgtggataaaggagaatcaacattcagcaaagtctcgtcgtctcgccaatcgtttttgctcgctcgagctttggtcaattgtggtttcgtcacgaaaacgcaggagtctctgattccgagagtaccgttaagatatcgttattttcatgccacagcattttcttcgtcagctgaccgagactactatcgaactcttggtgttcctgaaaatgccagtcaggacgagataaagaaggcatttcactcgcttgctaaaaagtaccatccagatgcaaataagaataatccatctgctaagaggaaatttcaagatataagagaagcttacgagacattgagagactctaaaaagagagcagagtatgaccagatgcgt

SEQ ID NO: 36210 - DNA, 512 bp, Glycine max
  Clone ID: PAT_MRT3847_1326C.1
atatgccttaacggataaacatttctgcttatacaatggagagttataagttcaagtcattttcacttgtcagtctcatatgctatcaatagtaaatcataaatgaatgaatgaaacaaaccattttatgccaatgtaagaaaaattgttaagcttccgccaagttgttggctttttactttgttcaggtcattaatacctttacttacgtgtgttcttttgaggcagatcttggtatagcttgagtttggacttatacccaatttagagggaattgaatggaactggtttttcttacattagcgttggtgtatgaggaggttgccaatgtattgctgccttggcattgataatctagctagtaaatagatagctttaacctcgataataatgatagtagtagtactagctcacattctcacaacataaagattctactctgaaacgaggttatgttccataatccattttacatttcaaagtcaagtatgcatatttcaggtggctaaatt

SEQ ID NO: 36211 - DNA, 237 bp, Glycine max
  Clone ID: PAT_MRT3847_132700C.1
aactcaactgaatcttgttgcaaataacaaacaaaattgaaattgtgaagccatttaacgacggattcaaagctggtgtgatgcaaaacatgtgtagtgtactccaaacttttcttctttacatactctaattttcaagccatacatccattcttaacgcttattagagacaccaacagtttttttcctacggccagtagtcttaaggtgccgaccacagacaccaaagccccccat

SEQ ID NO: 36212 - DNA, 182 bp, Glycine max
  unsure (1)..(182): unsure at all n locations
  Clone ID: PAT_MRT3847_132701C.1
gcacgcgggccgattatgttttcaccancatccatcaggggggggggggggggggtctanantatacacgggggggcgggcgggggcttcctctaccaaaggggggggccttngtggcgcangggtgaaaggggtnaatattgaaaaaaaatttntaaaggtcacggggaatatgtgtttat

SEQ ID NO: 36213 - DNA, 561 bp, Glycine max
  Clone ID: PAT_MRT3847_132702C.1
tttcttttctttttttttttttttttttgaggagattaaaatttaaaatttctttgaaaataaatttgttaatattttatacattaagattcgaaaacaactatttaatcgtgcaatttattttgttgtttgaagtgcaattctacacaggttttaaatcaactttattactaaaaaatcgagttacgtatctgtatatggactgaagagtccctattttgatgttttccttaacaatgagatggatcaagtcacagcaggatcatgggatttcgtggaatacacgatccagttataatcttgagccttctttcggagaatacaattttcttttgcatttttttcttctttttcattatcatgacatgacatgacatgcttaagtattcacaagattaaaatcccaacacttgtttaaggaatcatttttaatactattcggactagatttattggtatttgaaatgtattttttaaatttttgtaggaatcgaagatagataattgagttagatccttgatgaaatataagtttagtaacatatatatgttttaaaattt

SEQ ID NO: 36214 - DNA, 1188 bp, Glycine max
  Clone ID: PAT_MRT3847_132703C.1
ttgagaaccctttctttctttcttttaagcacctacgcgaacagtgtcttcttttctctctcttctttgtttgtttctcaacgaaaggcgaaatttcggggatggtgtgtccttgaccttcatagccgcgtgacgttatcattgcctctatccatctctgcttctttctttctttctttctctgctatgctattgctgctaacacccctttggaaccttccctgtttatgatgctttgacttcttcctaaattctgtcccacggattgattctctttctctctctctgggttctctggcatcaaagttcgtaccttttgtggtttggatggatctgatgccagtttggttttctggggtgtctgtgttccttaacccactttcctcctttttagaggatactcgtctaattgaattttttttccttttttgctcaagttattttctgattttggttcttcagtttgcttatgctgttttggtggctttggaagtttgaactagggggattcttagatccttttgcacttttcccttgctgaaatttttcagacatatcaaatatttgcgttaatttttttccatatgagcatagctcttgaaatagagaaagtctctttagcttatttttttttatgttttgtttgttaaggaaacttgtgaggggttggatcagatgtcatgtgtagttctgtgacatgagattttgtatttaagacatctatagatcagtgttttatcatatacgcagtgtctatagtttcatttgttttataggtttctttgggttttctgtctgtgctgggaaattcaaggttttgtttagttccatctgttggtagtttaaatggttttgggactcttatagggagttttgaagtgtgaagtttttgatataagaagatatgttctaggttcactttggctctctcaagttgttgatcaaatggcttattcagccgaaccctcatcatctttgagctttacctcatcttcccatctatctaatgggtcggttagtcacaacatatgcccttcttatggctctgatcctggacctaacttagaggctatcagtttgagtaagcttagctccaatttggagcagcttttgattgaacctgattgcgattatagtgatgctgaccttgttgtcgaagataccgtggcggtggccgaggaggagggt

SEQ ID NO: 36215 - DNA, 1103 bp, Glycine max
  unsure (1)..(1103): unsure at all n locations
  Clone ID: PAT_MRT3847_132704C.1
cacgttcctcctgtgcatcctctcgaaatcttccttcctttgcatcccttgaatcatgaatgattttgatctggtccttgaagaattgttcttgcatatacatctnctttttggtctcttcatgttgcattttagttctcctccctcacaatgcgattttcctccattgtcttccgcagcttctcagacattataccaatagattcttcaagagcttttgtgtgttttgcacctttcacagccttgttcttaaaatagagcagctgttggttgtcttcattcatttgccgaatttggtgtacaaccattctcctgatatgatcttatgtcatatttgagtctagatttaccttgggaatgtctgttgaaaaagtccatatcttcttttgtagccatgtatccatagagctggcgattccccccagggagcccacgcgtccgccttttttcccaatggctagtaaaatttcatccattcacgaaatgcttatcagccaattatgtgtggtggtgagccaagggctgggcttagaaaatatcgaggcaaagctgatgccccaatatattccattcagatatgcattcctaagcatgctttgaacttgatcttttcatttacaaatggagtagactgggatggtccatatagactacaatttcaagttcccaaggcattacagaacaagccaattgacttctttaataagggcttggcggaggaactgagtaaagaaggagcatgcgagcaagcaatatttccagacacaaataaagttataaccaaatgtgctatgattggtaatttgtcaaaagaagggggtgatcgctgcgatctgaattttgttgtaggatgcacagatcctagttcgcacctgtacaacccgctagccaatgtagatgatggaacatgtacaattgaattggattgagtctgaagaatagcattatactttgcataaatattcatttcgatcatactttatgttggttttaagtacacagtgtatattgtaaattccactctcaacattggacatangcaattgctggtcttgtaccttatttctctccttaatctgttactatagaaacaaagttttctc

SEQ ID NO: 36216 - DNA, 1060 bp, Glycine max
  Clone ID: PAT_MRT3847_132705C.1
agggaagtgtcggaaaatttgcgtgtcacgtcgcgattttggttctacttttatcaattgtctcccgaagcattacctgggccataattttaattcacgatgattgctctcttcctatatttaaattgataggatcgtgacggagagaaaatccgagttttgccgtgttacggtaaaaaaagaaacacttttgcgaaggtgctttctggctgagagggccatgtttcgtaccactcatccaaacaagtcacagtgttctctctctctctctctctctgaaaaacattccccgtataagctctctccgaatgtcacaatgtcttagcgacgcctcgctctgctttcttcctccacgcgtctgtcactgttatcattccctgctctcatttcggtccctgacaatgagatcaaacttctagtagtgttctactactaactatttttctttcaaaaaagaaaaaagagagggacattattattattattactatataaatatatatttgttctctgttggtgagatcagaagcgaaaatggcaccaccgttgttcaattggggggtgaaggacactcacaggggaacccctgtggtggtgaaaatggagaacccaaattggtcgatggtggaacttgagggtcccgaagaagaagacttaatgcttacaaattctccttcttcgggcgtttcaagagacaaaggaaggggcaaaaacgccaaacagctcacgtgggttctgctccttaaagcgcaccgcgccgcgggttgcttgacctccatcgcgccggcattgttgggcttcgtcgccgccgtgaagcgccgcgtcgctgccggaaaaaccgacgccgacaccgacaccgacggcggcagggagaacgagaaccccgccgtgaagacgcggttctattcctgcatcaagctcttcctctgcctctccgtgttcctcttggttttcgaaatcgtcgcgtacttcaaagggtggtacttcagcgcggcgaggtttcagttggagcattttatgtggacaccgtcgtttggagtaaagggtttcttcgattggc

SEQ ID NO: 36217 - DNA, 730 bp, Glycine max
  Clone ID: PAT_MRT3847_132706C.1
gaaagacgtgttgagctgttaccctgtccatttggaatcctatgttctcaatcttatttttttttttcattttgaaattgaaatttccattttccaacatctctcgctccctccgttgttgttattagttgggttttttaagacaccgttcgttgcgattgtacctgagagggccctgtttcgtaccactcattcaaacaagtcacagtgttctcgctctttctttctctgaaaaacattccccgtataagctttctccgaatgtcacaatgtcttagcgacgcctcgctctgctttcttcctccacgcatctgtcaccgttatcattcctcgctctcatttcggtcctgacaatgagatcaaactcgtagtagtgttttactaccagtcttttttctcctcctttagctttcgaaaaaaaaaaaaagaaaaagaaaaacagagagggacattttattattatataaataatactacatctttgttgtgttggtgagatcaaaagcgaaaatggcaccaccgttgttcaattggggggtgaaggacactcacaggggaacccctgtggtggtgaagatggagaacccaaattggtcgatggtggaactcgagggtcccgaagaagaagacttaatgctaacaaattcaccttcttcgggcgtttcaagagacaaagggaggggcaaaaatgccaaacagctcacgtgggttctcctgctcaaagcgcacc

SEQ ID NO: 36218 - DNA, 225 bp, Glycine max
  Clone ID: PAT_MRT3847_132707C.1
ctcgagccgatttggttccggtcgaagaggttgcccgtggattcatatgggtctaactactgttcatctatatttatctgcaattcttaacattgtgaatggtcagaagtgtaaacaaataatttgaaataaaaatagaaaataaagatattttattaaaatcaacatgaatgaaaaaatatttaaattgaacacaaatatatatactaggctatctactactaa

SEQ ID NO: 36219 - DNA, 569 bp, Glycine max
  Clone ID: PAT_MRT3847_132708C.1
cggacgcgtgggtaaatccctaaacaaatttttggtctctattattaattatattacccctaattgatgatatgataattacattgacaaacacaagaactcacacatcatttacttatgtctataatttttgtaatttatatttttagttccttattttttcacgacttaatagtttataaatatataagaaactaaaaatattatatatatatatatatatatatatatatatataattgcacaaatttttcatatatgactagttgatatggtgacaaatgttaactcgttatcaagtgcatcaaatttatcataagtagtaaagtatttgaaagtttgagtgttgaatccacacaaaatttgtttggatttagattgatacaaacccaaattaaaagcaatagataagaaatttaaaataaaagatgcagaaagataaaagataaaataaaaatttaaaagaaaagataagatataaaagataaaatatttaaattaaaagatgataaaaaaagataagataagaaaagtaaaagataagaaaaataaaaaatgaagatgaagat

SEQ ID NO: 36220 - DNA, 163 bp, Glycine max
  Clone ID: PAT_MRT3847_132709C.1
caatgatttgggtcgaactggatacagaggacaagtgactcaggctagagtgaagtttttggatgatcagaactgtcacatcatgaggaatgtgaaatgacctgtgagagatggagacattctaaccctactcgagtctgaatgggaagatagaagattgcgc

SEQ ID NO: 36221 - DNA, 304 bp, Glycine max
  Clone ID: PAT_MRT3847_13270C.1
aaactctccaattggcatttatggagcgccaaattttttagggtatggaataccaaaaaaggcctgcgctgtgttttggcccaaaaatgggcggggccctcccaaacaattttccatttaagccttttagggggaaaggggaaccctctgtggggggttatattaagggcctccttaacctcaccacctttgaccacccttctttaatattaccggccttaaaaggcaatagggcctccaattctttcccttgggttcaataaaagggggggcctttaaaaggcaggaaagcttttccccccct

SEQ ID NO: 36222 - DNA, 342 bp, Glycine max
  Clone ID: PAT_MRT3847_132710C.1
ggctcgagcgctgtgataagtgacgcggacgcttttagcttttcatattagcatcccgcaaattggggcagagattggctcactgaaatcatgatttgaaagatggctggggtctggcaactgatgggacattgttgctaggtagcgaaggccacacaacattgaatacaattagccctctatgccatcatgttagtgtttccacagatataggcactgtgctggggagttgaatctattcccttggaaatgggcatacataaaaggggaagtcggggcaaatagctttatgactgactgctttgtaagaatctctccccttgatggccatgttttaggatg

SEQ ID NO: 36223 - DNA, 109 bp, Glycine max
  Clone ID: PAT_MRT3847_132711C.1
gacacaactgaacgggatcagctatctatagcagccaggagggtgagcagtaccttgttcgccctctttgcgaggtgtgtgccctcagctcgtagcgtaccttcagcca

SEQ ID NO: 36224 - DNA, 1019 bp, Glycine max
  Clone ID: PAT_MRT3847_132712C.1
atcccgtggtggtgctagggaagaagcagtaagcactgagcttgaagtaatagatggacagcagtcgcaatttcttgcttagttctcatgtggcgccatccccacccgtcaaagtcaaagcacaggaaattcgggtatgcaccaaccgcacctgccgcagacagggctcatttcaaaccctagaaactctatctggcctcgctcctccaaacgtcgccgtgaagtcctgcgggtgcttggggcggtgcggtggcggtcccaatctggtggtcctgcctgatggcctcatcgttggccattgcgggacggctgctcgggcggcggaggtcatagcgactctgtttgccggagctggaggccatgacccaaagacttgtttagatgcgcttgctttgaggaagagagcggagattgagtttgccaagcgaaacttcactgaggctgagcttctactctcacaggctatagatttaaaaccatttggtggcatacatatcacttttaaatgcaggtcatttgtaaggctggaattgggcaactactctggtgccctcgaagatgctgaagaggctttggcattggctcccggttattctgaggcttatatctgccaaggtgatgcctttttggcattgaacaaatttgatttggcagagcagtcatattcagcatccttagttatagatccttcgattcgtcattctaaatcattcaaggctcggatagcaaaacttcaggaaaaacttgctgctgtcaagacactgtgagatctagatagtaaatgaaggtccagttaattcagatacagtgatgtcagaaggaataaaatttttatcaactgtttccgggcattaaaatgccatttgcgttgtatttcaattttctggtctcaaatatcaattgactatttttattaaatgaaggtccagttaattcagatacagtgatgtcagaaggaataaaatttttatcagctgtttccgggcattaaaatgccatttgcgttgtagttcaatttt

SEQ ID NO: 36225 - DNA, 196 bp, Glycine max
  Clone ID: PAT_MRT3847_132713C.1
gtttctctttgttaatttagtatgtctctatcactgaatattatatccatgatcaacagcagcaactcagtcataaatagaagaaggccctactgttgatcatggatataatatttagtgtttctctttgttaatttagtatgtctctatcactgaaaatcttaattgaggataattcaatctgatggcttgattc

SEQ ID NO: 36226 - DNA, 306 bp, Glycine max
  Clone ID: PAT_MRT3847_132714C.1
tctccgagagggcagcttgcgagctcaaggctccaaggctgtaacacgtacttggtgcaatctattcataccgtaatgccgcgactaacttccgctctagaccagggtattacttgcgacgcggaagttgataaggtctgaaaagatcccaatctccgctgaaggtttataaatcaccatgtagatacatgataaaacattggattctcgcacttactccatgacaatggataaacagattctagtcactgctctgacagaacagattgcttctgtaactggagcgttgtctgaacgacaactctt

SEQ ID NO: 36227 - DNA, 145 bp, Glycine max
  Clone ID: PAT_MRT3847_132715C.1
ggaatcggtcagacgtggagagcgaagaggggaacctgagttgtgtctcaacttgctcttcttcttcctctcagtcaccctccaaatttactcactctctctgtatactcacctagtcagtttaaaggcgtcagatcacgatcga

SEQ ID NO: 36228 - DNA, 762 bp, Glycine max
  Clone ID: PAT_MRT3847_132716C.1
attgacgttttttatgtgtatccctatgttaaactacttagatccaagagtaactagtatagagtaaacatggaactacacttcatttgtgacaagattcgaatatcataattaagtctaatatacaagttcttacatgtgacagctttctggtctagttgtgggtttgatcttttgtaggttccgtagacatatgttgtatgccttccttggctttggaggatggtgtggtgattagaagggaaccttgttaatgggtttctatggtatccagaggggatattctaaatgttgtgatcatggcactattgtagggacttcaactttgctagaagctgggatataggaaggtgtagtgtttttctaactccgtcacacctgtggagcttgtgaacaaggaagtttcagtgcaacaccaatatagcaatgtgctagtcttgataaggaggttattgtatgtgcactgtgatgcatacctttcaagaaaccaacacttgtgcgaacatgcccgcgaaattgggaggtgagagtcagggtcaaatggagcctttagccatgatgagattgtgtttgcttgctaatgcgttattaggggtccagttaatgggtggctaatttagtttttctgtttgttttgctttctttttctcgtatgtaataaaaaaaattatgatggttgtaaccaatatcattttcatgatttgaaaattgacatggataacataatgatattctaaatcaaattatatatgttataatctt

SEQ ID NO: 36229 - DNA, 115 bp, Glycine max
  Clone ID: PAT_MRT3847_132717C.1
aatgggctcgagtagcgacaagtaccgttagttcgcagttgacttatgtgcaatacgtgatttgaaagagacgacggatgcgctcagggaggtgctgaatggggaagtttggtta

SEQ ID NO: 36230 - DNA, 428 bp, Glycine max
  Clone ID: PAT_MRT3847_132718C.1
cgataagacgacagaaggggtggtttttgaatttttttttggattgtttttttccaagttgctgcatcgcgcttgcaaatggaggtttggttcctgtcagtgaagctctgaaggatattggtatgaatggaaagttatacctagtgctgagacagaagctttgagggttctttgatgcaggaacaggttgtcgttccatttctttaaatttgctatgaaatttttgtttttgagattttcatttctgtcggggggctggagtttggaggtatggatctatatttttctatcttaactttttcaaattactactatgtaattattatcaagtctatttttgttatgtgtagtctgataacaattaccataagcaattactgattgtattccttatgatattgtgtatatgtaaatttgattgggcccct

SEQ ID NO: 36231 - DNA, 189 bp, Glycine max
  Clone ID: PAT_MRT3847_132719C.1
ggggagcacatatctgggcccctctgcagccttcgggtcggccaaggcggggatctgggtgcgcgctgcctctagatgagagaggggggcggggagctgggaccgggggggtgaacccgactcggctttaaggaagaaaatgttagaaatttttttttttttttgggggcagggacgacaggaagaaaa

SEQ ID NO: 36232 - DNA, 487 bp, Glycine max
  Clone ID: PAT_MRT3847_13271C.1
cctttcgcgttcgttttgataaaccgcgatcacaggttgccgtaccttaaaaccggaaacaaaagcaatcgttacttgatttcaagaatctatcaatttcttgctacttctttgtgttcgatttcttaagggacagaatatcactctctgagctggccacagagtcggtgaatcattttctttctccactcttagttgatttgctgaacactctcctatttgatataggacttcgtgtcagatttaaacttcttgtgtctctttctcagttctctgtttaattacaagttcacgctggtgaaatgttggattaatactcccactctcctatctggaataggatttcgcgggtagacttttatatttgtttcctttctttcactctctgcttgacactgatccgcatagacgtgcaaagtggtcttattctgaaaacacttgtgcgttggtgcatatgattgcttagttgattttctttggagacaac

SEQ ID NO: 36233 - DNA, 195 bp, Glycine max
  unsure (1)..(195): unsure at all n locations
  Clone ID: PAT_MRT3847_132720C.1
nnntagngtanattagctgggaattcggctagagnngntcaagctcgagagnantcgggctnnagggtagaggaaccttgaanaggtggaggnannaaatctnattnaggctcttnaacncntcaatnantnccaggaggnanctcagaaannacntgtaaggcttcnattgcaggntgtctcancagnttggtg

SEQ ID NO: 36234 - DNA, 506 bp, Glycine max
  Clone ID: PAT_MRT3847_132721C.1
gtgttcaagtttctatcggtctcgccgattgtcaggataaaatccaaatggcactgcaaaatgggaaagaaaatgtaattaaaatggaagagaaattgacaaatgcggagaaggaaattgtcaaactcaaggaaaatgcgccacacaaaaagttgggagttgtccaggatttggtggaccgtttggccatcctcgacgaaatggaacagtgtctgaacacgttgtggctgatgccgaccgacagcaaaacggagttcgacccgctggcgaccacgcggacaattctgaggctgacggagctgtgcgccgcgttggaatcggagtcgtccaattatttggagtcgatcaacgagcgaattttgccacttctgttcgcggaaattgaaacgcggaagggcgaactgtgccagcaactgtccgacttttacgcatcgttcttccgattcactgaggacgaccgcgtttcaccaccactctattcgatgagcatcaattgtcccagcatc

SEQ ID NO: 36235 - DNA, 550 bp, Glycine max
  unsure (1)..(550): unsure at all n locations
  Clone ID: PAT_MRT3847_132722C.1
tantccactccaactccatcatggtattggttgtggaagcagcttggacaaagcatctaaatcttctgttgtaacctctccaaggttgacagggattacagtggacaagtcantggagttcccatatgaggagctanacaaggctactgatggctttagtgcagctaatataattggtcaaggtggctttggatctgtttactatgctaanctccaaaatgagaaagctacaattaaaaagatggatatacaagcatcaaatgaattccttacagaattaaatgttcttacacacatccatcacttaaacttaataaggttaataggatattatattaaagactccttatttttaatttataagtacattaagaacaacaatttaagtcaacatttacgaagctcaagaaaggatccattaacataaacagctcaagttcaaattacccttaatacancaaaaaaattatgatacatgcataagcacactattcctatctacatgcatanagatattaaatcagcgaacattttaatagacaaaaacttt

SEQ ID NO: 36236 - DNA, 321 bp, Glycine max
  unsure (1)..(321): unsure at all n locations
  Clone ID: PAT_MRT3847_132723C.1
cgcaaacacaatgaattattgtgactaaccccagatttgttctgtgctgacctcattttgcactctaaaccatggcttcaaagctcacannttttgctgtctttatggctgatatgctggatctaacacttagcctaactgtttgacaaagaagaaacaccactagtggcgtgtcttgcaagagaccagaatgttattatctgggtgtataactctgatataacagctggctattgcgtgggcgcatatttgtttctgtctgtaagacaagacctgataatgattgaatgtagatgctgaaggtgccgtcagccttttaac

SEQ ID NO: 36237 - DNA, 180 bp, Glycine max
  Clone ID: PAT_MRT3847_132724C.1
gtttttaattctaagacttttactactatcttcactattgttgtattacagcttcttctgcgaaggttctttagttcaacggatatcccaaaatcccaataacaataacttcaagacaaatataacctaaacttacaacctaataatccctatacaaacacacataatccattattcttt

SEQ ID NO: 36238 - DNA, 318 bp, Glycine max
  unsure (1)..(318): unsure at all n locations
  Clone ID: PAT_MRT3847_132725C.1
cacttccccactctctcacatattgcctctctctgaccnnnnnccattgttcatggcgtccctcatggaatacggctgccagtactggatcacacattgcactaactctcaactggcatgctcaggaagtttctctatacatgaaggcattccgtgctcgtctgcacttccctccatctggcaaaagagggcacccctgatgagcaagtacaaatatccaccccaaaaataacacccctgccagtgaggagaaaattatctttcgtcaggagctttaccaatttggtgcctacctacctgtaaaaaactccctcatat

SEQ ID NO: 36239 - DNA, 223 bp, Glycine max
  Clone ID: PAT_MRT3847_132726C.1
cgccaatcaggctcacatcagcaacaacaccaactacaattgtgatgctaatgtcgagaagaagtcacttgtactacatgtccttggtattgaaaacaaggaagtcaacgctagaatgctcttcaatgttttcagcaacttcggcaatgtcgtcaagctgatcttcatcaagactagagcagtcgctttggttgagttcgataacatcgtaagctcaattaat

SEQ ID NO: 36240 - DNA, 267 bp, Glycine max
  unsure (1)..(267): unsure at all n locations
  Clone ID: PAT_MRT3847_132727C.1
tctccctcatcatctaaccctgctttaactttagcataaggatcagggtcaaacggtggccatatgagtggggggaaaaaaaaattgtggagagaaatacagaatcttatactatcgcaattgctgctgctattttcaacgtggaaaaggattttggttaaaaataaaataaaagattaatgtgaaaaaaaaaaaaaaaaaaaaaaaaaaaaaaaaaaaaaaaaaaaaagaaaaaaaaaaaaaaaaaaaaaaaaaanggggggnngg

SEQ ID NO: 36241 - DNA, 304 bp, Glycine max
  Clone ID: PAT_MRT3847_132728C.1
aaacaaagaggggtgactgtttaaatttttaaagcaagcctccccaattcatttaaaaggaaaagggtggtttaaataaaaccggaataatttggcttttggtttttttttaacaaaaaaaaagaaggttagtcccttttccctttaataaaaaggaaaggggttttgggccccttgggtttgccctttttttttttaccagaaactaaaaactttttacattgtttttgtttttcaaaaaagcttttgtaattatttttggaaaaaaggggttttccctaacaatttcatattttttaaaaag

SEQ ID NO: 36242 - DNA, 440 bp, Glycine max
  unsure (1)..(440): unsure at all n locations
  Clone ID: PAT_MRT3847_132729C.1
gacgtgtgaatttcattaggcgtggagaatttcgcagaaagcgttacatnacagatatttagaaattcttatatatcgaattggagtgngngtccagattgatggcgagtaggcttgtttaaatgcacttggaggctcgtaagtggttaggtatagtatttgttgattaatcttaaggaattgggaatggacaaatgcatttcgnnngttggcgggtccccggttttcctttttgannaatatagttngcttcaaagtcgtnngttaagaacctttttgctgcnnaagttgtgaatacaaattattnngggttattaaatgtttgacttggtaaaacgtgcttactgcannngcttggaaattgtgttattgaaggaagaaatcccttgaaaagaattgattgggcttttagcanngaatcaaaatttaacgtttttgtt

SEQ ID NO: 36243 - DNA, 356 bp, Glycine max
  Clone ID: PAT_MRT3847_13272C.1
accacaccaagggaaagaaaacttttttttaaaaacagatggctaacgcaatggggagggcaatacctattacaactgacaatacccccccatgctggataactcttaaattcactgggcctaaattcataagggtataccatacctcaaaaaccaacaactacataacatccattgctagtaacgggggaagagtgcaaggcatacaggtctgttctccagttgctacgaagaaggcctagacttttacatacctctcataactggttgatgcacaactgggaaagcaagttacttacaccactaggaacacatcgataactacattgcaatctgcattggaacacggtacttta

SEQ ID NO: 36244 - DNA, 1103 bp, Glycine max
  unsure (1)..(1103): unsure at all n locations
  Clone ID: PAT_MRT3847_132730C.1
ccggtccggattcccgggtcgacccacgcgtccggagaaagaaagaaagaaccaaaagcatctatttctctctctctctcgccttttctcacacactcgcactttctctctctaaaaaccaccattttcgaggtcgcgttttctctggctctatatgtatggtgtgtaatccgtgtttcgttgtagtgtgcgcgtgcgatttggaatctggtggtgcgagcatttgaatgtaagagaggattttttgattctttttggattcgcggtggttagatcggcgatggcggaggttcccggcgacggcggcgcgacgctgtcggtgtcgggatcgttcaaggaggggagaggctcggcgaggcgacgcggcggcggaggaggagtgagaccgccgagcatggacgccgacgagttcatgaatttgttgcacggttcggatccggtgaaagtggagctcaatcgcctcgagaatgaagttcgagataaggacagagaattatcggaagcgcaggctgagatcaaagccttgaggctctctgaacggctcagagaaaaggccgttgaagagctgacggaagaactgtcaaaggttgatgggaagctaaaactaaccgaatctcttctagaaagcaagaatcttgaaattaaaaaaatcaacgatgaaaagaaagcatcaatggcagctcagtttgcagctgaagccactcttagaagggtccatgctgcccagaaagatgatgacatgcctccaatagaagcaattcttgcacctttggaagctgaactcaagcttgctcggcactcgagcgctaaacttcaagatgataacaaagctttagaccgtctcaccaaatctaaagaagcagcacttattgaagctgagaagactgtacagattgccttggctaaggcaaccttcagtctatgcattttgtccaaaattttattttncttcctggcaaatctcaatgtgggtaattagctcttgatttttattttggagatcatccaccctttgataggagtgtgctgttccaagttccatagcaccgatgggaatcgatcttaaggctgggggtcagagcaaaaagacctcatgaacagct

SEQ ID NO: 36245 - DNA, 265 bp, Glycine max
  Clone ID: PAT_MRT3847_132731C.1
aaactatgaaataaaacccaagggcaatcactccattatcgtcctaaaacgggttaaaataccccctcgagagaagcataaagtaaattgggggtcataaaattttccccccaaatattggatcaatttgttttttttaaaggggccttttgtccaggtcataaaagattacatgttccattgtttttttggaaaaaattcttttgggagggtctttttttaacatttgggatagcaaatccagtccaagctttttttaactttg

SEQ ID NO: 36246 - DNA, 497 bp, Glycine max
  unsure (1)..(497): unsure at all n locations
  Clone ID: PAT_MRT3847_132732C.1
ccctcgctttcgcggacgcgtgggcttcttcatcctccacctagagtaccctcttttctcttctcttttcttcttcttcccctttccatttgtcagttttgttctcacctctctttgttttttttttcctcctcaagtgtgaaaaggggaataataaataaatccaataaaaaaaaagaaaaaaagcatccacaacaaaacatgggatggggtgctttctttgcttattctctcagttagtcatcctttgatattttttctgatagatcggtgttgtttcgttttgttcctatctgctaagctgagtgagcgtgttccttgctgctttattgaggaactcctttcgtatatttaatttgagttcggaaacttttacatatctccaatgcaagggcagagaggtacaattggttccttgccagaaaccatataatttgattgggatctacatcnagggctgctacagttggaccacatatattctggaataatatgcg

SEQ ID NO: 36247 - DNA, 213 bp, Glycine max
  Clone ID: PAT_MRT3847_132733C.1
ggctccaggcaagcaagatgtgggaatgcacttacgcgaggtagaatggtccatggagatctgaatgcacagagctgggggttcctgcagcccgagggcgccatttttactagggatgaggaggtgccaacttatgcacaccctggtggttgctaccggaccgggacctgccaacacggcggctacctagattgcggtgcttggggaggaacg

SEQ ID NO: 36248 - DNA, 441 bp, Glycine max
  Clone ID: PAT_MRT3847_132734C.1
taactcgaactggaacttccctctcctccaccctggttccagagaaacccaaaacccaaaaccgatttatctttgaaccgcaccatcaatacaaaaatagaaagaaagaaagttttcaaaacgcaaaaaatagccaagaaaccaaaacaagaaaagaaaatgccatttttttccttctagcacccaacaacaacagcaccccttttgtttccttccaccaagaaccgattttgccaccgacccattcctccaaatgcttctcctccgtcaaagcgccgtcgtttcctccctcattctctgcttcttcttcccaccattgctctgcctcggaatccgctctttcccaaccaccgcagacgacggcgcgttcttccactacaccgaggcgccggagtatcgaaacggggcgggttgccccgtttcgtcaacccgaaattttct

SEQ ID NO: 36249 - DNA, 255 bp, Glycine max
  Clone ID: PAT_MRT3847_132735C.1
gccatgccttcattccttcaattcgttttgccgtcaaaagcttcaaaggttgttaatcaggttgcaaaggttccaacggtctccaactgcttaaacctttgggaggcctctggcttttccactgtgcccggttaaggtatggtacatacaaaagggctctaccttgagaggcctactatttcaccacacgaggcagacgcgccccttcttatggagagttacaaagtttacactgatgaattcgtggccctatac

SEQ ID NO: 36250 - DNA, 1622 bp, Glycine max
  Clone ID: PAT_MRT3847_132736C.1
acttgccataccatcttacttttactttgttttcacaacatagccatggccatctccagcaacgcttctccttttgattccatcatcttcggtgagtacttcatcctctctctttctctcctcaatttctaattcccccctctgaattaaacagatttggacgacaccttgtacccctccagcaccggaattgacaagtgcgtcaagaaaaacatccaactctttctcatccagaaatgcggattctcagaatccaaagccttgacccaacgagttgagctcttcaaaacctacggaagcacccttgccggcttaagagtcagtaataataacaccactacacaattccgatcactaatttctaacacaccaatatccccatctcaactctgtttccttcttcgttactttgcaggcactaggccatgatatcaccgcagaggagtaccatggtttcgtgcacggaaggctaccttacgactccatcaaccctgatcattacttacggaaccttgtttgcaccatcaaacagagaaaaatttgttttactaattcggacaggattcacgcgatgagggcgctggataggcttggggtcaaggactgtttcgagcaaatcatatgcttcgagactataaacccggaaccttccgtattcaacccgacccgacgaatttccccatcctccttaaaccttcgcctctccgcctccaagatcgcgcttgacgctgccaacgtggatcctcgtcgtacgttgtttctggatgacagcgttcgcaatattgccgcgggaaaagaaatgggtctccacactgttctggttgggaagacaatgaaaagcaaaggagctgactatgctgtggagagtgtgcataacttggcacaagtgatcccagagatatgggcaaacgaaatggacggtggtgatccaacgatgacacgttcgaagagtgaattggaggccgtactcgcttgtgctctggttggagcttgaaaattgacgttgtacaaaaatgtacattcccaaccaacccaactatctatgcaattaaaaataatagtacagtagtataaatagtatcagaccaccaatagcgaagacaataacagtaagtaacgtggaccccctaagcaattatttgcgacatgtgaatattgtaagatattaagtattatcaatcgtctttcaaataaaatcaatgtgtctctcagggatatcaattgcttaattaataaagttgagttattgtaaattcaaatattctctcagagaaaagtaaagcggaagaagtaatcacttgtgctttggttggagcttgaaaattgacgttgtacaaaaatgtacattcccaaccaacccaactatctatgcaattaaaaataatagtacagtagtataaatagtatcagaccaccaatagcgaagacaataacagtaagtaacgtgggccccctaagcaattatttgcgacatcatgttaatcatgtcaatattgtaagatatttagtagtattatttgtacgtattatcaatcgtcttacaaataaaatcaaattgtctctcagagatatcaattgcttaacaattaataaagttgagttactgtcattatttaaaaaaa

SEQ ID NO: 36251 - DNA, 244 bp, Glycine max
  Clone ID: PAT_MRT3847_132737C.1
cccaaatgccacgaacaaacacaactccctagaagtgatacaacataccaagaattgttttttggctattttggtttccaataatattggctgctactcctactccattttgtttaggctacgcggggtgtgtcaaagttgaaaaaatcaattgtaatagagcaaggaccacgctgccaaagatagaaaatcaggatttggccgcgttcttgtgatcctcttctctctccatgtctttctcaaa

SEQ ID NO: 36252 - DNA, 180 bp, Glycine max
  Clone ID: PAT_MRT3847_132738C.1
cagatccaaacactcctactattacacttcttagctttagcctctcgcttcttatcgcgtacatctacagccaggcgggagcaagcacactgactccaatactcttcttccgggaccgtttgccaatcctaataatatatttgtccgagacaaaggagcccaataaggaaaatactttat

SEQ ID NO: 36253 - DNA, 1112 bp, Glycine max
  unsure (1)..(1112): unsure at all n locations
  Clone ID: PAT_MRT3847_132739C.1
ccacgcgtccgcaacaccactcactaatcactaccatatactgtactatacatcttaatagacaagagaaaagaaaagcatatttgaagtgtgaagtgtatgggtttaaaacgatagaaccaaaaccctaatttcacaactttcccgatgacgaaggtttacggcacggggttatacgatttccggcgccaccgcgtggcagagtaccccgtggcggcgccgccatcggagtcgaaagcggaagttccaaaggcaggcggcggcggcggctttccaagcagcatcactctgtcggagattcagcgcgaccggctgacgaagattgcggaggcgaactggttgaaaagcggcgatgcggctaggccgaagaaggacttcgaccctgagctagttcgcaagatctacgaaaccgaattgttagtgaaagagggttccaaacccgttcccttgcaacgtgtcatgattctggaggttagccagtatctggagaattacctgtggcctcatttcgaccctctcgctgccaccttcgagcatgttatgtccatcatcatcatcgtccgcgagaagttccgagaaaatgttgccgcttggacttgcttccatgagaggaaagacgctttcaaaggctttctcgagagtgttcttcgcttgaaggagggacgagaactaagtatagccgaaaagacgaattacctagtttttatgataaatgcctttcagagtttggaagatgaggttgttagcaggacaatcttgagactggcaaatttgaaatcttggtacagtttgtcttatggtcgatttcagatggagctttgtcttaatcctggcttgatcaagaaatggaaaaggatgataaagaaggaacctgtgaaaggagatggatcacatttaagatccctcaactaccagttgaggtgatnggtcgtgagaaacctcatagaagaatttctggagatactggattcacaggtatttcccctgaaaaattatctggtgaggacgatgaacttattgatgctactgggtttgggctgtttatgatgcctgtgtcctgtactgggagaggttaatgngattttctaattgaccctcttgagtcaattgcc

SEQ ID NO: 36254 - DNA, 377 bp, Glycine max
  Clone ID: PAT_MRT3847_13273C.1
tcggctgcgagaagaccacagaaggggatgtcttgtttttaccattttctggtctaatgggtgcaaacatttttgcaagatttgataaaagtgtttgtccattatataacattcctttcttatttgatgcactttacactatttaagttccacttctatatcctaaaggtccttttattatgtcttttatttactaatttataaacattatttacttttttttttctctctaattttcattttttttattttttattttattttatattttcatatattttttattacttttcttatttttatttaatatttttcatactcatttttttttctattattttttatttccatatatatctctaatctttatttataat

SEQ ID NO: 36255 - DNA, 166 bp, Glycine max
  Clone ID: PAT_MRT3847_132740C.1
atggtgtgtcatctcctgggtgtcgtacactgagatagcctatcgttgttgttcacgcgtccagtggcattgatgtccttggtagtggctatatgtggagcgggtaccgtcagaatgtagtgaatggcaatcccagtccggggttacagagtctcgcactctttgc

SEQ ID NO: 36256 - DNA, 297 bp, Glycine max
  unsure (1)..(297): unsure at all n locations
  Clone ID: PAT_MRT3847_132741C.1
cgctgcacgcgtacgtaagctcggaattcggctcgagatttttcttttaaacttgtactgagaaacntgangnaacaagtgttgncagtggtagtagtagtagtaagcatnnaacacttgnntgnttgcatttnnnttttaaanttgtactgagaaanagaaccatcaattttactctggccttctcattgtgcaataaaattcttaccttganaaaagaaaaaanggggggnnggcggannantgancggtggncccgggatttaantcngggnggggncngtnaggngnagcnct

SEQ ID NO: 36257 - DNA, 288 bp, Glycine max
  unsure (1)..(288): unsure at all n locations
  Clone ID: PAT_MRT3847_132742C.1
aaacatgctttatgcttgcttggaatttgaaaatcgtgtcattttgtggataaatgcttgaatctctattccctagcttgtcccatgtggcatctggttcaaacaggtggtggcattaatgagatgttttatgttaagtcagagcttcatggatcaataagtcctaagtcgagaaaatttgagctgtaatttgctcgcntcttttctagaaaaaattgttcctggctacatgttggcaccgctgtatttaaccttaacacctatatagtacaagctgtacaattatgt

SEQ ID NO: 36258 - DNA, 409 bp, Glycine max
  Clone ID: PAT_MRT3847_132743C.1
atgaaggtcttcggtttcctcgctgctgctcttgtcatcgccggcgctgctggccagagcaccaccactcctcccaccaccactggttccccctccactcctaccaactctccctccagcactccctctacttccggaaccccccccactacgggcaatcccaacagtgccactccgtccactccgtccactccgagttcgcctagttctagtactaactcgcccaactccaccccgaacccttccagcacccctactggcacgacgccttccacacccttctctggatccaatggatctaacaatgggttgaacggagctgctttggagactacggacaccaaggaaccgactgacaccaacagtccggatactcccaccaccctcagtaccacggaatcgtcgcact

SEQ ID NO: 36259 - DNA, 298 bp, Glycine max
  unsure (1)..(298): unsure at all n locations
  Clone ID: PAT_MRT3847_132744C.1
angcacgngtacgtaagctcggaattcggctcgagcccagatccaaatcaagcctggcctgaaccccaaagtctttcacagaagtaaaagagtagaggccatgtcctcgggcaggggtggaggtgagagaatatatttttaaaattatatgggaaacacatgtgaatacttaatgataacatttttattgacaaagatttataaactttaaaaccattttcattttcatacagtaataaaatctttctgtaataaagtgttttttaaaaggtanaaaaaaaanaaaangggnggcnnc

SEQ ID NO: 36260 - DNA, 259 bp, Glycine max
  Clone ID: PAT_MRT3847_132745C.1
tagcaggggtgtggtatatagtaggggatataattactacacaaccctgcatagttggttagggtataatactactggggctttttaacttacttttaaaacttacatggcacacaaaagggcaccatttggtcaatgtaattaactggaatggttttttttaatgtaaactatggataaaaaggtaaatggccagggaaggcctgggccctgaacctgggggggtggggggtggacctggacctggtttgggcccggg

SEQ ID NO: 36261 - DNA, 482 bp, Glycine max
  Clone ID: PAT_MRT3847_132746C.1
ggctcgagtaatgatccttcattaaatgaattttcatatggaagaaatccaagattcactgcggaagaagttgaacaacttgacaaaaataagccgtggtctagggctcttgatggttctagttaccttcccggaatggtgggacttaataatatcaaggagactgactttgtgaatgtaacaattcattccctaatgagagttacccccttgagaaattttttttttatccctgaaaattataaacactgcaaatctccactggttcatcgattgggtgaactacctaggaaaattgggcatgcacggaactttaaaggacaggtaatcccccaccagttcttacaactgtgaatgaaagccattaaaaaaagtgttcggtttgtggcacattctgacccgaaagagttcatgtgatggctacttaatacgctacatgcagattttaaaacttcaaagaagaattcaagcctaatatttga

SEQ ID NO: 36262 - DNA, 603 bp, Glycine max
  Clone ID: PAT_MRT3847_132747C.1
acgcaaaattcacaattgaaaaggaccttttactactggacataaaagtcaacccaaatatgtaactagaaggactaacaatgcaagtaaaggtcatcaaagcatacatctttatcaatcaaactatacatgtcaccaatagaaaaaaaaccagctgaactaaaatgccacttttaaatctcctatatatatataaccctcatatgcaataacctcatatgtaatttgtttcaaatgacatcaggctattataggttacctgtagtttgttgaattcccagttcagccatcagtgcaaatgtcttaccgggccttttcataacttccagccttcttatgtatataaatcatcatattaaacatcttcgggtctggtttcaaagctgaattttcatcattcaagtaggttgtcaaacaattcttcagcttccctaaacttgtcaccctgtaggtgaattaaatatataaatgcaaaactgaaagtcagagactcaaaagcagtacaatatttaagaaatgtatgctgagatcaccatagtcatcaaagaaacacgagacactgtgttgggggctgaacaatcattattataggaacaaagtatc

SEQ ID NO: 36263 - DNA, 432 bp, Glycine max
  Clone ID: PAT_MRT3847_132748C.1
accatcaacaaaaatgatgcctctaagctcattatttcctgttcttgtaattgctcttgtatcttcatttacatcttcagcagttaacactaattatgaaaacttcattcaatgtctttacagttattcccacaactcctcttcaatctctaaggttgtgtacaccaaaaccaacgcctcgtactcatccatacttcacttttccattcaaaacctcagattctcatccaacacaactccaaaaccccttgtcattgtcacacctacggaagtttcccacattcaagctgcaataatctgttcccaacgccatggcttgcaaattcgaaccagaagtggtggccatgactttgagggtctctcctatgttgctgaagctccatttgtagtcattgacctcataaactatagaaggattgatgtagatgtaaa

SEQ ID NO: 36264 - DNA, 431 bp, Glycine max
  Clone ID: PAT_MRT3847_132749C.1
ggctcgagcaacattaaacacctactcaatctcattgcagtcttcctcctcctcttattgttccgacacacgggctataaacgataccggtgtgggtgcgacccgataaatgctgttaagtaaatctcactgattcacaaggtcgaatcgacatgccaaatggggtgatggatatgactacaagggagaatctgtaggaaaaggttgggcttatgacggacaatagccgcgcagataccaagaatgtgcatcgaaggcaacaagctgactggcggaggacttcaaaaggtgcttaaatggctgagacgcgggtgaaggctaaatcaggctttcaagctgatattaaagcttcgtaaaaggttatgcctgctaggcatttgattgactagcattagcacgacaagcaaacggtttgccctgcgaaggctcag

SEQ ID NO: 36265 - DNA, 362 bp, Glycine max
  Clone ID: PAT_MRT3847_13274C.1
tttagagcaaacacacactgtccttactaaaaatattcgcgcgcggaaaggtttgtctgcccacacttgtttgttccattctctctcagtcaactaacaagcaacccaccctaaccaatcaaggtgcgtgctggttgcaacatacactttctcagtctggtttgcttctttctaacatacatgccttcgagaaagtaactgacttacttcctttttacatagaatgcctggctgatgagagcgcacgccctacctacaagctcgttgtctgtcccatccaaaataaattaatttttatctttctcagatcgaacgaccgacacaccctccagtaggtccgcttttttttccttccttttttc

SEQ ID NO: 36266 - DNA, 2255 bp, Glycine max
  unsure (1)..(2255): unsure at all n locations
  Clone ID: PAT_MRT3847_132750C.1
tcttttttaactcgtagtctatggctaattgattatcagtaatcgattatatacattcagttttttcttatcactccttctcacttcccactaccttttcttcttcttcttccacccacctcaatagttttctcctctgtctattccgaacataaaatcaataattttaattcattaatctgcaaggacaatatcacgcaccatgttccgccaccgcttcctcatcgggatgtacccagcacaaggccacataaaccctgcatttcatttcgcaaagcgtctcgttagtttgggcgcacacgtcactgtttccaccaccgtccacatgcaccggggcatcaccaacaaacccaccctccctcacctctcctttctccctttctccgacggctacgacgacggttacacctccaccgattacgccctccaagcctccgagttcaagcgtcgcggctcataattcgtcaccaatctcatcgcctccaaggcgcaagagggtcatcctttcacttgtttagtccacaccgtgctccttccttgggcagctcgggcagcccgtgggtttcacctnccgacagcgatgctgtggactcaaccagctacgatactcgacatcttctattactactttcacgaacacggtgaatacatcaaagacaaaatcaaagacccctcgtgtttcattgaattaccagcattgccattgttgcttgcaccacgggacctaccctcctttttattgggttcaaaccctactattgactctttcattgtcccaatgtttgaaaagatgttttatgatcttgacgtggagacaaagcccagaatacttgtcaacaccttcgaagccttggaagcggaggctctcagagccgttgataagttcaacatgatcccaatcgggccgttgattccctcggctttcttggatgggaaagatcctaatgatacttcatttggcggtgacatcttccgcctctctaatggttgcagcgaatggttggactcgaagccagagatgtcggtggtttatgtctcgtttggtagcctttgcgtgttgcctaagacgcaaatggaggaacttgcacgtgcgctattagattgtggaagtcctttcctgtgggtcattaaagaaaaagaaaataagtcacaagtggaaggaaaagaggagctgagctgcatagaggaattggaacagaaggggaagatagtaaactggtgttctcaagtggaggttctttcacatggttctgtgggttgttttgttacacactgtggttggaattcaaccatggaaagcttggcatctggggttcctatggtggcatttcctcagtgggtggaacagaagactaatgcgaagctaatagaagatgtgtggaagacaggggtgagagtggataaacaggtgaatgaggatggcatagtagaaaatgaagaaattaggcggtgtttggaagaggtgatggggagtggagagaaaggacaagaattgagaaacaatgcagaaaagtggaggggactggccagggaagctgtcaaggaaggtggctcttcggataagaatctaagggcttttttagatgatgttgaagaccccgaagatacttccttgggtggtgacttgttaccggtttcaaatggttacgttgagtggcttgactcaaaggaagacaagtccgtggtttacatttcatttgggagctactttgtgttgtctaagagacaaacggaggaaattgcaagtgctttgttagattctggttttccattcttgtgggtgattagagtgaaagaggaagaagaaggggaggaggtgtgtttgagaggagttggaagagaaggggaagttggtgaagtgttgttctcaggtggagagctaggtttcgggggtgcccatggtggtgtttcctcagtggagaaagagattaacaagtgttcggaagaggtgatggggagtggagagttgagaatgaatgtaaagaaatggaagggtttggccagggaggcagccaaggaaggtggtccttcagatttcttgatgatgttgaagtttgaccatatggctgtcacatcagcttttccgtttctgaattttcctgtccgtttcatttttcttttctattattgcatttgcatgactgagaatcaagtgaaatttcttctatattagtttgaaatttaaaaatatctaaatgagccatgactccatgagtagtaattttgtgttataattgatatatatattttctctt

SEQ ID NO: 36267 - DNA, 570 bp, Glycine max
  Clone ID: PAT_MRT3847_132751C.1
ttgccgtgctacatgtgaggacgtcctcctgcttggggggggggggggggataaaggatcttggtaaaagaaggacaaaggtaagaacgatattacctgttaaaagcagggcccagcgattagacaaaagcataacatgaaaatgaagatatgattacaagaccaggggtgaggtatagaaaaacatgaactgggcggcggaccacggggggggggaagggttgctaacgatgcgtaaccaattaaattgagcgatatggtagctaaaagagaaaatgcagcagattaaatattacaagctgagtaaaatgtaagcttatgagggagtgcaatccacaaccaaccctctttaatccgccacacaccaatagtaatgtggacaatgacatttcacggttttatagggttaggttatgggcagtggttaagacagatgcaactaaacctacaaccagagcgtagcaaactatagctataaaggacaggaacgggtgtgggaatgcaagcaagcacggtgctttctaatttgccaggctggttattaatacggccatatatatgcaaggcaat

SEQ ID NO: 36268 - DNA, 533 bp, Glycine max
  Clone ID: PAT_MRT3847_132752C.1
cgagtagctgatgtctaatttcggtgcggtcgactttggaggtgctgaaccacctggtggtgttgtatagcctggtgggcggtaacccattggtcctggcccgtatgaagcggcacggttgtactgagcaacattggggcggatgtttgggttgataccaaaggctgaactgggccgagcatcggagggataacccggatggccatggggcccctgtcggtcggggtagggagccgcgggggccgtgctgggatctgaaaggctcatcctagacgggtcaggcatctcgagattttcggtgactggttgcattgcacttgtgttagaagctcctcgttgatggttcccgtagcgggtggatttgattcgagcaatagcaacattctcatgatctcggcgggacaaggtcttcgatcgcgagatgctatcgatccgaccagtagcatctttgtttccgctcgctgcagctttagcataccagcttttggcttctttgatgtcaacaggaacataaattccgacttcatagaagt

SEQ ID NO: 36269 - DNA, 520 bp, Glycine max
  Clone ID: PAT_MRT3847_132753C.1
cccccaaaaaaaggggggaaaaagaaacaaaaaaaaagggggcggttttagggggggggacccccccccacccggccggggaactttaaggggaaaaccaggacccttaactttaaaaaaaacaccccccccccccggggggggccaggtgtccaaaaacaggggccctttttccaaaaccggaaaacaaggcggggggggaaccccccgggccctttttccaaagcaatttgggccccagggggaaaaacccccaaggggccccccccaaccggggtcccccccaaagggggggggaggggcccctcccccccccactttcgggccgggaaggtttaaaagccccaaagggggcccccttttgccccccccccccccccggggggggggggggggggacccccgggggagggggccggccaaaggacccgggggaaaacccgcttccggggggaggggcccccccccccccccggaggggccacccaccggggcaaagaaaagggcggggggggtttaa

SEQ ID NO: 36270 - DNA, 1243 bp, Glycine max
  Clone ID: PAT_MRT3847_132754C.1
ttcccacagttttcagcatttgcatggtcccaacagctcaaatattgtgtctatctgtctgtcaggttgatgttgagtcacctctatttattccttcccaatttcctcctccatttcgacaaacaacttctttcaaggaaaatggctcttcttggatttcttctgggacttttcttaatggtcactcatgtcaaggggtatggttttggaggttggaccaatgcacatgccaccttctatggaggtggtgatgcttctgggacaatgggtggggcttgtggttatggaaatctgtatagccaaggttatggaactgatacaacagcactgagcactgctctgttcaacaatggcttgagctgtggtgcatgctatcaaattaaatgtgtgaatgatccacagtggtgccttcctggctccatcatagtcactgccacaaatttctgtccacctggtggttggtgtgaccctcccaatcaccactttgatctgtctcaacctgttttccagcacattgctcaatacagggctggaattgtgcctgtagtttacagaagggtgaggtgcaggagaaaaggtggaatcaggttcaccatcaatggccactcttacttcaatttagtccttgtaaccaatgttggaggtgctggtgatgtgcattctgtgtccatcaaaggttcaagaactagatggcaagccatgtcaaggaactgggggcaaaactggcaaagcaattcctacttgaatggtcagagtctttcctttgtagtcaccaccagcaatggacacagtgtggtgtcatacaatgttgccccagctggttggtcctttgggcagacctacactggaaggcagttcaactactaaccaacctttaattgagtatctttttcaataatgtttagtaatattatattacctcaagattataaattaaagaaccaagcaatatatagttgagtattgtagatggattagtgttgtgggctagatagaagatgatttagcccccttttaattatatttgatttgatttatatgtagcaagcatttgcagatgatgctggcttattttatatgctatgcctctgcaaatggaatatttgctctgttgagaaagataaatggtaaaaatgattgttgaatgcaagctcttgtacttttagttattgtcttattcatgaatgaaatgagtgagaaaggtgatgctagtaataaaaaagttgaccctgactttacttgc

SEQ ID NO: 36271 - DNA, 236 bp, Glycine max
  Clone ID: PAT_MRT3847_132755C.1
ctcgagccgctcgagccgattcggctcgaggaacacttaccttaatgtcaccaaatctaccaatgactaggatctagaatccctaggtactgaagagacagcttgtagctattcggatcaccatgggaaggcgttctaaggcctaggtgctgctggtggatagagagacattgttgctgataacaccagcgagatcactacgtcgacgttaaggactacccgggccacgtacttct

SEQ ID NO: 36272 - DNA, 142 bp, Glycine max
  Clone ID: PAT_MRT3847_132756C.1
cttccggaaatattggttaaaccggttgaaatttggtcaaggaccctgccaaatgaaaccgagggaaaatctaaggttgccctttttcaggattaaatggaaaagccattggtccttgccttggcaattggccaaaaccggt

SEQ ID NO: 36273 - DNA, 1095 bp, Glycine max
  Clone ID: PAT_MRT3847_132757C.1
ccttctaaaaagttattccaaatgaataattcaatcacaaataagttaggttatccagtagacatcatccctcatcattcacttgataacatgcatataatcatgaattgtttttcaaaattaataacagtatacagatattattaacaaattacacgaaaatgtgggtacacagtttaaactcgcccaaatggtttcccaggtatggtccagccataattgctgcagcataaaagaaaacagaagtagcgataaagctgcagtaacctgagccacctatcattccaaaatgactggcactgtcttattctgactcttgctatccaccagtacagtcacaccccttagtaaacgcctagccagtggcctgcagaagctccctttctgcatgctctctaatccttctctcaagctcaggcctgaaatgcttgataagaccctgcactggccatgcagcagcatcacccaaggcacaaattgtatgcccttcaatttgtttagtcaactcctgaagcatatcaatttcttctaacttggcattcccaactttcattctttccatgatcgtccaaagccaaccagtcccctctctgcatggggtgcactgcccacagctttcatgcttgtagaaataggaaagccttgcaatagcatccacaacatccgtagatttatccatcacaattacagctgcagtccccaaccctgtcccaacagccttcaatgcatcataatccatcaagatatcatcacatacatgctttggaatcagaggaacggatgatcctcctggaatcactgcaagtagattatcccatcctcctcgaatacctccacagtgcctctctatcaattccttcagtggaatactcatttcctcctcaacagtgcaaggcttgttcacatgccctgacacacaaaacaactttgtcccagcattgttcttcctaccaaaactggcaaaccattcaggtccacgccttagaatggttggagacacagccacagtttccacatttgtgacagtggtaggacatccatacaacccagcattggctgggaaaggcggcttcaatcttggtttaccttgtttcc

SEQ ID NO: 36274 - DNA, 2222 bp, Glycine max
  Clone ID: PAT_MRT3847_132758C.1
ggaattggaaacactcaagaaaattccttgaaaggcaaatatgtctcttgcatggcaaaagaaatatgcaaacgaccttggtaccaggattataactagctgaaaatcatgtatggacatgttttagtccatgcatggatcaacagacttcatacaagcaagttgaggacgttgttgaacaataacatgttcttctaaaaagttattccaaatgaataactcaatcacaaataagttaggttatccagtggacatcatccctcatcatattcactgataacatgcataatcatgaattgtgtttcaaaactaataacagtatacagatattattaacaaattacatgaaaatgtgccaaatgacaagcaggtacagtttaaactcgcccaaatggtttcccaggtatgatccagccataattgctacagcataaaagaaaatagaagtagcaataaagctacagtaacctgagccacctatctttccaaaatgactggcactgtcttattctcactcttgctatccagcagtacaatcacaccccttagtgaaagcctaaccagtggcctgcagcagctccctttctgcatgttctctaatccttctctcaagctcaggcctgaaatgcttgataagaccctgcactggccatgcagcagcatcacccaaggcacaaattgtatgcccttcaatttgtttagtcaactcctgaagcatatcaatttcttctagcttggcattcccaactttcattctttccatgattgtccaaagccaaccagttccctccctgcatggtgtgcactgcccacaactttcgtgcttgtagaagtaggaaagccttgcaatagcatccacaacatccgtagatttatccattacaattacagctgcagtccccaaccctgtcccaacagcctttaatgcatcataatccataaagatatcatcacatacaagctttggaatcagaggaacagatgatcctcccggaatcactgcaagtaaattatcccatcctcctcgaatacctccacagtgcctctctatcaactccttcagtggaatactcatttcctcctcaacagtgcaaggcttgttcacatgcccggacacacaaaacaactttgtcccagcattgttcttcctaccaaaactggcaaaccattcaggcccacgccttagaatggttggagaaacagcaacagtttccacatttgtgacagtggtaggacatccatacaacccagcattggctgggaagggcggcttcaatcttggtttaccttgtttcccttcaagactctccaagagggctgtttcctcaccacaaatataagctccagcaccgtagtggatatgaacatcaaaatcatagcctgatccacaagcattcttacccaacaaaccagctgcataagcctcttgcctagccttttcgagattcttacgttcgttcacatattcacccctgatgtagatgtaagcagcactagccctcattcctactccagcaatcaagcaaccttctaacaatttatgtgggtcatgccgcataatttccctgtctttgcaagttccaggttcactttcatcagcattaacaacaagatatgaagggcggccatcggatacttttggcatgaatgaccatttgaggcccgaagggaaaccagcaccgccacgcccacggaggccagacttcttcatttcactcacaatccaatcagtacccttaagtaccaaatctttcgttcgatgccaatcccctcgtttcatggcacctttgagaaaaggatcatgcagcccatataagttagtaaatatcctgtcctcatccttaaggccaccaaaatgggttttctccggcggaggaggtggtggtggcggctgtggggtactagcagtggaagcaccctgagtgctaaatagcctgaaaccaaggcccaatttctcactatgatgttgaaccaaggctgtccttacagaaagaatgcccctcatgtttgccttaccagtgatgaacgcaaattgaattgatcactgggatctgatgagtgttcttgtgctgcttttgtgggttgcttccgttattactctcaggttgccttctcttgttctgttttttttttttgtttttaatttatttttatttttggtgttgggttagattttggacttctgtttagcccggacgcgtgggtcgacccggaatccggac

SEQ ID NO: 36275 - DNA, 390 bp, Glycine max
  Clone ID: PAT_MRT3847_132759C.1
tttactttacccacacacttttatctcttctttatttgagcctttcttgtggatttcttggcttcgacggtggtttcagttctggtgatatcgataatgttgattgtcctgaactgtaactgctctattgtttttcacatgctcttatccaaagatgaaggtcactatttttatgatgctaattctctgacaacacatactgcaaacatggccatttaaactggttaagatggcaaagatgccatacaatcattgacagaatgtgcttaagagaaactcactgaaggtcttggcttcaaacatgatcaacaatccatcactaagaaagtctctgactattccggtgatgcttctcagaaatcacacgactattcctgtgacactgctcac

SEQ ID NO: 36276 - DNA, 224 bp, Glycine max
  Clone ID: PAT_MRT3847_13275C.1
acgctagagaattatcatacctcttcattatgatatcctacctactttcaatattcggattatggcttatacttgtggaccaatccatttcagctatttgctgcttataaatattaattgtctaagaaacaaatttatagtagttctatacaatcacccgatcatcaatcttccttcatataaactgattaagttgtatatacctcttaatgcactgtattatc

SEQ ID NO: 36277 - DNA, 451 bp, Glycine max
  Clone ID: PAT_MRT3847_132760C.1
ctcacacggagaacaaaatcttaatttctgcttcaatctaaaaagtttggctaagctgcactagtattttctgttaatcatcttaatcataattatgtttagttattgtcttctctatttttgtataatattcttgtttgtgttcactttggtttttaatattgccaagtggtgtcatgtaatctatgtaattcacctagtgaaataagactttgttgttgtattcttgtttgtgttcttcatttggtttttctacattcttcttgttcatctcatgagtgttctttttatgcaacttttctgtattcctcagttgttgctgtaaactaactgtgtagctgccatatcttgttgtttctctccttttccaggatggctaagactaggccagatgcttaagcttctgctgggaagaagaaaaaagtgctcaaaaagggaccaccttcttctc

SEQ ID NO: 36278 - DNA, 505 bp, Glycine max
  Clone ID: PAT_MRT3847_132761C.1
gattaagggacaaaaaatttaattcatgtattatcaaaaaaatgagcattcaggctcacatgatagttactgagagaagaaatcagagcataaagaaaaatctattacgggaaggggacgaagggacccaaaccaaaattatgaaagctcgtaacatcaatacacaagaccatgtagtgaatctggaaaacacaaaataaaacttattgcttattgtctacaacaccaccagccctaatttctctgaaaacactggacatttcctcacgcttcttctttgcgcgtttgtgtgttccaagctttgactttgcaacctttattgcccttttatccttcccaaccttcatgaactaaattatacacttttcatacggcgcaaaaccggctacctttcttatgaggttgctcacaaagtgcacacactcttgcttgctttcctcttaccatctgaagggcgtggaggcaaaaacctcttggagacgacgcgaccctagttaaatccaac

SEQ ID NO: 36279 - DNA, 321 bp, Glycine max
  Clone ID: PAT_MRT3847_132762C.1
cttcataagcaattattttattatttgtaataaaaaaggacaattcagtcagcaaacccaaactaatcacaaaaaagaagaaaatgcatacagggcaacctaaaacgtgctttacagaaaaatgacggcggattaaacgtggatccagccagtctattgatcaaactttaaagacacttctaagcctagaaatttggaacccttaaaggaaaaatggtaacagagggttaaccctggcggttttcaaacatgctgattgagctgactttcattggagttggcaccaccaacggagcttctggagagtcactaacagcaaat

SEQ ID NO: 36280 - DNA, 539 bp, Glycine max
  unsure (1)..(539): unsure at all n locations
  Clone ID: PAT_MRT3847_132763C.1
catgnagtaatcctgatgtttaattttgtccgtaattgaaaatttgttcaccgggacttctgaacttgggaaggttgatgtagctgaggaatatttttggtgaaataataagtagatgcctggaaagggtcaaagggcatagtagttggacgatggctttattaagatgaaatttagccgtttctgcactggagtatgattcatgtgtataaggagcaacaataagtaagagcaactgcatgtactttatccatgctttccaaagattgcaagacagtatttactgaaatatatcatgacttagatctaaataggataagccaaggcaaattctaaaatgcaacaaagttaggaaataaaagattgaagaggggaagcctaaacaagttccattttaatgtcttggaatttggtttcaggaactgcctgtggttgtggttgactaatgtggagcataagtagtgatataaccttgaatctgattgcttggagaaagtttcaattctagtgaagtacaattaagcttcacttaagtcaca

SEQ ID NO: 36281 - DNA, 556 bp, Glycine max
  Clone ID: PAT_MRT3847_132764C.1
gcgaggattgggaagtcaccatccttaataatttcaattgagttgtcaacatttgaggtaataaactagcttcctcttctttttttttccttcccttttttctttaaaatttgaactaagttgttattaaatttcttattcaagattatcctgtactgagttctggttctagcaatcatttaatatatcaactaaattctgagcacccaagtggcctgttgtaatgttttatcttgataactagaccatttccttgacactcacacacccctgttcctaaggttcatatataaaagactttctgtaaatgaggaaagcagttcccgcaggtgaagagagaatattgtaattcagttaaacatccttcagcatcatggatttgactgtactgctatatactttactagcaataaatttacttttatcatcttttatgatggtacgtgggtgattaactagtatcattgattgggactgccatttgtttggtgtattggaaagagacataagttaagatcgagttagctatatgacaatgagtttgtttcaatggtct

SEQ ID NO: 36282 - DNA, 1557 bp, Glycine max
  Clone ID: PAT_MRT3847_132765C.1
gtcgacccacgcgtccggatacataatggaagcctttccaccaaacctgttcctctcttccatgcaatcccccctgaccaattcactctcttgtcaaaggtcctttcaaaactctcaattcttctttggccttgtaccttcttaattgaagcattcttacttgtgcaaaactgggacctactgttccattttgtgctaccatgtttcctccttctttgtttcctggtgaagcacttcctctcaaagccctctcccatttaccttgtggatttctcatgtcttaaacctccaagccactgcagggtgcctttcactacatttcttgaaaatgcttccatgttggaggtttttgacagtgaaagcatagctttcatggccaaagtcctccattcctcgggacaaagtgaagaggcatgcctccccccttccttgcactacattcctccaaacactcaccacacagaatccatcaaagaggtgcaaatggttcttttccccatcgtggaagatcttctagcaaaaaccaacctttcaccccttgatatagacatacttatcataaactgcagtggcttttgctcctcaccttctctaacctccattgttattaacaaatactctatgagaaatgacattaagagctataatatctctggcatggggtgcagtgcaagtgccctttgcattgatttggctcagaatcttctgagtgttcacaataactctaatgccgttgttctcagcacagagattttgtcaacaggttggtattcaggcaatgaaaagtccaagttgctgattaattgcctctttcggatgggaagtgcagcaatccttctctcaaacaagaaagaagcaaagaaaactgcaaagtacaggttggtcaggacacttagaacccagagagcctttgatgacaaatcttatttttctgccataagggaagaagattctgatggaaaacttggggtgacactgaagagggacttgcttcaggtggctggtgaaactctccgtacaaacatctccattttggggtctgaaatcttgcatctttcagagaagttttcgtatggagtttctgtgatcaagaagaggttcatcaagtctgagggaatttacgtgccaaatttcaagacagtgatacagcacttctgcttgccatgttctgggaggccagtgataagagagatagggaaagggttgaagctctcagagagagacattgaacctgctttgatgacactgcacaggtttgggaaccagtcttcttcctcgctgtggtatgaactagcttacttggaagccaaggaaagagtacacaagggagacaaggtttggcagcttggaatgggaagtggacccaaatgcaacagtgttgttctgaagtgtattaggcctatagttggagagtacgagaagggaccatgggctgattgtatcaatcagtacccaatattagccttggactaggaattctaacttggttatagctagaattcttaattagtgtttctattatgacttaaatattaaatgactgaggcatttcttatt

SEQ ID NO: 36283 - DNA, 1566 bp, Glycine max
  Clone ID: PAT_MRT3847_132767C.1
atttacatcattatttttccgcctgctctcttttacctcattgtgcctctttacaaccagttgtaagatagcatgtgacctaaaagaaaatacgttgtggttgatctcctcttaggctttccccaccgcagaatctcattctccaaaatggaggccagggtctcatcttctctcggcctcccttcccccaaaccccaccaattctcagtctcaaacctcaccgatttcccttctctcttcacacacacccccactctccccttcgcctccacctccaaatgggcccggcccaccccaaagcccaacccaaagcccctcctcaaaaccctctccgtcctcgaccgcgccctcatcggcgccgccgcgggcggcctcgccggcgccttcacttacgtctgcctcctccccctcgatgccatcaaaaccaagatgcagaccaagggcgcggcacagatttacaaaaacaccctcgacgcaatcgtgaaaaccttccagtccgaaggcatcctcggcttctacagcggcgtgtccgcggtcgtcgtcggctctaccgcctcctccgccgtatacttcggcacctgcgagttcggaaaatcgttcctctccaagctcgaagcgttccccgccgtgcttatccctcccaccgccggcgccatggggaacatcatgtcttcggcgatcatggtcccgaaggagctcatcacgcagcgaatgcaggccggcgcgaagggccgctcgtggcaagtgtttgctgaaattattcaaaacgacggcgtgatgggcctctatgctggttactccgcgacattgctgagaaacttacccgcgggagttctgagttactcttctttcgagtatttgaaagccgcggtgcttcagaagactaagcagagttacatggaaccggtgcagagtgttctgtgtggggccctcgccggggcgatatcggcgtcgctcacgacgccgttggatgtggtgaagacgaggttgatgacgcaggttcggggcgagggggtgagcaaggttgctgcggttatgtacgacggggtttcggccacggtgaagcagattttgaaggaggaagggtgggtagggcttacccgtggaatggggccccgggtcctgcatagtgcttgtttttcggcgttgggctattttgctttcgagacggccaggctttccattttgcgggagtatcttaggagtaaggagttgcgtgaagtctctgtctcctctggttgagtttgtgcttttgttctttattgcttcttttttatttgggttttgaattacagttacttacttccatgttgaatgtttcagtagataaggagtattttgttatggaaaatgtactactaccgtggcataaacaaaatgaaaatgtaggtgctgaaatgtttcttatcttggttacaataaagtgattttgctgattcttgttcttggtgtcggaagtttaggatattctgtttctaagattttgtttaggataaggcagctgaatttcgtatttctccctgcatccttcatgaatattaatatggtctcatattggatgctaaa

SEQ ID NO: 36284 - DNA, 133 bp, Glycine max
  Clone ID: PAT_MRT3847_132768C.1
agtcaccatccgacccacgaaggttatgacaaacatgcttatctccagaaagcagatggacgttgatgtccttcattcttggagggctaatgttttccatgctgttctgaaggagaagctgggacaaatgtat

SEQ ID NO: 36285 - DNA, 499 bp, Glycine max
  Clone ID: PAT_MRT3847_132769C.1
agagagcaacaaccaaagcaactacaaaatttatgcagctttagatcaatgtctttctctctctctctatctgtctcttccatggtacacaaccttcttgtgtttctctctctactcttgttcactccatatattcctcttctcgctctgttaaacaaaagcaaatgaggaaataaataattattttaattttgtaatctcattgtttggttctggttctcaggaatggtagatttgaggtgaagacgttccacattggtcaggtaatcctcagatctagcttcactctagcttgttaacaccaatttcatgcactgattcaaggactgagcaatgttcagtgcatgctagttcttgcttgtagcagatcttgtggattgactgattctagggtttctatatttttgcattttaaacttaagtttttttgcagttctttgttacgttctccagtgttgcggcattttaagcgaaatgttttaatttctatttttagtga

SEQ ID NO: 36286 - DNA, 166 bp, Glycine max
  unsure (1)..(166): unsure at all n locations
  Clone ID: PAT_MRT3847_13276C.1
ccggnctggagaaccaggcgcgacccacgcgtccatacatcttctaaaagactacttaatgaatattcaagacatcaattctaaaggggcctattggatctttctatggctctccaaaaaactaaatttncacagaaaatctaaatcatattttatcaagcttatt

SEQ ID NO: 36287 - DNA, 998 bp, Glycine max
  unsure (1)..(998): unsure at all n locations
  Clone ID: PAT_MRT3847_132770C.1
cgcattacaaatacaaatacaaatacaaatacaaaggtcttttcatttctgctgattttcctcttcagccgccatggatgcggaggctgtcttgaacctctttgattcttgctggtttgaggttaacattttaaggagaaattctagtcctcacacatcaattacaagttatacagaaaatttagatcatgtgttaaaagaagaaaaagaaccaaagctacccttgatccgaaccagccacaccagatccatgagtgaccaattatccatgacaacaacaagcttcaaccaagattctctttcacctgactcagtgcttcttctccatccaaagctccaaaccattctctcaggaaaagaagccactgactcagaacctgatgagaacccaagaacgcaggttaggcctcatcctgaggtgttgtgtcctaagaagaacaaaaaaaatctcaagcagtagaactaggaagaggagggagagcaagagtttgtcagaccttgaatttgaggagcttaaagggttcatggatctgggttttgttttctcagaggaggataaagactcaagcttggcttcaattattcctgggttgcaaaggctacggaagaaggaagaggaagaagaagaaaatgaagattgtgatgagataagtgttccaaggccttacctttctgaagcatgggaggttcaggaatatgataggagaaaaaaagagaactctttggtgaattggaaaatgcctgctatcaacaatgaaactgacatgaaagaaagtcttagatggtgggctcatactgttgcttccactgtcagatgatgatgcacttgttcataatccaaaaattttcttcttttttcttttgtttcgtatatacatttttcttgttctttttttaatttttttttctggaatctggcattccacaaatttgtcacctgtaattttagactaaacaaaagaagaaatttcactctgcggaatctnnnnnnccacaaa

SEQ ID NO: 36288 - DNA, 750 bp, Glycine max
  unsure (1)..(750): unsure at all n locations
  Clone ID: PAT_MRT3847_132771C.1
cgcaattcacaaatcacaaatcacaaatcacaaatcacaaaggtcttttcatttctgctgattatcctcttcagccgccatggaatcggaggctgtcttgaacctcttcgattcttgctggtttgaggttaacattttgaagacaaattcaagtcctcacatatcaattacaagttataacgaaagtttagattatgagataaaagaagaagaagaagaagaagaagaaccaaagctacccttgatccgaaccagccacaccagatccatgagtgaccaattatccatgataacgacaagcttcaaccatgattctctgtcaccagactcagtgcttcttctccatccaaagctccaaatcatactctcaggaaaagaagccactgactcagaatctgatgaggtgttgtgtcccaagaagaacaaaaaaatctcaagcaatggaactaggaagaggagggagagcaagagtttgtcagaccttgaatttgaggagctaaaagggttcatggatctgggttttgttttctcagaggaggataaagactcaagcttggcttcaattattcctgggttgcaaaggctagggaaaaaggaagaggaaaaagaagaagatgatgattgtgatgagataagtgttccaaggccttacctttctgagcatgggaggntcaggaatgtgataggagaaaaaaagagaccccttgntgaattggaaatgccctgctatcaacatgaaactgacatgaa

SEQ ID NO: 36289 - DNA, 745 bp, Glycine max
  Clone ID: PAT_MRT3847_132772C.1
ttcccggttcaatcaaaatctagcagaagcacaaaatcaagcacacaagcaaattcacttctctgttctgacacacatattaagttcccgagaaagatctagagagtaattaagatgggtacgtggttcacaaatgcaaggccgtatctgctgttagtggcagttcaatttgggtctgctggcatgttcatatttgcgatggatgctataaagaagggtatgagccattacgtgttcatcgtctatcgtaatgccatcgcctctgtatctcttgctcccttcgcatttgttcttgaaaggaaagttaggcccaagatgactttccgggtattttcagagattatggcactggctttcttcgaaataatactggaccagtgcttcgccctcttgggcatgaaattcacgtcggcatctttcctatctgctgttatgaactccgctccctctgttacttttgtgatggctgtcattctaagaatggagcacatgaagattaaggaggtggcatgtcaagccaaagtgattggcacagtaataacatttggaggcaccttgcttatggcactgtacaaaggacccgttcttagttttatgcgatcttcaactagccatcctagccaacctgagaatgtggccacagaaactggtaaccattgggtcatagggacattgttccttctcattggttgtgctggctttttcttattttacattataataaccatatcattttttgaatacc

SEQ ID NO: 36290 - DNA, 248 bp, Glycine max
  Clone ID: PAT_MRT3847_132773C.1
ggctcgagagaaccctgatccccccagacatacggaccgttccagccgggcatggcaatcgttggggacagagacgtctgtgctctcccaccgctaattggtctagacggtcatgacaaaacatcatcgtcagccgaaaaccaggcactggacgggcctgatacccaagaaggcagcaaggcagccgtttagatcgtgagcgatcctgcgccgggcaaagcatgggaacaggcgacccatgctcaggc

SEQ ID NO: 36291 - DNA, 321 bp, Glycine max
  Clone ID: PAT_MRT3847_132774C.1
tgacaaattgaagaactcaaagggagctgaacttcatggtatcattctactttaaacgaacatttgacatatatcggcaaaaaacaaggtggttttgcactccatccaaagacgattgtccaacctatctgaacgatctatagaaggcttcaacttatctcgatctaccggctgtgggggtgcccgacaatactcaattgcacaagcccatctcttatgatggacactctgccaacagtgtaagagacacttagtttgggttccacatggacaacatctgacttcgaactggtggatgggctaacaccagatccgacagat

SEQ ID NO: 36292 - DNA, 489 bp, Glycine max
  Clone ID: PAT_MRT3847_132775C.1
ccctcgcgtccgcccacgcgtccggggaggggaagcttttcaagtaagcctcccccttctttgggagtttcttaaaatagtgggagtaagacagggactatcatgtaacccctcatcatgtattggttttcatggctcttttaaggttttctcaatttggatggtttatgaggattttaaacatccaaacaatgggaaagaaattcattaacctcacatactcttcctctagtccattagtttaaacatttgtttccttctccttttgtcaccttccaactctcaaacatcacagcaagagtcatcctgattactctcattgtagcagcacaataaatcctttttttatattcaagtttttatggttctagttgaaatagcaatattctaggcatatatatgctttgaggggtgatcttccttagacactaaagtctagggtaagcccgttgctcttttgatgcaatttgatgttggctttcataacac

SEQ ID NO: 36293 - DNA, 518 bp, Glycine max
  Clone ID: PAT_MRT3847_132776C.1
gggaggctggctgagccagggtttcagaatgcccgatgggttgatggtgagcttgtgattcttgatgggaagcacctaaaagcagggccggttgttggatttgtgtattgggcccctgggtatcattttttggtcttcttcaatcggcttaggcttcaacagtagggttttgttcataatatcagagacttgtaaattctttcttcagattctcagcgtaagttctcattaaagatccatgtggtgtggaagtagtaactgatgaaatttgtctgctgcataatttttttttccttgccagctagaaaatcatattgttagtatggtcagtgagtaaatgtgaaacaaaatacttgtatttatagtagaataaagttgacccgaaatttggtctgccttacttattattgagcccggggttaggtttttaagaaggcttattagcctaacatgtcaacctatttataattttttatagtttatgtaatatataatgatgcaataattttgtttatggc

SEQ ID NO: 36294 - DNA, 1223 bp, Glycine max
  Clone ID: PAT_MRT3847_132777C.1
gagccttgaaccttgaaccttgaatcttgagccacgagccaccaaaagatgcatcaagcatgaatctagtatgtgggaagaatgtgctgattgacatgagcatacatacagcatatgtaaaggccattcgtgctgcacaacattacatttatatagagaatcaatatttcattgggtcttcatataattggagtcaacataaagaccttggtgctaataatttaattcctatggaaattgcgctgaagattgctgcaaagataagggcaaatgagagatttgcagtgtacattgttattccaatgtggccagagggtgttccaactggtgctgccacccaaagaattctattttggcagcataaaacaatgcaaacgatgtatgagacaatttacaaggctttggttgaagttgggcttgaaacagcattctctccacaagactatttgaactttttttgtcttggcaatagggaggccatagatatgtacgagaatatcactgtgtctggaactcctccgccagcaaatagtccacaagcatttagtagaaacaatcgccgtttcatgatttatgttcattcaaaaggcatgatagttgatgatgaatatgtcatattggggtctgcaaacatcaaccagcgctctatggaaggaacaagggacaccgagattgcaatgggtgcgtaccaacctcatcatacctgggcaagaagccagtatcatcctcgtgggcaaatccatggatataggatgtcactttgggctgaacatacgggtacgattgaagactgcttcttacaaccagagagccttgaatgtgttagtaggattagaacaatgggtgagctgaactggaagcaatttgcatcaaatgatgtaacagaaatgacagggcatctgctcaagtacccggtagaagtcgatcgaaagggtaaggtaagatccctcccgggccacgaagagtttccggatgtgggaggaaagattgtaggatcattcattgccattcaggagaatctaaccatttgattacttttttacattcactttgctggccattaggataggaataggatgaatgtaaatcactggtgtgcatgtaacttaattaaatgataacttttttttgggccaatcatcattcatataaataatcacacacgttaacatttaactattttatctttatataaaaaaaaaaaaaagggggggccttttaaa

SEQ ID NO: 36295 - DNA, 316 bp, Glycine max
  unsure (1)..(316): unsure at all n locations
  Clone ID: PAT_MRT3847_132778C.1
cgtcgcangtagtaagctcggaattcggntcgagancantttnaatttntctcncncctaaaaatnaaatcatggtgancgccanatcncaaanncttnngattngaatctncgncagtttacnctctnctcnaaaatncctctgtccgcattntctgtctcgntncgtacggaacgtngcgnncgcggtcagctcgtgttggtcgtntccggcggnctcgangcaaaggnntngtgctactcgtggagaagctcgggacncgggggctgaagtgttnaaggattcgcnancgtcgantgctgctacaatttcagc

SEQ ID NO: 36296 - DNA, 477 bp, Glycine max
  Clone ID: PAT_MRT3847_132779C.1
ctccctcaaataccatttcccaacaaaacaatttcaattccctttccttcctcaccagcccaccatggaagaacccaagccaattctacagaaaccccccggttaccgggacccggactccaaaccaccgccacctcccccgcgaaagcccatgctgccaccctcgttccagcccaaacccaagcggcgaagctgctgccgcatatgctgctgcaccttctgcctcaccatcctgatcttgatcctggtggtcgtgatcgccgccgccctcttctacctcatctacgacccctccctcccggagttccacctcgactccttccgcgtccccaaactcaacgtcaccgaagccgccgacggggcctacctggacgcggacacgtccgcgcgcgtcgaggtgaagaaccgcagcggcaggatgacgtggcacttctcacagagccaattcacggtttcagcggagaacggagacctgaa

SEQ ID NO: 36297 - DNA, 172 bp, Glycine max
  Clone ID: PAT_MRT3847_13277C.1
atggaaaaaattttttttgcttgccaacataatgtatttagtaattacaactactatttcatgccttaggccaaaccgggtatagcatgtctactgcatgaactatactaggaaattattggcctattggcattatgagacgatcaatgtccctttaacactatactatacc

SEQ ID NO: 36298 - DNA, 342 bp, Glycine max
  Clone ID: PAT_MRT3847_132780C.1
atggctgttaccatgacttcgttctcctacaatggagcccaaaccattccaatcactaacttaccgtctggcgtggccttcaatactcagacttcaatcaagcttaccaacgccaattttcctgcatggagagttcagttcaatgctctccttgtgggatatgaattcattgacgaactagttgtcattagttctccattggatgattttgatttggtcattcccaccttgaatggtcttggtgttgagtatagagaagtatttgtagcactatgcactcagggctattcgatcaattttgaggaactccatgatttccttgctcactttgagaattactga

SEQ ID NO: 36299 - DNA, 142 bp, Glycine max
  Clone ID: PAT_MRT3847_132781C.1
gccaaactgatgaaaatcgaccaggagcaagatgcatcccgattgccacaatggttaaaggctggcaaagagaacccgtgttactatgcggtggggagtcaaatcttggattccctgaggtgcatgtgaagcctatacccaa

SEQ ID NO: 36300 - DNA, 190 bp, Glycine max
  Clone ID: PAT_MRT3847_132782C.1
atacctatggcaaccacttccattctcaatcaccacactgatctggatcaaggctctcataattggcctcatagagtttcagaggaactcagatctggacccaaaaaagaggctgtacccaggtggcagttacttcgaccaacaggacctggcctcatatccagagaagatagcgaccattgagtttagt

SEQ ID NO: 36301 - DNA, 466 bp, Glycine max
  Clone ID: PAT_MRT3847_132783C.1
tgaaaatgtcaccgacagcaaaagaacaaatcttaagaccaagcgtacttttgtaagtattcttagactttttcttttttgttctttaattaaatgaattaggtgttttgatggaactaaagcaactaattacttactaatttaaggatagaagggcatggactgtgttgggggacaccaggggccattttgtgccttggccatctcaaatgtcttggggaagggagtgttaaacttcagttgtgcatgctgagaaagttacttacatgccctccttgagtactgtgtattcaaggaaaaataaagttgatttaagtccaatttatcatgttaatggtttcaaaatgtctatctatgctttgtcaattgttttctttaaggaaaaaaaatagtagcctcactagctgtctcactagtagtaaatggtcattactccttacacatgtagatatcgatcaaactggta

SEQ ID NO: 36302 - DNA, 247 bp, Glycine max
  Clone ID: PAT_MRT3847_132784C.1
gccaaacaaacgctaattgaatcaatactcttattatataacattttatcattaatcctgcgtacggagccaaacattactcacatacataaatcgattcacactggatatgctccatgccaaccatcaggagcaccaatatccaattgtcgcgcatcttagcaacacggacaatcccggtcaagctgattctatcaccctctttttgctcgcggagaacatcatgcttgtggttatagactataac

SEQ ID NO: 36303 - DNA, 189 bp, Glycine max
  Clone ID: PAT_MRT3847_132785C.1
aaaaaaaaaattttttaatttttaaaaaaaaaaaaaaaaaaaaaaaaaaagaaaaaaggagtaataaagtacatatacaaaagattaaggacagttagtatgaacatatatataatgcaatgtaatgcatagtttgattgaagaggcgccctttatataatgtgatattgcctaaaaaattattcgtat

SEQ ID NO: 36304 - DNA, 569 bp, Glycine max
  Clone ID: PAT_MRT3847_132786C.1
ccacgcgtccgaaaagcaagctcatgaggagtgtggaggcacactttggagaggcactgaatccattggcctattgtattatgactcgatcgctctggtacgctagatcttatgactactttgatcaatggtgctttcgcttggatgtgcctaatccaagagaacattgtacgattgaggatatgcaccgcacgttggctttcatattcttccattgcctacatatgatgccagacactctattaactaccactgtttattcttgcctgatacacggatgctcatgtactttgcgtcccatgaacattgggcactactgcttcgtcgctacttaatataacaggccagcgatatctgggtgaaacccattaagccacaatttgacttggagaccgtatggcaaaatgaacatgtaatgacgacccttacagtgctccggatgatgactcatgtctctgtcacagactgaaacgctattacaccctattagatccaagccaatcattatggaacgccctcatggcttaagcatctacaccgtcggccactgataccatacccataaccgc

SEQ ID NO: 36305 - DNA, 454 bp, Glycine max
  Clone ID: PAT_MRT3847_132787C.1
aattcggctcgagcttctactaccctgccattgccgcctcctttctcactaggtttcccttttttgtgtttagaattcaaatttgcctttgctcccatcctacttgtctcccattttttctctatacagctagccttcgtacaagcactgttccctagccttcccccacttgctctcttgattggaccattggataatatttttcgagtattgcaccaaaggcatatcatgatccatacattgcaaagctctgtgatgttgttgtcgttggcctccaccgaacaccttcggcgaatggtccccatcgtcgagccccttggcccatttaaattggttcgatctaacttccattccgatgtcgctatgctttgacgatttgtcctccaaaacattattatttctccaacatctacaactacaaaaatttatctatgtcgatgtttcctccataatc

SEQ ID NO: 36306 - DNA, 409 bp, Glycine max
  Clone ID: PAT_MRT3847_132788C.1
ccggaatttccgggtcgacccacgccttcggacagaagaatgggttcgaaggcgagagaagaaaggttcaccggcagacattctggtaaccctaggagacttcaccagctaagagaactgtgacaagtttctttacccttcgcggctgtttccttcgagtggaactccgaatggcccaaccttagggacccactcctctcgcctcctcaaaaccgttcctctcccgtttcagctcctcgtacccgcttgctgtatctcccgcctgtccgagcacctctactacgccggccacaccgctatcaccatcatctactactacaaggtcgtcatttacaacatgctccagcctaacgccctcgaccgtaccctcatgcgatggcgcatgatggacatacccgccatcgcatct

SEQ ID NO: 36307 - DNA, 1203 bp, Glycine max
  unsure (1)..(1203): unsure at all n locations
  Clone ID: PAT_MRT3847_132789C.1
tacggctgcgagaagacgacagaagggggtagttcaacctccagcaacagcaagcattctcaaaccttcttttgctcctcctctggtttgtgacttcatgttggtatcattggtttggccatagttgttccctggcctggccaggccactgactcttgagtcttgagccagttcctttttcgggttgttgaacattccggattttaaagcattgccttctaccagtcatattcttgtcacttctaaaaaatggaaaactcagatacaacactgacaagttcatccctgcctccaccacctccagtatctgcggaggagccagagcccaagaagttgaagatgtccaccacaacttctgatgatgaagaaacaggcaccaagaaaagatacaagcgccgtaaggttgctattttctttgcttactgtggtgttggctatcagggtatgcagaaaaaccctggtgcaaagaccattgaaggtgacctagaagaagccttgtatgtgtctggagctgttcctgaacaggatcgtggagttcctaaacgatatgactgggctcgctcagctagaactgataaaggtgttagtgctgttggtcaggttgtctcaggccggttctatattgatccacctggccttgttgaccgccttaattcaaacctcccctctcagataaggatctttggttacaaacgtgtgacagcttcttttaatgccaaaaagttttgcgaccggaggaggtatgtctatctcattcccgtgtttgctcttgatccaagctgtcatcgtgatagagagactgtcatggctagtttgggatctggaaatgagcttgttaagtgtttggagtgttctgagaggggccgaaaggtggtaggattagttggtaatcgtaagcagaatctggaactagaagctgtggatgttgaggctggtatttcatcaaacagagactctggagttacagaaaatgtggaggtttctttgagcaaaggtgatgataatcatttaaatgaggaatctgggaatgataacaagggtggcatgaactgtaaaactggccttgaaactgtgattcctgttcaagaagaaggtactcctttgaatggtgaatctgtgaataattcagacattcttgaggaagaaaaattaatggagaggataagccaaccaatggaantaggttctgttatggtgagaagg

SEQ ID NO: 36308 - DNA, 320 bp, Glycine max
  unsure (1)..(320): unsure at all n locations
  Clone ID: PAT_MRT3847_13278C.1
gacttttcaatacattttaaccactggtctagcaatattagagaagggtttttgtattaaaaaagttaagtcatataggctagtttatggcagggagtagcctgtttggttcctctctagactctattaagtctgatttggaaccaattgcacggccatccaaaactatgtatttcagtacctctggtactcagtttcatatatataaatatctatctttgctgaanaaaaaaaaaaaaaaaaaaaaaaaaagcgcgggctctctagaagacacaattttacacacgcgcgcgtgagacgatatatcttttatattgtgt

SEQ ID NO: 36309 - DNA, 141 bp, Glycine max
  Clone ID: PAT_MRT3847_132790C.1
gttaaatttgaatcttatttcatcttttgtggatttatgtcatgtctaatcgatatctatatttgctttaatattattcaatatggactgttgcaacttgcaacttattttttcttggaacatgacagttttctttgcccg

SEQ ID NO: 36310 - DNA, 249 bp, Glycine max
  Clone ID: PAT_MRT3847_132791C.1
atcagcaccttcattcactcatgggggtcgggattccattcacattcatgttgtgaactccttcatctattcatttcctttcacaaaccccaaccggaaaccccccttcttatatagcggttatatcggcgccaaccggagctcctgatccggttgggcgacccgaattttaacctgcgaaccaacgcatcctcaacggactttattttcatcaaagccaagtcctttcccaaacacacccttacacca

SEQ ID NO: 36311 - DNA, 225 bp, Glycine max
  unsure (1)..(225): unsure at all n locations
  Clone ID: PAT_MRT3847_132792C.1
aatanagcanaaacagttgagcattttcttatgcaaaccacatcctcgtnccattgtttaatgttagcacttaccctgtcttccttgnnnttttanataatttnntnnagctcccttaaatgtacttggccaacactacataanagagcttagacntnnagctcctncagggtcgttgtganncttnantancatatgttgtgtnnctctancatgatangagtt

SEQ ID NO: 36312 - DNA, 693 bp, Glycine max
  Clone ID: PAT_MRT3847_132793C.1
agaatgattggatggatgcccgggcattgagcaggaaggacagacgaaaaaatacaatgtgcaatttatgaaaatagaatcccgcaagactttgtagctagcagaaatgaagaagcaattagcatcaaggcgtttgctgatgtgggttatggtacatttgagcatttcaggcgtgttgtccaagtccaaccacaccacaacttctgtagtgtgcgatggctccgtagaggactgcctcaacgttcaccacttggactcacagcttcccaccatctccagcacccacttccgcagaatccttgccggagtcatcaatcctgtgactgcacttacgaataatcccgccacttccgccggctgtccgagttcccacggttatgtcaagtgtggggccgcaactggttcgggtcaagacagccgatgtgctgataaaaatgcctactataagccttgccattatattcaataatatatgatcgccacaagctatttatgtattatttctaatgcttttgcttcctccctccctctatccactgttgttgtcctatgtctctattattgtgcatttttccgttattgcaataacaataactccgtcccctgaactggacaaattccggggaatagattctgaacatgtatatgtatgcttttctgctttatatttactgatggattattggattctaa

SEQ ID NO: 36313 - DNA, 352 bp, Glycine max
  Clone ID: PAT_MRT3847_132794C.1
aacgtacgacataacatgttagaattttgccagcgatagggcagaaaccgggataaggtggtttagcaggcgggatacgatatgctaagagacactgacgtgcattacaaaattggataatgatgctggatgtagattaaccagactggattgtctatataccaggcgctatcatgtgatagctcgatagggcgcgcgccagttgatagtgtgaacgtaaatggagatttgtcttcgtgcgtgaattgcaagagctggattaatgaatatagctaaggctgtagagatgtgagttgcgtatagggcgctctttcgaagcttggctgagtgaactaatgcgctggtgagttcg

SEQ ID NO: 36314 - DNA, 716 bp, Glycine max
  unsure (1)..(716): unsure at all n locations
  Clone ID: PAT_MRT3847_132795C.1
gtcgtgcgctctcacgagtttgtataaggagagaagcgggcatgaagaagcaattagcatcaaggcgtttcctgatgtgggttatggtacatttgagcatttcaggcgtgttgtccaagtccaaccacaccacaacttctctgcngtgntatgggggggagaagactgcctccacgttcaccacttgaactaacagcttcccaccatctccagctcccacttccgcagaatcctcgctggaggatcatgctcccaaaataaatttgcgactggatgtacacctgatgcctctcttgccgccggccctatgggtctcaccggtcgttatgttgctaatggggtcagacctgattcgggtccacccagccgatgtgctaatacatatcccgaggtcgtccccagggattgctttaatcctcattaaaataagctatgatcgccacaagctatttatgtattatttctaatgcttttgcttcctccctccctctatccactgttgttgtccaatgtctctattattgtgcatttttccgttattgcaacaataacatccgtcccctgaactggacaaattccggggaagagattctgaacgtgtatatcattatgtgtatgcttttcttgtaaacgtgtatatgtatgcttttctgctttctattcattgaagaagtctgtaaaagtaaaaactatatatcgatcctctctcttattgt

SEQ ID NO: 36315 - DNA, 1497 bp, Glycine max
  Clone ID: PAT_MRT3847_132796C.1
tacggctgcgagaagacgacagaagggtacggctgcgagaagacgacagaagggggctggtcgcaactgcactttcacttttgctttgagatggcaaagtcgaagaatcacacagcacacaatcagtcctacaaggcccacaaaaacggcatcaagaaacccaagaggcatcgccacacttccaccaaagggatggatcccaagtttctgaggaatcagaggtacgcgaggaagcacaacaagaagagtggtgaaacagccaccgaggaagagtgaaatggcactttctaacggaaccattagggtttttttatgctcatttttttggttaaactttgtttgaaatcaacgttcagcagtataattaatttgtttacagagaatgcagtacttttatagcaattttcctggtttctactgaaaacccttcaattactttttatcatcaatggaatgttaatgtgttttgtgttttttagtcctctttaaaaagaaaagaaactcacagctattgaatttcacttcacttcacttgcatgccaaatgaaaacaacctcttcccagaatcttgtcggtatttaactccctcgatttcacaacacccataacaatgagagtttcaacagagacagagccggagactaaaaagataaaacgcattcgcggcggcggggactcgagcaagcaccctttgtaccgcggcgtgcggatgcggaactgggggaagtgggtgtcggaaatccgcgagccgaggaagaaatcgcggatatggctaggcacattccccacgccggaaatggcggcgagagcgcacgacgtcgccgctctcagcatcaaaggccccgccgccattctcaacttccctcacttggccaactcgctcccccgcccggcttcgctggcgccgcgcgacgttcaagccgcggcggcgaaggcggcgcacatggacccttcctccctctcctccttggtctccgcaatggacttgtcctctgcctctgacgagttgagccaaatcatagagcttccttctttggaaagcaccgatgatggctctgttgacttaaagaaggagtttgtttttgttgattcccttgatgcttggatgtatcagccaccctttggttttgacaccgaacaagacactggtttcgagggtttgatgtggaattactaggttcgatccaagtttctattctatgtcttgtgtttgtataaatttatatcgatctcttttatgttttggtttgtgtgtgtctataagcagtaagcagccacttgtggtttttctttcgggggctgccagtgctactgatcactctcgtattcatcatcatgtctctgtgtctttttcttaattcctctgattttaattgtaaatggctagatgaataaagtaagaggagaaattttctgtaacttgttttggtacaaaatgtttttactcttcttaagattgcgtaatccatgaaatggagtttgagatgggaagtacta

SEQ ID NO: 36316 - DNA, 782 bp, Glycine max
  Clone ID: PAT_MRT3847_132797C.1
ctgtgcgtacgtcggcgcgccagcgacagaaggggggggtgcaattgtgtgaggaaatatctctcacgagtttgtataaggagagaagcggacatgaagaagcaattagcatcaaggcgtttgctgatgtgggttatggtacatttgagcatttcaggagtgttgtccaagtccaaccacaccacaactacaacttctctgctgtgcgatggctccgtagaggactgcctcaacgttcaccacttggactcacagcttcccaccatctccagcacccacttccgcagaatcctcgctggagaaaaatgctgcagaggtaacactcagactgcaggtacaggtgatcccaataatcccaacttctgttcgaccgcaaccggttatcgtaagtgtggggccgcaactgatcctggtcaacccaaccgatgtgctgatccaaatgccttccacaggggttgccatatttaagctatttatgtattatttctaatgcttttgcttcctccctccctctatcaactgttgttgtccaatgtctctattattgtgcatttttccgatattgcaataacaataactccgtcccctgaactggacaaattccggggaagagattctgaacgtgtatatcagtatatgtatgcttttcttgtaaacgtgtatatgtatgcttttctgctttatattcattgaagtaaaagtaaaactatatatcgatcctctcttttttccaaaaaaaaaaaaaaaaaaaaaaaaaaaaagcgcccgctctagaggatcca

SEQ ID NO: 36317 - DNA, 1530 bp, Glycine max
  Clone ID: PAT_MRT3847_132798C.1
cgccgggtcgaaaggtttcgtggcagtggcgagtgaagaagctatgcctgatgagtgagtcatttttttctctttcacttctgctttgagatggcaaagtcgaagaatcacacagcacacaatcagtcctaccaggcctgcaccttcaccttcccttcgagatggcaaagtctaagaatcacacagcgcacaatcagtcctacaaggcccacaaaaacggcatcaagaaacccaagaggcatcgccacacttccaccaaagggatggatcccaagtttctgaggaatcagaggtacgcgaggaagcacaacaagaagagcggcgaaattgccactgaggaagagtgaagtggcactttctaacggaaccattagggtttttttttaagctcggttttttttttgttttattttgtttttaatggttgactttgtttgaaatcaacgttcagtagtataattaaatttgttttcagagaatgcagtgctcttatagcaattattttcctggtttctgctgaagacccttgaattatttatttatcagtgaaatgaatgttaaggtgttttgtgtttcttagtcaagagaccaaaaagaaaagaaactcacagctattgaatttcacttcacttcacttgcatgccaaatgaaaacaacctcttcccagaatcttgtcggtatttaactccctcgatttcacaacaccaataacaatgagagtttcaacagagacagagccggagactaaaaagataaaacgcattcgcggcggcggggactcgagcaagcaccctttgtaccgcggcgtgcggatgcggaactgggggaagtgggtgtcggaaatccgcgagccgaggaagaaatcgcggatatggctaggcacattccccacgccggaaatggcggcgagagcgcacgacgtcgccgctctcagcatcaaaggccccgccgccattctcaacttccctcacttggccaactcgctcccccgcccggcttcgctggcgccgcgcgacgttcaagctgcggcggcgaaggcggcgcacatggacccttcctccctctcctccttggtctccgcaatggacttgtcctctgcctctgacgagttgagccaaatcatagagcttccttctttggaaagcaccgatgatggctctgttgacttaaagaaggagtttgtttttgttgattcccttgatgcttggatgtatcagccaccctttggttttgacaccgaacaagacactggtttcgagggtttgatgtggaattactaggttcgatccaagtttctattctatgtcttatgttgtataaattaatatcgatctcttttatgttttgctttgcgtgtgtgtctataagcagtaagcagccacttgttgtttttctttcgggggctgcccgtgccactcgatcgctgtcgtattcatcatcgagtctatctgtcgtctgtcttttttcctgattcctctgtttttaattgtaaatggctagatgaataaagtaagaggagaaattttcttt

SEQ ID NO: 36318 - DNA, 530 bp, Glycine max
  Clone ID: PAT_MRT3847_132799C.1
tgctaatcctcccctatttaagtttgttaataaagttgttccatcgatggagctgacggctgctgatgctccaccacaggactctaccaagtcaggttcactatttggtttggagaaggttccattgtcaaaagagccagggactgatgctccttttgttaattctgggttcaacaaaaatgttggcaatgtttcacaagtaccagttactttctcttcatctgttggtgaatctgctgtgtttaaatttggctcttcttctgactcaaggttcttcaaggataggtgccatgattcttatagttaccctcaggatgatccaacaagtacttttacgtgtcccgctggctctaactacaaggtcgtcttctgtccattgggagaacctcatgttactcttcatatgcctgctagtaccgcccaccagtaaataaatgtccttccttgggcctacgaggaaatgaagtttttgctacaacttcatttatatatgatcataatcaataaactcggactttgcttctgttcaa

SEQ ID NO: 36319 - DNA, 430 bp, Glycine max
  Clone ID: PAT_MRT3847_13279C.1
ccacgcgtccggttgctattcgttgatttgtataattattctttaattggggagcgaagcaaggcgttatttacaacgtcgagatttcaaaaaaaaaaaaaaacaaaaaaaaaaaaaaaaaaaaaaaaaaaaaaaaaaaaaaaaaaaaaaaaaaaaaaaaaaaaaaaaaaaaaaaaaaaaaaaaaaaggggggggggggggaggggataaaaattttaataacgcaaaattaaaaaaataaaaggttgttttatagtgtaactataattgaaatatcactggcgggtggttaaacaaagttgattattggtaaaaaccctgttgtttcaaaactaaatggcgtttgaaaaaaatacccttttcgggatttgccttaatagcgaagaggcaagttcggatgggatttgccaacatttggccactttaaatg

SEQ ID NO: 36320 - DNA, 711 bp, Glycine max
  unsure (1)..(711): unsure at all n locations
  Clone ID: PAT_MRT3847_1327C.1
cgtatgattaacctcctttaagaccatgatgttgattcacatgcagacagtggacgtatggattttttatgtgctttgttatgggtaactgggtacacagttcagctttcaaacaagccccttcttgatgtccgtctctcaaatgaacacacaaaggcatgggtgagagcttcaacctggattccaatatttgatgttcataataaactagattttggaaccattccaagaaaagtcaggagctttgttatgggtattaaaaaaatccttgctgactctttcattattaattcttatgatagtctttctaaatttgttaaataaattgatacgtttctttagaaatctacaacatatgacttgatgttgtgttgaaaaggaggctggtggagtggcaagcctacactgtcatatgacaagtttcacaaactattgggtaaaacattacaacattaaacccacattctaagatgatattaaagtctatcctagatctattaacaggtcacctaccatattatctacacactaagcccgaaagtactgggcgtgagggaatgtattgngaaaaatccaagtcccacatcggctagagtagcttttggggttgagttaggcccaaactcttattataagtggaggacaaccctcatcctatgagttagcttttggggttgagttaggcccaaactcatattataagataatatc

SEQ ID NO: 36321 - DNA, 1956 bp, Glycine max
  unsure (1)..(1956): unsure at all n locations
  Clone ID: PAT_MRT3847_132800C.1
gggaaagaaacaacagtctccactgctgtggctgataaaactatctctgctgttgaaacagctgtactggaaaagcccccaggttcatctgtgctaatgccatccaaaagttttacaatagatggtaaacctcaagttaggacagctgattggtccaaagttgaaaagaaggttgatgtaccaacctctataacttcatccgtctctgatcctatttttaagccaattacggcagcttctaacacaagtttaggctttaaccaatctactacaccaaatggatcagttgctaatcctcccctatttaactttgggaataaagttgttccatcgatggagctgacggctgctgatgctccaccacaggactctaccaagtcaggttcactattggctttggagaaggttccattgtcaaaagagccagggactgatgctccttttgttaattctgggttcaacaaaaatgttggcaatgtttcacaagtaccagttactttctcttcatctgttggtgaatctgctgtgtttaaatttggctcttcttctgactcaaagccgataagctcaatcagctcaactactgttcctggtgcttttgattcaatgccaaaagctcttgattcagacaatgctggtgctaagactaatataatagctggtttctctgctcggttatctgaaccagctgtttcttctgtggcatcgatgccatcgttgacatcgcctgcaaatgtattctcttatcagccaaatggtttacttggcactgtgctctctgctaacgttggccttacctttggcaacaatacatgctgcaaacttcgagatcgtcaacaattgcccctacacggtgtgggccgcggcgagtccgggtggaggccggcgtctggaccgtggccaaacgtggaacctctgggtgaacccgggcactgccatggcccgtatatggggccgcaccgggtgcaactttgatggcagcggccgcggccgctgccaaacgggagactgcacgggcggcctcaattgccaaggctggggggtccctcccaacacacttgcggaattcgcgttgaaccaatttggcaaccaggatttctacgacatctctttggtggacgggttcaacattccgatggacttctaccctctaaacggtgggtgtcacaaaatcagttgcagcgctgatatcaatgggcagtgcccggggccattaagggcacctgggggatgcaacaacccctgcactgtgtttaagacgaatgagtattgctgcaccaatgggcaaggaagctgtgggcccacaaactactcaaggttcttcaaggataggtgccatgattcttatagttaccctcaggatgatccaacaagtacttcctcatgttactcttttcaagccctacattttcctctccattcccccctctgacaaacaattttacgggtcagaatatattcagtagctcatctcttgcagcaagcaacagcagtgttagtgcatatgtagcctccactagcactgacatgacaactagcacccctgctgtagttgctgccagcaatagcagttcctccacccaagtctcatcttcatctcccacaacttcatttttcaaatttggatctaccccttcagcaccaacaagtttacctgtgtcatcttctggctcagaaccactggaaaacaagagtggcacagggattgtcatgtttggaagctcttctgctgcaattggaagcacagggagtgacatttttgggtttagtaccccagcaatgaccggaaatagccagtctctgggttctgtctttggcactacaagtgggtctgtccctggtactcangtatcttctggtactagtggtttttccacttcatctgagagtcagtcggtggcatttggttcatctgcatcagcctcattgtttgggttgactgggagcacaactttt

SEQ ID NO: 36322 - DNA, 346 bp, Glycine max
  Clone ID: PAT_MRT3847_132801C.1
accgggcgccctccatgcgttctattaaccgaaggttgtattcattttagccctggagaaaacagtatgaacgcggccgggggttaccaaaaatttttggtgggtggcttacacccttagctatatggaaagctagaggctcaaaccaccacccttacaacttttagacgaacaagggggtgtaaaaaaagttaccagcaggggcctatttcgtgtaccttcttcgatgcataaaaaacaaaggaggacccgcgatttccagaacccaacctgcaggccggccacatgcgactattagtgcttttcaatagagctcgctaaaatcaaggaaatgaactgtggcctt

SEQ ID NO: 36323 - DNA, 494 bp, Glycine max
  Clone ID: PAT_MRT3847_132802C.1
cggtacggctgcaggaggccaccaaaggggtccatcgtctctgattcttcttctggaccttcatattatgataatgaatactattcagagaatcattctccttgcctttggggtacaaccaaaaattcccataacataatcaagaaggtcaaagaatatggcagaactcaacatccttcacctcttgtatgacacctgcaactctccttttttcaactgtgccaaggagagtcacacagttaatgtcctgacataatatgtgtgtgtctatacatcctccttagcagcaaaaaaaattaatttttggaaagaaaaaaaagtgctaatggatttgttctattgttgttgaacagaagcaagacattttctcaaggaatggagcaactgagagtgcattgaatttttctcaatgtgtatctgcaacaagaataaaggtacaactcaatttctattgctaacttctttattaaatcgtttgataatgaaccacccct

SEQ ID NO: 36324 - DNA, 720 bp, Glycine max
  Clone ID: PAT_MRT3847_132803C.1
tttgcacttggttgtgcgacttcgtggtggcatgcaaatcttcgtgaagactttgacgggaaagaccataactttggaggttgaaagctctgacaccattgataatgtgaaggcaaagatacaggacaaggaaggtattccaccagaccagcagaggcttatttttgcagggaagcagctggaagatgggcgtaccctggctgattataatatccagaaggaatccactctgcatttggtgttgaggcttcgtggtggtatgcaaatatttgtgaagactctgacagggaagaccgtaaccttggaggtggaaagctctgataccattgataatgtgaaagcaaagattcaggacaaggagggtattccaccagatcagcagaggcttatttttgctgggaagcaattggaagatggtcgtaccttggcggattacaatattcagaaggaatccaccctgcatcttgtcctccgccttcgtggtggtttctgagtctgtctgttatgtccaatattagttgaattctctgttgttatgtccagtgtatgttgaactcgttggttgcagctgttatttaggtgctgctttaatgtttttagttttaaggctatgtctgtgacatagcttgctatgcacggtctcgtgcaaaagaataaaaaaccattatcatctcacaattactttttattttattaaaattactacgaatagtttctgat

SEQ ID NO: 36325 - DNA, 475 bp, Glycine max
  unsure (1)..(475): unsure at all n locations
  Clone ID: PAT_MRT3847_132804C.1
actgtagagactctacgtgcctgcacgcctactctagctgatcctctcgctgaattacaatntgccatattacagcagtagggaggcggagatgtgctctatgaattgcatccattcgtcgacccattaggactatcctgactccaaaggaaatgacatcggagttcctatgagcttatcagtttcacatctgcaaatgattaaggagacgaaggtgttcatatatgaatagaaattatttgatatgttattctgcctatcctgcaaccatagaagtgacatcggaattcctacatgaagaccattcccacagctcttatagataaagaggaaatagtgttcgtatctcaattggagtgatttgggggccatattatgcctatcctagatctcgaggaagtaaaacactgaatgcctgctaaggtgccgagctctgattcactatagtgagtcgatttaaaggcggagtactgtg

SEQ ID NO: 36326 - DNA, 311 bp, Glycine max
  Clone ID: PAT_MRT3847_132805C.1
gtgagtcgtataaacatcatctctggtcacaggcatccgtggtagcggaagaactcaatcctgtcgaattcccttgggcttttctatcttcgatctcatgaattcgtttgtaccactctcataacatggcggtgttcttaactagatgcctctccgttgagggtttctctagctatggtttgtattagagtgtctgaagcggaagaaatataaaagcttgagagcttttgcccctctgtgtgaaaaatgtgtggaagtggagagagaggtccacgaataatggatctcaagagatcataatttcaactact

SEQ ID NO: 36327 - DNA, 1228 bp, Glycine max
  Clone ID: PAT_MRT3847_132806C.1
gttctgccacccaaacccagaaagaatagaaccacctccagagaaaaatattcaaagatgtccagcgttaaggagttagttgaatctaagtgtctgagttctgttccctccaactacatttgccttgaaaatcccgaagattctatattgaattatgaaacagataatattccaaccattgatttttcccaactcacctcttctaatcccagtgtacgctccaaggcaatcaaacaactaggagatgcttgccgcgattggggtttctttatgctaatcaatcacggtgtgtcggagatactaagggatgaggtgattaggacaagccagggcttttttgatctgactgagaaagaaaaaatggagcacgcaggaaggaacctatttgatccaataagatatgggacaagcttcaatgtcacggtggacaagacccttttctggagagattatctcaaatgtcatgttcaccctcactttaatgctccttccaagcctcctggttttagccaaactttagaggaatacattaccaagggcagggaactggttgaagagttgctagaaggaatatctctaagcttagggcttgaagaaaacttcatacataaaaggatgaatctagacttgggatcccagttgctggttatcaactgttacccaccatgtcctaaccctgagcttgttatgggccttcctgcacacacagaccatgggcttctgaccctcctaatgcaaaacgagcttggagggcttcaaattcaacacaatggcaagtggattcctgtccaccccttacccaactcctttctcatcaacactggggatcacatggagatactgaccaatgggaaatacaagagtgttgttcatcgagctgtagcgaacacgaaagccactaggatttccgttggtacagcacacggacccaagcttgacaccattgtggggcccgcaccagagcttgttggcgatgataatactgcttcataccgtgccatcaaatacagtgattacatcgagcttcagcaaaaccatgaactcgacggaaagtcgtgcttggatcgtattcgcatttgaatcaaattaattaagctccatgcatttcttgtatctgaattctgaaccatgcttgtgtttcatatgtaatttaatttcagcttgaatattgatgtacttggaacgtaatttccgcatgtgtaattgaaaatttttaaatgcatgcccc

SEQ ID NO: 36328 - DNA, 390 bp, Glycine max
  Clone ID: PAT_MRT3847_132807C.1
cacaaaaaaaggccaggatccctttaagccggacaggattttaacaattcattattttcaaatcttttcaaaaaaaagggaatgggaaaaaaaatctatattgattaaacagcggcctacaatcggaaagtagggccagtaggttaaaaggacatccaaaaataggggaggggccatgggttattcttcatggaaccacaaaggctgaaacaaattcagttttcggcagccaatccaacacccatttcgtgggaccaattggctccagggcaccagctttggcatgaaataatcaaccacccagggaatcttcggccccactaaacggaaagtggcccggggggggggcccctctatgtgggccttggagcacctcttccttttctaacc

SEQ ID NO: 36329 - DNA, 263 bp, Glycine max
  Clone ID: PAT_MRT3847_132808C.1
gtggaaccgcgctgatcgtatacttatataccatctactaaaacatagtgcgaactggaaatatatagtaaggaaaactggtgggttgttgagaagtgtggaagatcacctcaacacattataaacagtgctgggtaaactaacaaaggcgtatgcgctgcaagcaaatggtgggaccgcacagatcagtgtatacctcccatactatctgtcacctgtactcactcaaccgattactgatgaaccatactgctatggacggg

SEQ ID NO: 36330 - DNA, 926 bp, Glycine max
  Clone ID: PAT_MRT3847_132809C.1
tccggtaaattccatttgtcagggatctgcggcacacataattaagattgcaatgttaacaattcactctgcaatcgtcactggatttgatactccacattccagttcttcactaccaaccaagtctcacatgcttaaagatcgctgccggattctgttgcagggacacgatgaattaatgttggaagttgatccttctgtgataaaagaagcagccctactattgcagacaagcatggagaatgcggtctcacttcttgttcctttgcatgtcaaacttaaggttggaagaacatggggatctttggagccatatacatccgataaattcaacaatgccactcttgtggctgaatcctgaagcacagaggttatttttatgacccaaggataaagtatttgatgatgttgaggatgcattctccataattgattcggaggtttggtgtggtggggaattatccgaatgcccaagggaagaattatgacgaagaggcttacggtgtatagtatctggagtcctcgctgagtaatagacaaaagggtaatgttttgtgtacacccatatgctgaaaaagaaatagaagatagcgaagtgatagatgtcacaagtaatgtgacacgagaagaaaacgatccaggcagtgtgtcaaatgagtgtttgtaatattgacgtgtccatgtcattcaaaataaaatgagtttcagtgcctagccactgatagcactgctatttttcattaaatccttttttatgataggaatacaaatttttttagggatctgtatatactcaagtatctggctgtagggttgagttggaaagaaaaatgaacatgatcttctctccccattgtatcattcaaagctaatgtaaagcgaattcattttacatttgattagtgatttattgaattcccaatctc

SEQ ID NO: 36331 - DNA, 488 bp, Glycine max
  unsure (1)..(488): unsure at all n locations
  Clone ID: PAT_MRT3847_13280C.1
ggccgggccgggnacctcaccggagtcgcagaagaagaaaaaggcgatcatagtttcacttcggacttatccaggttagggattcggtgctctaccctatctttcacgcatccaaaccttacatttacgatccggcctgagcaatctaggttggtacaacctttggtcctatggagccaggatttatgtctgagttagacgataaagattcctactggcttggatacttctgctgatgtcactgctgaggacgcgtgggccgaggctgaggagcatgagcatattcgtgcaccgctgccacctgatagggagagcctgacaaccggtcaggcaatgacacaggaatacggctgtaacaagatactcaccgacgtcaagacagagctctgtcgccatcgccccccgggtctcgtacccttgacctacgaccggtccacccacccacccccgcgccccccagaacccaacccctccaccctattcccccc

SEQ ID NO: 36332 - DNA, 406 bp, Glycine max
  Clone ID: PAT_MRT3847_132810C.1
gaggatacctgatgacactctgactgggaagggcgctatcggcgtgtatatgcttgaatgagccgacatgcctcgttgagacgtggataaactatcttcgatacatgcctgaactgggtggtgaatcactggcaggcatgagagcaaccaggagaactgccatcatgtattagccattgtaaatgaatgcgacagtgatggcagcagtggcttggagcatcatgggagcaagctataccgtgagaacagtgttggattagagccatgcctgtggcttgctgattagctaagcatgcatgaatggtgtaccctagaaggcgagagatcagtgtacctgagcattactcgcttactgtctgacccgagaatcacggagcacggtgatttccgcgtgcatcattatgga

SEQ ID NO: 36333 - DNA, 122 bp, Glycine max
  unsure (1)..(122): unsure at all n locations
  Clone ID: PAT_MRT3847_132811C.1
aacngattncganatgcatggctatggnagnttcctnnaccctctnacagttaactgtnggccggcagctggctttgatctancctcttgcttcnngcctggcgaacatgtcggggaggccc

SEQ ID NO: 36334 - DNA, 1572 bp, Glycine max
  Clone ID: PAT_MRT3847_132812C.1
tggaacccacgccgtcccgcccacgccttcggcccacccttccggggacccttggccggacacctggaaggaaaaaatgttggatatacctgtaaaactttatgggaagacaactggaagaatcagaaacatgttggaaaaattaaaattttagtagattaaaactgttattttatcatctttgatgaatgcaacaaattttggcccattcgctagaggacataatttattttgccctttatttcttaaatatctatttacttaattgacggatgatgaatgcatggcatgagatgtatacaacttctaatttactctttctattttcctttcctttgatgaatagaaacttgaatatactgacttgcatcaaacccaggtactctaaattgctcgattctcggttttttaactttggcacattctccttttgttcatcaatgtgtgttgtaaattgttcatttccttcagaggtctttggtagagatgatgtgcagtttctttgttgcatcttggactggggttgttaagtatcatggacccaggcctagcaggagaccaaagcaggtttttgtagccaaccatacttccatgattgatttcattatcttagaacagatgactgcttttgctgttattatgcagaagcatcctggatgggttggtaagcatacagaactgtcatctgtgtatgaaatatgatacacaaaacttgcgtcttcatcatccataacaagctttatgttctaacagaaaaacttagttattgtgcaggattattgcagagtaccattttggagagtctaggatgcatctggttcaaccgtacagaggcaaaggatcgggaaatagtagcaaggaaattgagggatcatgtccagggagctgataacaacccccttctcatatttcctgaaggaacttgtgtaaataatcactatacagtcatgttcaagaagggtgcatttgaacttggctgcacagtttgcccagttgcaatcaagtacaataagatttttgtagatgctttttggaatagtcgaaagcaatcattcactatgcatctgttgcagctaatgacgtcttgggcagttgtttgtgatgtttggtacttggagccacaaaatctgaagccaggagagacgcctattgagttcgcagagagggtgagagacataatctcagttcgtgctggccttaaaaaggttccttgggatggatatctgaagtattctcgtcctagcccaaagcatagagaaaggaagcaacagaactttgctgagtcagtgctgcggcgatgggaggaaaagtgatgtgtacctttatgtggtgttgttcttaattattcttagtaatgccattcttcgacccctttttttcttttgttttgtcattgctactatttatttttacacttttattaagatatgcatatatcactcagtaacaaagttgtccagtaattttttccatggatggatgttgtcttgtacaaactgttgagaactagatctttaattaaggatgaaatttatgctaatgttaaataaattagtcaagttctattaagaa

SEQ ID NO: 36335 - DNA, 483 bp, Glycine max
  Clone ID: PAT_MRT3847_132813C.1
aacctttgggctgattgatgtgcttgatggtcgtgagaagatgatagaagggcatcgtcgtagaagatgatagaaggggaactaaggaactgggaactagagttactgatgatcgtaacggctcgtgagaagcgcgagaagaaaccactgaaggcgacagcattagataagcggaaagaaggggttagtaacatcattgagggcggcggttgtaagactaatgagaataagtcctctcttaagaaaaatagacggattttccatggaaatatcaagcgtattacccgtaagtagtaagcgtattagaacgtcaagcatcgttatattcgcgtccatctcaaaggagcccgcgtaacgcgcggtaagtaagcctccgacattaagccccataagtaaagtaacgcgcaacggacatctgcgccgcaccgcgcgttgcgctcctccccagacgtacggcaataccggtccctcccttacccgctc

SEQ ID NO: 36336 - DNA, 275 bp, Glycine max
  Clone ID: PAT_MRT3847_132814C.1
cttccttctcatcattctcatattattgtcgccacttcgagctcaatcagcctcgcgccctcgctcttcccttcctggtggcgacaatgtcggctcctgctaggaataggatgattagagacttcaacaggctgcaacaagatacgtttgccgggatcagcggtgcaccccaccataagcacatcatgtacgaggtctgctggcatatttggtgctgatgagaatccctgggatggaggccgttcattttgattgcccagtttactgaggattat

SEQ ID NO: 36337 - DNA, 286 bp, Glycine max
  Clone ID: PAT_MRT3847_132815C.1
gctctccattggtttctgatagtgtttttgacatttccaatctttttttatccctctcgagtaggataaccaagggataagctacatggcttacctggttcattacatgtttgactcaaatctggggggcatggtctcgaaggttcacaaatatgctagtgggggattcaaagaaatggggggtgttggctctttttgccaacatatgtatgctgatttggctaacatatggtatccaatacagtttggtccgatcatggaggcttccatataatggtgaacattt

SEQ ID NO: 36338 - DNA, 817 bp, Glycine max
  Clone ID: PAT_MRT3847_132816C.1
gccatttcctcagtccagatgagtctaagagcacaatcttcagctcttgtgacattggtgttggtgctgttgctgatcaaaatagagggaaatccgacaccaaaagaagtccatgagaatggcactgatgcctcatcttcatcaacatcattgatggagaaagatgagaaccaaatcattggatgcaggggaagaccactgatatgtagcagaggagagtttccaccaaggtctatatgctgtggagaccgttgtgtggatgtgactagagacagagagaattgtggggtatgtggggttaggtgcacgtttaatcgtcaatgctgcaaccgtttgtgcttaaacacaaatgtgaacattttcaactgtggtaggtgtggaagagtatgcccccttgggaggttatgtgtatttggattgtgtgcctttgagcaagcagtgccaacgccaacgccagtgtcaccattaccgccatcaccgccggtgtcaccatcaccgccagtatcagtatcaccattgtttcctcccgtgcctccagcaaagtcaccacagccactggattaccaacctgaaatgggttaagtactgttgtaatagattgtggatggggtctcatggttacctctcccctgctttgaagttcgtatctttgtcattctaaaataagtatttaagcctttattaaggttttcatgtgcaactgtttgtgtcaagcagatgttggtatgaattgtatgatgttggtttgatactttctatgttagtggcaaaacatgttaattttatatgagaaagaacattataaccgagtaaaaaa

SEQ ID NO: 36339 - DNA, 261 bp, Glycine max
  Clone ID: PAT_MRT3847_132817C.1
gtcttaatttctctctgccttgctcatttacacacctcaccaacctttcactttcagctttagttgaatccctctctctcgtttccaaatggtcagcgttgagattgtgctagtgttgattatgtgatgtgtcacatgtgtgtctctcgcgtcaagttagctgcatctcgtgtttacacatccagctttcttaagcttggcacgatactttgttaagtgaaattaggagtctcacatgttgcacatcatacaccaatcaca

SEQ ID NO: 36340 - DNA, 332 bp, Glycine max
  Clone ID: PAT_MRT3847_132818C.1
ccgtaacggcgtccaaaggggaagcgccaagttcgatcgcccgctcaagccccgcccccgcccctcttccccctctccgggatccgcccttcgccggcccaacgccgccgccagaaacggcgacgccggtgagtcccctccaaaacctagacagacacaaatagagtgtgtagtgtgttttgtagagagagtgtaatgaagctctaactagtaagtatctacgattaggacgccataatgaagctcgctagctccttcgctatttctggaagattcatctctctcatgattatgacctctaattatgagagtttgtcacttttgagagcgac

SEQ ID NO: 36341 - DNA, 582 bp, Glycine max
  Clone ID: PAT_MRT3847_132819C.1
ctttggacaagaagcatggataatgtgctagcctaccctttagctaaaatttaacttttatttaaaagaatgggagcaacaaagatcaaattcttctagatcacatggtcttggaggctttaatataaagttataaatcaactatcccaaacacttaaactattgggtgaaagcccatgaatagtattattctaaccagggcagtgagggcacctaatggaaggtatgcctttctgcccccctgtgtgatttgggtccttcttttacttgaaacctatgttagagattcaaagtgaaagaacaagtttaaattaaaaataaacgagaaaaatagatctatacctttctccaacatgattacaatgtaacctgaaaggtattaaagcttttatcaatgctgaagtttccaatgttgactcagaaacatccaagaatgagtgaggaagagatgtgattgaattacctggacatatactagtttgattttcacagttgatttgcaaaagtcaataggtcttatagaatttgtatagaaactgtgtgtcttagatcatcacacaaaacctttatttataacgaact

SEQ ID NO: 36342 - DNA, 206 bp, Glycine max
  Clone ID: PAT_MRT3847_13281C.1
agatgtcagagactacggaaggtgataacagcattatacaaggggttggggtcaaaaactaaatccatttcttatccttagctttattttttaaaaatacccatcttaaacatatgcgtcagctgtcactgagctgacaataataactgcacctagaaaaacagctatgctgatataatataaacttatattagctacttcgacac

SEQ ID NO: 36343 - DNA, 426 bp, Glycine max
  Clone ID: PAT_MRT3847_132820C.1
tgcacctcgtagctggatcctctaacggccccttttttttagttttgccaacaaaacattggacttgactaccaacaggaccgttacggatgaaccgtgggatcttccaaaagatccgaaaatctgtgccatttggcctcagataacatggcaaaaagtgtataacggagacagaaaactgggaaactgtttttggacccacccagttttttcgcctaaccattgtaacccaccaacatccacaaaatccaggaagaattttgccggtaaaaacttccccctcacatccttgtgccttcatgaggcactgaatctcaatttacaaattttgaaaaagagacccttagcagttcaaaagaatgattacacagctaaaaattgcaagaaggatggtaggggggaatgtatccatgatacagatgaaaa

SEQ ID NO: 36344 - DNA, 1150 bp, Glycine max
  unsure (1)..(1150): unsure at all n locations
  Clone ID: PAT_MRT3847_132821C.1
attcggctcgagcataaataaaggtggtagagagagatgaaaagcgaggaaggtgaagcggaaaaggaggaaaaattgggagaaaagttaaggcgaggggtattggtagggaaaagtaggggcccctttactccagtgccctcttggtcttgggctcacaacaaccatagcagcagcgttctttctctttctgctagaaagctcgccgcggctctctgggaattcaaccactctttcccactctttcaaatgcatcatcatcgttctgctaacaacgctgccgcttgcggcggagtcggcgctgatcccagacttcgccgccaccaccattacatccttcataaacacagggctccggacatctccaactttttggctgatgcttctcccagttcccccgatcagcctgctagcgccagcagtttgaggaggcatgttgcagcacccctgatgcagcatcatcgggcaattgagagaaacaatcatgcactgcaacctttatctcctgcaagttatggtagttccatggagatgacaccctataatcctggagccactcctactagttccttggaatttaagggaaggattggggagccacattatagtctcaaaacatctacagaacttctaaaagtgctaaacagaatatggagcttggaagaacaacatgcttctaacatttcattgataaaagcattaaaatcagagctagatcatgcacgtattcggatcaaagagttgcttcgagaccgacaagcaggtcgacatgagattgatgacctgatgaagcaaattgcagaggataaattggttcggaagaggaaggagcaggatcaactccatgctgccattcaatctgtgagggatgaacttgaggatgagaggaaattaagaaaacgatcagagagcatacacaggaaactagctcgggatctttctgaggtgaagtcctctctgactagtgccataaaggaattgaatcaagagagaacaagaagaaaactattggaggacctatgtgatgaatttgctaggggaataaatgaatacgaacaagaggtgcatactgtcaaacacaagtctgataaggaatgggttcaaggggctgatcatgatcgtttgatcctccacatanccggacgcgtgg

SEQ ID NO: 36345 - DNA, 695 bp, Glycine max
  unsure (1)..(695): unsure at all n locations
  Clone ID: PAT_MRT3847_132822C.1
ccacgcgtccgcacgtgcgtctcgcgtggactcccgccaagtaacgggtcggagactcatcaatcagcgtcactcactcctcgcgcctctttgtgatttatgaatttagattttccttcttccgatcttttttccaaacccttggcgcgaaatcaggaacttagggttagggttccgatggggagcaaggtgagcgaccaccacttatccaccgtccgatccatcgtgggttccgaattctccgacatggacatcatcagagccctccacatggccaaaaacgacgtcactgcggccatcaacatcatcttcgacactcacactgcccccaaattcaagcccacgcgccccaccaatcccccaccagtttctcctccaaaatcgacccctcccactcccaccgtcaacgccaactcaaactacagcgtcggtgaacgacacagcgatgataaccgcgacgattggtggctcgtgtgttgtggtgaaatgacatgtttgtccacgtgtaaagggaggactataagctccggcgagaccgtggttttcaaggtcccggcgaagaaactctccggttcgccctctccggngaagggggttcgggcgggcagcgacttgttcggagatagttccgatctccacggaacaagctggggagattggtagaataccaaacgaatggggctcggngtcttttg

SEQ ID NO: 36346 - DNA, 647 bp, Glycine max
  unsure (1)..(647): unsure at all n locations
  Clone ID: PAT_MRT3847_132823C.1
ccacgcgtccgctcagaaattggtgatcctatttcagctatagccatctcttgcagctttatgattcttccaacacctccaccagtcattgtttttcctggctgttctctgttgcattaaagttatgtgcaaatagtttgtgaaatcattttgagttctcaagctggatttgcttcagagtgcttgtgattgttctactcattcaaccaagttaaatccatcactttagcaagtatggttctaggcatgagaggaaagaacaggagaggagtcacagttcaaattgatttcctcattcacattcaggagattaagccttggcctccttcacaatctctaagatccctgcgatctgtgttgatagaatggaagaatggtgaatgtgcatcaggttctaccaatcttgttgccccttcacttggttcagttataggtgaagggagaattgaatttaatgagtcatttaggcttcatgtaactntgttgagggacatgtctgtgagaggtggtgatgccgatgtgttccaaaagaattgcttggagttcaacttgtacgagccgcggagagataagactgttaaaggccagttgctggcaactgccgtctgggatttggcagaatatgtggcacttaaagagtgcttgag

SEQ ID NO: 36347 - DNA, 137 bp, Glycine max
  unsure (1)..(137): unsure at all n locations
  Clone ID: PAT_MRT3847_132824C.1
nncncgcgtacntgcgcacggaagcgcngantcgggncgcaacntccganccggggaatnagtnccgcgnccngtacntnnaggcgtaccanctntanncncangaggnagttcgtattngnnncttggccgtnntc

SEQ ID NO: 36348 - DNA, 2071 bp, Glycine max
  unsure (1)..(2071): unsure at all n locations
  Clone ID: PAT_MRT3847_132825C.1
cccttgcgtccgaccacatcttcacgtgcctctggggtggctcgaggatccatccattattctcggctcgactttctctacttctttccctttccccaacccctcatacgttactctttaaatacgcaccacatcttcacgtgcctctcggttcttcagtccaaacaatggcgatggtggagctctggtggattacgtgctttctctaactactgttttccacacttaacgaaccagaacacagtgagaaagacataatggcggtggagtacacatgctgctcaacggccttcttcgttcacatactggtcatcgtgctgctcgtgcttttcgcgggcctcatgtcgggcctcaccttgggcctcatgtcgctcagcctcgttgatcttgaagttcttgctaagtctggtactcctcaggatcgtaaacacgctgagaagatattaccagttgtcaaaaaccaacatttattgctatgtactctgctaatttgcaatgctgcagccatggagacacttcctatttttcttgatggccttgttactgcatggggcgctatcctaatttctgtgacattaattcttttgtttggtgagattataccccaatcagtttgttctcagtatggtttgctatttttgcatcaggggctccctttgtagccctattcggaagagcttagttgaaaaacacttgtaaatttgcatggtaatgaggctggaaaagggggggaactgacacatgatgaaacaacgatcattgctggggcacttgaactcagtgagaagacagcgagtgatgccatgactcctatatctgaaacatttatattagatattaattcaaagcgtgataggtaactgatgaatgagatattggagaaagggcactgccaagtcctaatcagtaatgaacaaacttcatacattattgaccgtgtactagtctagagtttattgatagttaacctagaagatgaagcacgagtgaagcgtgtcaccatattcaggattctaaaggtagcagaaaacattccgatattttgaatgatgatcgaagttccagaagggccatagtcacatggctgttgttgtcagacggtgtgacaagactaaacccaaaatcttcccaaaataatgcaaatgactcggtgagagatgttaaggtggatattgatggtgaagagaaagctttgaaacccaagatgccactccacaagtggaaaagctttccaaatacaaacaagtcatcaaataggggtcctcggagcagaaaatggtcaaaaaatatgtactcggatattttggagatagatggaagtccccttccaaagctccctgaagaagaagaagccgttggaattattaccatggaagatgtcattgaagagcttttgcaggaggagatctttgatgagacagatcatcattttgaagactcataacagtggcttttttccataaaaccttccatgttcatatttcttgtttggaccttaaaaataattaaatagataatgcggtttagggttgaaagctgctgtatagagatctgagttgtgatttggaacgtgtaagccattatcgttgatgaaatgcagggaccagacagctgtttttgagatgtacatgcgtgtctctatcgcaatgacgcataccagcaaggcagcaaatcatggtttgttttttagtgcgcgcgcgttttcctttcttttgattaattgatacctacttgtattgtatgaagtgcatatgtattacgtaacagtattggcatttagtaagcacatgattagagaaaatgcatcacaatacgcaattgaatttaaaaataatcattattattctgttaaaaatagtttccgtgttgtaggaattaataataatcaaaaaaagattcggggatgtnaattaatgtgattggaacgcaacaagccatgatccatgggagaatctatttttgttaatacgttcacatcaaattttattttacattttctttatgctatttgtatcaacatcggtattttatgtaaggtagaggagcatgccagcaatgcggtatgagacat

SEQ ID NO: 36349 - DNA, 2054 bp, Glycine max
  Clone ID: PAT_MRT3847_132826C.1
acttcccggtccggccccgcgcgtccggcgaaacaatggcgacggtggagctctggtggatgacgtgctttctctaacaactgctcttagaaaagagagagagaatggcggtggagtacacatgctgctcaacggcgttcttcgttcacatagtggtaatcgtgctgctggtgctgttcgcgggcctcatgtcgggcctcaccttgggcctcatgtcgctcagcctcgttgatcttgaggttctcgctaagtccggcactcctcaggatcgtaaacacgctgagaagatattaccagttgtcaaaaaccaacatttattgctatgtactcttctaatttgcaatgctgcggccatggagacacttcctatttttcttgatggtcttgttactgcttggggcgctatcctgatttcagtgacattaattcttttgtttggtgagattataccccaatcagtttgttctcggtatggtttggctattggtgcatcagtggctccctttgtccgtgtgcttgtatgcatatgtttcccagttgcctttccaattagtaagttgttggattttttgctgggccatcgacatgaagccctattccgtagagctgagttgaaaacactcgtaaatttgcatggtaatgaggctggaaaagggggggaactgacacatgatgaaacaacgatcattgctggggcacttgaactcagtgagaagacagcgagtgatgccatgactcctatatctgaaacatttactgttgatattaattcaaagcttgatagggaactgatgaatctaatattggagaaagggcatagcagagttcctgtctattatgagcagcctacaaatattattggacttgtcctggtcaagaatttattgacaattgacccagaagaagaaatacccgtgaaaaatgtgaccatccgaagaattccaagggttccagaaacgttgccactttatgatattttgaatgagttccagaagggccatagccacatggctgttgttgtcagacattgtgagaagacagggcaacagtcttccaacaataatgccgatgtgagagatgtaaaggtagatattgatggggagaagaatccccaagagaatatgttgaagcccaagatgtcactccaaaagtggaaaagctttccaaattcaaatgtcatcaaataggggttctcggagcagaaaatggtcaaaaaatatgtactcggatattttagagatagatggaagtccacttccaaagctccctgaagaagaagaagctgttggaattattaccatggaagatgtcattgaagagcttttgcaggaggagatctttgatgagacggatcatcattttgaagactcataacagtgctttttccataaaaccttccatgttcatatttcttgtttggaccttatagataattaaatagataatgcggtttagggttgaaagctgctgtatagagatctgagttgtgatttggaacgtgtaagccattatcgttgatgtaatgcagagaccagacagctgttatataaaccaaaccttttgagatgtacatgggcgtgttgtctttatcacaatgacgcatgcaatcaaggcagcaaatcatggtttgtttttgtgcgtgcgcgcgttataaaaaaaaaaaaaaaaagggggaaacccccccaaaaaaaaaaaaaatttttttttcgggggtttttcccccccaccccctttttttttaaaaaaattccccccctggggggatttaaaaaaacccccccccccccaaaaacccttttccccccccgggtatataccaaaaaattttttttttgggcgccccttattttaataaggggcgcccttttactacccggggggggggaaaaaaccccccccccccaaaaaaaataccccctggaaaaaaccccccttttgggggggggggaaaaaaaaaaaaacgccggggggggcccccttttaaaaaaattccaaaaattgggggggggggaggggcccccccttcttgagggaaaaaaaaagcgggggggggg

SEQ ID NO: 36350 - DNA, 441 bp, Glycine max
  unsure (1)..(441): unsure at all n locations
  Clone ID: PAT_MRT3847_132827C.1
cgcctgcagtaccggccggatttcggtcgaggggcgctcggaactaaaaaaggaatggcttctcatgatctctcccactgtaccaccgtaaccgtgccgggccggcatggttgctccattcaccggctaatccatggtggctcccctgaggattgctgcatgacagggctncttgctagcaacggnggaagagtacaatgcatgcaggtgtaggccaaccaattggcaagaagaagttcgagactctttcctacttgccagacctcgatgatgcccaattggcaaaggaagtcgaataccttctaaggaaaggatggattccttgcttggaattcgagttggagcacggtttcgtgtaccgtgagcacaacaggtcacctggatactatgatggacgctactggaccatgtggaagctgcctatgtttggctgcactgatg

SEQ ID NO: 36351 - DNA, 190 bp, Glycine max
  Clone ID: PAT_MRT3847_132828C.1
agtttttattttggaaacaatgccgacgagcaaataccatcattttgtggttttttgacaaaataacaccactctaaaatattttataatctgatcccacaaactctcttttttattacttattcgctctcaaattacatacttgtagaccttgggcccaatttattttttttaaaaccgtcaaaatttt

SEQ ID NO: 36352 - DNA, 557 bp, Glycine max
  unsure (1)..(557): unsure at all n locations
  Clone ID: PAT_MRT3847_132829C.1
gttggttttggtgaagacgatggcatagcgtatctctcagactcgcttggttttgcaaccatggaagacaacgacttctcagaaactgcaaagttcattagccagatcctcatggaagaaaacgttgaacttgaacagagcccattctacgactcactcactctgcaagttactgagaaatccttctacgacgctctcgccggtaacctacttctcagtccccaagctagcaacaccaatttttcagttgaaaattctcgtgagttgaacctcccttccccagattctctttctgtttctgctcttcagtttaacccccacgcactctctcaaccaccacctttggttaatgttagtgaaggagtctctgatttggactcttctattgcaagactcttagcacataatattttcaatgatgttgattctgtttcccactttaggagaggcttcgaggaagctagtagatttcttcctccagggcctaaccttgttactgctctacattcaaacgcgcaagaaccaatcaattcttntgcgagagaattcctatgggt

SEQ ID NO: 36353 - DNA, 399 bp, Glycine max
  Clone ID: PAT_MRT3847_13282C.1
gcctctcgttcatataccagccgtggaatgattacaaatcgtctctgctgcagagttcaagcatgcactgacatattgaaagcgctaacttgcaacatgacaggaggtacactaacatacgttgctttaaaattgctacagaaactgcactgacataatatgatgatgacattgatgataatgatgaatatagacattacgcaaagtcatacattggcagcaaaagtgatagacaggccgatgcatttgaactttgcgatcaatcgtcatagcctgtgataggaaccataactactaaccctttagacatactgatttcactgaagatatactaatttgtgaatgaaaatgtaaaggatacagcagtctaataagctcaatgctaataccgagactaga

SEQ ID NO: 36354 - DNA, 834 bp, Glycine max
  unsure (1)..(834): unsure at all n locations
  Clone ID: PAT_MRT3847_132830C.1
tacggctgagaagacgacagaagggtacggctgcgagaagcccacgcgtcggtacggctgcgagaagacgacagaagggggagtgagcgtagttgaggttttgccacttcgaaaccaaattttcttccttcgttggcatctgtgatctcttctcctcacaatgagcagatcagggcaaccaccggatttgaagaagtacatggacaagaagcttcagatcaagctgaatgcaaatcgcatggttgttggtactctccgtggcttcgaccagtttatgaatttagttgttgacaacactgtggaagtgaatggcaatgagaaaaatgacatagggatggtggtaatcagaggaaatagtgtggtcactgttgaggcgcttgaacctgtgaacaggacttgatttctgtggcttgtaaacattctatataagtattttctggttaatggttgtgtatttgaacaatgtagctattgagagtagcttgtaattgtggattgtaagatggtcatgttggccactcatttgggttctccaggttaaattgttagggaaggatacctatagtgttttagtgtgagggctgtgactagatccaattgaaatgtttacatatatcccttttagctgatttttttctctttttatattgcatttagcgtgaaaacttctctcttcctctccatgctctanagtctaaacttgnggttgttgatggagctattagagtttacactanaatgtatttgtctaaggagtcatagtgtgtgtttggtttgcagttgataactcgcaagcccacgnttcatgggaaatatgananaacttgnncttac

SEQ ID NO: 36355 - DNA, 552 bp, Glycine max
  Clone ID: PAT_MRT3847_132831C.1
ttgcgagaagacgacagatgggtcagtgtgtgacggctgcgagaagacgacagaaggggtttctatcatacgtgtgtgtgtgtgtgtgtgtgtgtttcatgaccaatttttcttactggcaattcagtggcagtgtattgcttaggcttccgtcaaaatgaaaggaaaatcaatgagtctgacagaacaacttcagtcttcactcttcactagttgaacacaaataaaaaaaaattaaactacttccaggataaataaaaggttcagaagcagcagacctagattgtctaagctattttataatgggcaggtatagttacaatgatgatgaaatgaactatagaaaaaaaaagtataaaaacagaagaataaaaaaagaattaagggcagaactcaaaagcttttagccatgctgttggaatttaatcaatgaatcaatcatgtcactgaaatttggaacataaatgaacttctcccttactatcattctctttctctattttttctctctctctagctgccttgttatgttatatatctatctgcatatac

SEQ ID NO: 36356 - DNA, 534 bp, Glycine max
  Clone ID: PAT_MRT3847_132832C.1
caaattgggggctatgctcaattacactctctattcgcttgattgtcaccctggagcgtgataaaaactgaatgccatacatctgagcacatgagggtgcagaccggctgcgatgcagttcgaaatgcccggcctcggccggggcgtgaataccctaggccgaaaatgggggccgtacctgctggatcaacgggctattggcctctgggtgccgatgatacctgaaggcacactggctgatactaggaccatattttgactctcaacatgaacataacaccatctatctctttccagactggaaagggcaagtgtgaacaaggtgttgggaaagtgcttaatgaaccatgaaggtcggagaagttgcaaaattaacttgcaagctctaatatgcatatggcattgcatgacctcctccagatagtgctacagacgcacacacttgtttatcaagttgagcttgtggctcgtcggccaaggaaggactccagtttaggaagtgtttcacaggatagggtctggcttgatgagctg

SEQ ID NO: 36357 - DNA, 231 bp, Glycine max
  Clone ID: PAT_MRT3847_132833C.1
gacagaaaggggctgccgctccccgaaaaaaacagatactgtgggaaaaaaaagagcgggacagaaaatgacgaccaagttcaagaagaacaaggagaagagaaggcacctcaacgccggacacggccgtatcggaaagcaccgcaagcatcccggaaggtccccgtaacgcccgtggcatgcaacaacaccgtaacctcatccacaagtaccaacctgggttcctccgga

SEQ ID NO: 36358 - DNA, 937 bp, Glycine max
  Clone ID: PAT_MRT3847_132834C.1
ctttctttcataccgacaaatagatattaaaaaaagccctacaaaagtctacagcgagtgaacttttcacaagctataaagttcacttctaattttagtaacaagttcatgttctgttctctttcaaaaaaggtttctactaataaagacttgtggatgattatttatatatgttaattaactgcaaatgttagctaataatcttaggttgattggtaagatcaaagttctatacctaccagcaacatttaaaaaatccaatattaagtaaaacatcagcatcagtcaagcagtaaaagagattaataagtttgaatacgactattaatagagtcaaggttcatgagaaagcgcacgatagcaaagagtcttagagttattggcttcggtgcgtcaaagattaaattttggggttaaggagagggagaagagaagcaaaaaccctagaagtagagaagccgcaatgactcacgaggatcttggcggcgagggagtgggaggggccacggtgggagagggaattgagagcgacttcggcagcggagtgttcggcctgacggagagtggagcagtagtgagggctctcgaagatctcgccgttaaagttgacggtggccttgaacctcggcgcgtgatcgggaccttctcgaatgcacgcgtacgaaggcaggttgaagcagctccgctgggccagctcttgaagctggttcttgtacatttccaccaccacccccttctctctctctctccagagaaaacagtaaccacgcgcggttcgggtcgaatatttcgggccgggccgggccggtaaattagtcgccggcgaacaaaatgaatgggctttagggtttgccgacggagaaatgaggttagtgagagaaaacggaagaggagtgaagaaaaaaagtaaagtgcagaagaagagagtaatttgttt

SEQ ID NO: 36359 - DNA, 322 bp, Glycine max
  Clone ID: PAT_MRT3847_132835C.1
atgaatgataaatgttgagatctgaacaaacaaatcaaggtgggtggaatttgcgtgtacttatcgacaatcacaaacaatctacagattatgatattgtttcgggaacctgtcatgattaacaaattgcaggcaatactcaaattccaaatttttttgttccacaagctactgccagatcttctgaaaatgactaatactgtgcatgatctcaaatcatgtctatgcttatattaggtcgcatggaaactcaataaaggacaaaaggcatcacccgctcttttaataagctctggctattagaaaagtttcacacctattt

SEQ ID NO: 36360 - DNA, 263 bp, Glycine max
  Clone ID: PAT_MRT3847_132836C.1
agaaacgataaaatcaatcaatcaaaggaagcaaaaaagtcagaatggatttgtgtggaaaaggttcttcgcatgaacagcacacaaattcgttttgccacagacccatttcctcccatttgggaaggaccagagtgtttgagatcactgtttcgaggagaaagccttactctaaagttgggtatcgcccatttgttgtcagcgccacggggaagaagaatcatggcaactcctcttcttctggcaatgaagaacggtccatt

SEQ ID NO: 36361 - DNA, 117 bp, Glycine max
  unsure (1)..(117): unsure at all n locations
  Clone ID: PAT_MRT3847_132837C.1
aaaccaagtactacaagggaagacgaacttaganngannctaaggaaggatcaaagagaatggntccagcaatggcatcaatgantagcttangtggttcctctnaggctgtgttgg

SEQ ID NO: 36362 - DNA, 392 bp, Glycine max
  Clone ID: PAT_MRT3847_132838C.1
gattataaaagattatacacataacaagatgtgagcattatgatattattaagttaattataacatagagaggtggaagacaggatgctgatggtactagaggatgatgagaacggaccaaacttgttaatcggcctttacgagaggaaaagcttatgcgggcgaataccagctcaacatattgcactgcttgtgaatgataaatttaacagcaacacattgtgacaatttcggattcacactaaaatgaaatcgattaagataaaggtgaggaccggcgaatcgaagatgtccaagctcaaacttaattttttaagtcacggatgcaatgtggacaattaaagcaagaacacgggaactgtttcgctatttgtcgacatagcaggaaacat

SEQ ID NO: 36363 - DNA, 284 bp, Glycine max
  Clone ID: PAT_MRT3847_132839C.1
acaacctctatttttttgggacggggaaacatgagtgcatagcatctccatcctaaagttaaactctttccaaggaagtgcctgtcaaagggtaacacaggaagatttggggctgaaacacacagatgtgatgccacattttctcaaagatattaatgtcagactttctgacaaacaaaacaagagagggataaccttatatcctaggcagttagtattggaaatgctactttatttgcaagtacaaataggccctgaattatttcctggcccttatttttttt

SEQ ID NO: 36364 - DNA, 1559 bp, Glycine max
  Clone ID: PAT_MRT3847_13283C.1
caccggacctgaaaaaccgggccgaccgacgcgtccgcccacgcgtccggttcgtgctgtaactaatctcttcaggaatttgtgctactacaactggttgcaaaaacatcgaagtgagattcttgatgctttctcaagttgtagttcatctccaaacaagaatttgcagttgtcatactctaccttgttactaaactatgctgtgctattgattgaaacaaaggatcaagaaggtcaatctcaagttctatcggcagctcttgagattggtgaggatgaaaatgttgaagtcgaccccaaatttcgtgctttagttgctgttggatcactgatgcttgaaggtcttgtctgaaaaacagccctggatatggatggtgtgtactttgcaaaagccgccttgggtggtaaggaaggcaaaattgctgaaatcggaccggacattgagctgttaacaaagaggggctgtataccttttcggagatcaatgtttccagactgggtgccattgttaaaattctgaaagatacttcacattatcattctagtaaatttgcagactctgatatagctttgttactgaatctgcttcggtcgtggccaatcgcaatgatttttcctgtcattgatattgtaaggatgctagttcttcatcctgatggggctgttttacttcacaagcattttgaagcagaaaatgacatactaatggaagtgattaagaaagtcactgtaaatccaacaatccctgcaaatctgttgaccagcattcgtgttgtaactaatctcttcaggaatttgtgctactacaactggttgcaaaaacatcgtagtgagattcttgatgctttctcaagttgtagttcatctccaaacaagaatttgcagttgtcatactctaccttgttactaaattatgcggtgctattaattgaaacaaaggatcaagaaggtcaatctcaagttctatcagcagctcttgagattgccgaggatgaaaatgttgaagtcgaccccaaatttcgtgctttagttgctgttggatcactgatgcttgaaggtcttgtcagaaaaacagcactggattttgatgttgtgaacattgcaaaagcagccaagggttctaaggaagccaagattgctgaagtcggatctgacattgagctgttaacaaagcagagctgaataccttttggttgcttaatctctcctgttcctccaaataaactcaaggattatttttgtactaaagatgtcagcaaccaagatcattgtttagagtgtaaaattgacatctttctgctgatggttgtgcgtttgttttcaatttcaaaacaacgagctgttgcattttagaggattcattgagagtgacacatcaaaagtaacctcacaattacagatttccaccgttcctccgtactttgagacaatagttggaacttggaaacccatgacatgttatcagatagattgtgtaaaccaattgagcaaattacagcaacgatgtagtcttcctctctcatttgttttaatatcaagttattcaaatcatttcattt

SEQ ID NO: 36365 - DNA, 1399 bp, Glycine max
  Clone ID: PAT_MRT3847_132840C.1
gttactgctgacttcaatggtgttgagggatgcactattgctggaaagaaaaatgatagggtgattaatgaagatcttctgaaagatgagattgtttcagaacagctgactaggaacgttcaattttttggctttgagtctcagcagaaagtgactgcatcatatgtagtggtcattggtcttggaggtgttggtagtcatgctgcttctatgctcttgagatcatggattggcaagcttcttcttgtagactttgaccaggtttctgtttcatcactaaatcgacatgctgttgcgacaagagcagatgttggcatctcaaaagctcagtgccttaaggagcatttcttatctatctttccagagtgccaaatagatgccaaagtgatgttatatgattcatccactgaagaagaaattctctcaggccaccctgactttgttttggattgtattgataacattgatacaaaggtggcgcttcttgctgcatgtgtacgtaggggtttgaaggttctatctgcaacaggggctggtgccagagctgatccaactagaatacgcattgccgatctaagagaatcaactaatgatccattatctcgagctgtaagacaccgtttgaggaaagattatggtattgaaggtggtatcccagttgtgttttctttagaaaaacccaaagctaagctgcttccatttaagggtccaagtggagaagaggaaaacccttcagattaccagatagtaccaggttttagggtccgtatcatccctgtgctaggcaccatccctgcaatatttggacaattcatggcctcctatgttgtgacggagttagcaggagtgcatgttcaaactgaacctgtagtcaattttaacatggaccattaccatattctgcatcaacgccttatcgagcatgaggagtcattgtatggaacatacatggaagtgcaggtagatgttgaagaagtgatgtatattgttaaagaattatggcatggaagaagtgctagagagcagcatgtaaaagatgttgggcgaggaatgtggcgatcagttaatgaattaatgcttgtaaggtgggaccgcacaaaaccagcatctatttcaaatttgattcttctgaaattcaaagaggtggatgagcatgaatcccgaacgttggatgatataaagaaaaatgaaccagaattttacagtagagtgattgctgtgttaaaacgagctgaacttgactttggtttgtgacttattccttggttcagagttgtataacagtctactcttctttttagattgaattttagggagacaaaatcatgatctacaatacgtttcaggaccaacaaatgattaagtttagagaatatattcctcacagtaactgttgttt

SEQ ID NO: 36366 - DNA, 402 bp, Glycine max
  Clone ID: PAT_MRT3847_132841C.1
ccgaagcgtatgctataatatactcgatcaaatacttgtctaaacaattacaataccccaatcccagacacttatgttcatgaccatgctcaaggccctactaacagttacttgaacacatttttgagtacaccttacagcctaccttcccctatacaaacacctttgctccctcattcgattctgagttgaccttagctagctccaatactggctacaatactgctctcgggcatacgaactatcttcattactattttcaccctttctttgcagcggatttggcagggtataaagaaagttaatgcgaaattatgtgctaaagagcgtgctaattatcgaagtcatcttacacatactcctacacactaccttttatactacagattatattctagaatt

SEQ ID NO: 36367 - DNA, 547 bp, Glycine max
  Clone ID: PAT_MRT3847_132842C.1
ccacgcgtccgctcagacttcaaccacaagcgagtgatgagttccatggtgtatgagcaacaaggtagccttgatgataaatcactaatgaagttggtctcgatccccgatggtttaggacccgatgacgacagaatggatcccggagcactatatgatgctgttgtaagaactatgcctacgacacttgagaagctcttagagaatactcatgaggatggtgacaacagaattggcttcattgttgcagatttggccatgctatgggcgttggaggttgggagaaaatttggaatcaaaggagctatattctgcctatagcagcaactatgtttgccttgttatgcaatagccccaagcttattgatgatgggatcataaattctgatggatcactcttaaccactaaaaagacaattcgactatcaccaaatatgccaagagatgaacccaggaacatttttttggttaaatatgcctggcacaaaagatggtatgaatatgatgcatattacacgaactttaaatttgacagaatggtggcttt

SEQ ID NO: 36368 - DNA, 1407 bp, Glycine max
  Clone ID: PAT_MRT3847_132843C.1
cagaaaacttaggagtatggctaatggtagccccactgggagcctgaaagaagctagttctgccatagtggattcgaaagagcgactaggttcatcttcctgttatgcggctcgagtggtatcagagatagaccaatgctgcaggttagagggagcaattgttactttagagtggtcttctccaaaagaatggcttttcactgtaaagaaagatggattaacaagatgcacattcagagcagaaaaagtgatgcggcccttttcaacaaatcgattcacccatgcagtagtgtattcattggacaatgggtggaagctggagtttaccaatcgccaagactggaatgtctttaaagacctttataagaagtgttctgatcgtaatatccctgctactgttgccaaagttatcccagttccaggtgtacgtgaggtctcttcctatgcagaaagtaactgttttccctatcacagaccagatacatacatatctgactctggtgatgagttaactagagtaatgacaagggcaactgcaaattatgacatggattctgaagatgagaaatggctgaaaaagttcaatgagtttcaagaacatgtatcagaagataattttgagttaattattgatgctatggagaaggtttattattataatccagatgagacatttgatgaaaaatctgctgccaatggttgtcaggaccttggtagcaaggaagtggtagaagctgtatataactattggatgagaaaacgaaagcaaaaaagatctttcctgcttagggttttccagggtcatcaatcaaagagagctccacttatcccgaagcccttgctgcgaaaaaggaggtcgttcaagagacaacctagtcagtttagtagaggcaatcaaccaagtgtgttgaaagcatttgcagctgaacaagatgccatggaagaaaatgcaatgctcaagattgaagaggccaaagccaatgcaaacatgtccatggaattagccataaataaacgcaaaagggctcaatctcttgcccagaatgcagatttggccacctacaaggccacaatgttaattagaatagccgaagcagctctggctgcagaatcagtagatgaagcagcagcatattttcttgattaattgatggttagatcaattccattgctaattatcacaccacaaatttttattacaggatggggtcatatagtagatttgctgctgttttattgtaaacattgtacagatttttgcttgtatgtataacttggatttaaatgaaagaccgcacacctatcttttgtgagtaggttggttgatcctcctggaagaaagaaaactaaaaaagtggaaatgaaaaagaaaatacaggattcctatgcctcaaaaaaaaaaaaaaa

SEQ ID NO: 36369 - DNA, 292 bp, Glycine max
  Clone ID: PAT_MRT3847_132844C.1
agccgtcgccctttttttttttttttttcttgtagtagttttttttttttggataaacttcagaacattaacataaaacctatacagacttgcaacccacactaggttttacacacactgagattttatggattacacagatttggatccgaacaactacaaaatatctgagccaagggaacccccctgcttgttgcggttatagataaatcggaattttctttttctttccgggaggggggagggaaggcgtcaatatgctccattcccttatatattcaaatggggattg

SEQ ID NO: 36370 - DNA, 568 bp, Glycine max
  Clone ID: PAT_MRT3847_132845C.1
acgccggcacgtaccgggcccggattccggattgccgccacgctccacgcgttcgtcatcgcgttctctcacgcgcccgtccacgcattcgaacacctcattactatacacgtacacaccgcttctttttcctttctattacaggattagcaaacccctgcactcactcactattttggttgacattctttgtgaatttgacgcacgtaaccgactacgtgtctacaactgtggcatcaatggtggcaccgacatgtataaccattgctacacatgctacaatgtctatctcgacggaaggggctgacattaatgtctccagacctcagtgaaatacttcggttcgggtttatgatcaattcctaccttagacgcaggacccacctagttcaagacttctctgtggtcttactgtactgggactaaggtttctcataaagaatttgcccagcaccacttcacctttatattatatggatgtatgggttaggaacaataacaatattagggattatcatctatattagccaaagtaaaatcatttcttttgacacccaaattaaaattt

SEQ ID NO: 36371 - DNA, 299 bp, Glycine max
  Clone ID: PAT_MRT3847_132846C.1
attttataagtgttaattcttgattttgatattggtacaaataaaactatatatacataggtcaaaaagagttatacagtgtaaaaccaaagaaatcaatgaatttttgcaccaaaaaagtgtgggaaatatttttaaagacatgaaacccaagaagacagtgcagtcgttaatgtttcctttattggtctgtagtaacttcaagttcattctatgggacatgcttctgtcacagggctttgttgacttcattcatctcctgggaatggtaagcatcagtatctgacaataaagcatat

SEQ ID NO: 36372 - DNA, 221 bp, Glycine max
  Clone ID: PAT_MRT3847_132847C.1
gtcgtgcctctcattgttctcgccatttccaaatcatccgatcgccacaagtacgatctgtcttccatcagagtcttgtcgtcctggggatcccctctgggtaaagaactcgaagacggtgtcacagctaaattccccaacgtcaaactttgccacggatacggcatgactgaggcagagcctctgctaacaatctctttagcttttgctaaagaatcgat

SEQ ID NO: 36373 - DNA, 407 bp, Glycine max
  unsure (1)..(407): unsure at all n locations
  Clone ID: PAT_MRT3847_132848C.1
ggggagaccagtgttgtagtgggttcacagaaatcatactttgtggggaaatctgaagtcatttgccactggcatcataaatctctggaaaaaatcttgaaggtttatgaaggtgtgtggtgcancttttaagaacctcaatgttactttgcatcacaaacagatggtttgtctctgattcatgatgttcctggctctttttggcctgccattagctggcctgttcctgcaaattctattctcttgctttccttcaacatttccagagaggttttgctgccaagtttcttctctgntccanctggctgctcattttaaatgtnaggcttttgcccatgagtttcttgctcctcttttccattggcccnctctngggggnnntcagtcctttcattcccaatccattn

SEQ ID NO: 36374 - DNA, 597 bp, Glycine max
  Clone ID: PAT_MRT3847_132849C.1
gaaaccagcaattgcaggattgataaacttgcatgatctcaatacgagctctctacattcttactatgatcctatgaagttatgattttaggtgcaatccagattgggacaatgtagcaagattgaaagtttggcaaaagcttgaagaagaaaatgaagaattcttcaaggcttattatgcaaggttggttttgaagcagcaaataatgcaattcaacaaattgctggatcagcaagtgcaattaatgcagttacactcaagtgctgttgcatcactacctatgtctaacgggtcacatatccctgcagtgacatcactacctaactctaatgggtcacatatccctgcaagattaatggccctgctagcgtgctttctgctcaaagcgcaaacatgggtctgatacaaggaatgaatggtggcggaatgatcaaatctgagcctggatattctggttgttctccttatatgtttagtactgaaggaaatgtcctggagacacgcccaactattggtggtgcttcagttacgtcattcactattgtcgagtccaactcacattctctgaatgaggcaggcctagatccagacacttc

SEQ ID NO: 36375 - DNA, 294 bp, Glycine max
  Clone ID: PAT_MRT3847_13284C.1
gttacgcgtggggaaaatccggatgaagaactccaagagtctagggatctctgacctggtctctcaggagggcactcacacttttgtgcagatagctgatcgtgaacaccaataagtggatgatggtgacttctaagacttaataaacatgggtgtaggctatgcttatctcgatcgacccccaatacaatgtataaccattacttatcaccatcatgaacataagtagcttgcgaagcttggaagatagtttcccaattactgtgcgccactagtagcgtttaagagagaagc

SEQ ID NO: 36376 - DNA, 1297 bp, Glycine max
  Clone ID: PAT_MRT3847_132850C.1
ctcatgacactaatttggttggaactgcgctactcactcagttaatctttgacgttgtgtgccgtacaaagtgatgacgggtaaggctatgaacttgagccattccaaaacggtggttttgatctggctcatctccgctttctgcttcttcaccttgttccaaatggccctctacaactcatcacaaactccttcatcaacttctttagattctccaaattcaaacacggggcaaagatcaaagttgtatgacaagatggggagagatctggatgagcatggagctgctttcctgaaacatggtgaaacctctcagtcattgtctctttcggatatattcacactgaaggatggatctgtaactcctgttctgaagccggcaaatcctccggtgcgggctaatgtattgtatttgagcactgaattctctgtacctatcgcggaggctgtcaaaaatgtttttaatccttattttgataaagcaatctggtttcagaactctagtctgtaccattttagcatgttccatgcctcccaccatattgtacctgtacctgccaccaaagaagagatagaagctgaagcatcttctgtggaagctgttgtcgcaacactctgccctttgaaaattgttttggatagggttgttttgacttcaacaggggtgctcctgggttgctggcaggttacctcgggaacagatcccataaccattcgtgctaagttgaagaatgcacttccacatgcaccggagaagcaactttatgatgctgcaattctccacacgtcatttgcaaggcttttgggtccacctaaagcattatcaccttcggaacagcttagaatgtcagatgatgtccaatttttccatgacctagttgatcgacttaacagtcagattcatggattcaaggcggtggtgtcggagctttggtacgtggaggaatatgatgtgctagcccttgcgctaaatggaagaatgaacactcgcaaattcagacttaggtgttcaaaagaatgaagttgtcttgcacgtgtattgcatgtgtattaaatttagtgaccacaagaatatgcactaatgtgtaaaagaaccattagtatacagaaaactacgtgtttttttgtttcttttactgcattgaaacttaaaagtctgtccaaaattatatataggtggatatactaatgtgtatgatcatagattcatagaataatatcttatacggttaatggacttcaatttttatttttttttgctgctaagtgctaactggactgttgtttcctgaaccaa

SEQ ID NO: 36377 - DNA, 1477 bp, Glycine max
  Clone ID: PAT_MRT3847_132851C.1
tcgtacggctgcgagaaacgtcagaagggttactacttttccctccaatttcgcttcaccacacatgcatggattctttgattttcatcttctctcgcgttttatgattctgatcttaggatagttgttaacagagtgatttgggagcttttgatatgtcgagtggatccgtgagacgggtttcccgtcaagatatccagctggtgcaaaatctcatagaacgatgtctacaactgtatatgagccagaaagaagttgtggaaacactattagctcaagcaaaaatagagcctggtttcactgaactagtttggcaaaagcttgaagaagaaaatgaagaattcttcaaggcttattatgcaagattggttttgaagcagcaaataatgcaattcaacaaattgctggatcagcaagtgcaattaatgcagttacactcaagtactgttgcatcactacctacatctaacgggtcacatatccctgcagtgtcatcactacctagctctaatgggtcacatatccctgcaatacctgagaatccagcatgctacactgcagaccgaacccaaacaagtttgaagccagaaaatatgcaacatcatgttgattccagattatctaatgtgtttaataatggcgggtcatcactacatacaagtatgcatgctgcagttgagatctatgctcatggtaataggattaatggcccttctagcatgctttctgctcaaagcgcaaacatgggtctgatacaaggaatcaatggtggtggaatgatcaaatctgagcctggatattctggttgttctccttacatgtttggtactgatggaaatgtcctggagacacgcccaactattggtggtgcttcagtcacatcattcactaatgttgagtccaactcacattctctgaatgaggtggtcctagatccagacacttcttcatttggatttctggggcagattcccagaaattttagcctttcagatctgactgctgatttttctcagagttctgtgatatactggagacctattctaggtcacccttcctagctacggataatgagaacttccttgacagaggagaacaggacaataataggctggactccatatcagaaggcttgagttatgaagactttgggagtgagtgaatagttgaataccatttagtcatcaaactttcaggttgaacaaaatgcttaaaatgttgtacataaaactttagaggttttgaaattttaactgttggatgaacatatgcattggtgtgtagaacgtgcattcacctcattcttggtgatgggaaatgaaagttggaatgcttgcatggaagggaaagacttggtgcaaataaataataatcttttttcccttgtgtgtttggccttttgtactaataagcttattctacgttgtgttgatactagaattaatataattgtgttttgttgtttgtccgagcaaga

SEQ ID NO: 36378 - DNA, 459 bp, Glycine max
  unsure (1)..(459): unsure at all n locations
  Clone ID: PAT_MRT3847_132852C.1
gcccaagcaacttcattctagctnncctgagggatatttttatatcagaaaagtaatatgcgaatgacaattactcctttcgggtgtggtaagaaacctcttgagaaattttgctttcatgatataagagaaattatatttatattactctttaatttctatagttatttctgcacctaagtttgaaataacgaccgacgtgatagaggctggtgccgaattcggcacgagctctctctctctctctctctctctctctctctctctctctctctctctctctctctctctcggggagccgctccctatatagngnnngcccgcgggcgggcagagatatatagtgtgctctctcgagagggagattcacgcgcgcnnccctcaaacaaagacatatagctctcctgtgagagagatagacacanncactctcncagaccacacannnnnacagnnata

SEQ ID NO: 36379 - DNA, 303 bp, Glycine max
  Clone ID: PAT_MRT3847_132853C.1
gacctatcaacctcttcctccgaccaccgttctggggattgacctgagaccatgggggtctgtaccccgtggcattgggcgaccacaccaccctctccagaatcatatcctcactgcctcggcttcccgatccctctcttattcaaacagaatccgattccctcgctcaagaaaaaatcgccgatcagatctccctcgtcctcgaccgccgcgacgttccttatggagaaacccctctccacctcgccgtccgactcaacgacctttttttcggccgcgccctcgccaccgccggggccgacg

SEQ ID NO: 36380 - DNA, 198 bp, Glycine max
  Clone ID: PAT_MRT3847_132854C.1
ccgtatcgttacccacatgaccagaaggttgctgtcgagaaatttgtaagacatatgttggcagcatgcatgactcgaccaactgtaagtccttactctagccctctcattgttagttgaaaaaaaaatggaagttggcatttttgtaccgattataagactttgaacaccattactattgccaataaagatgctatt

SEQ ID NO: 36381 - DNA, 491 bp, Glycine max
  Clone ID: PAT_MRT3847_132855C.1
gttttatgatttttctctgatgggtaatttctttggcattcggacaaaagcgaacagatcttcgccagcggtaactgatcatgaccgaacgaccttgtcgttgaaaatgcagcgcgacaaattgcgccaagcgtatcaacggtacgagcgcaacatcgccaaggacgcggagagagcgcgggcactgctcagagacggacgcaaagaccgagcattgttactgttgaaaaggaagcgcttccaggagacgatgatcaatcggatcggcggattcatggagcaggtggagcggacgatcaccgacatggaaatggcacagatcaacagggaagtgttcgacaaccttcggcttggcaccgaggcattgaaggcactgaacgagacaatttctttggacgaagttgaacgtttaatggaggagagcaaagaggcgcaagagtttcaggaggaattgtacaccatgttgggccaacatatgtcggaggaggaca

SEQ ID NO: 36382 - DNA, 349 bp, Glycine max
  Clone ID: PAT_MRT3847_132856C.1
acccgtgggtggggccgggccgggaagaccggacccggcccgcggggcaccccgccttataccggggcgagttacaacagggcgggaacaaggccgggcaaaacccctgtgcggaataaaaatccgatcccaacaccagcaacaaaggatccgaaacccaaggggaaaagcaagggcgggggaccgcgggagctgaccaacatgaaatgagtggggctgcccgcccggcccccatacggaaaaggaaaccgggccggccccttgggtaaacgacacaacccccgggcggggcggggggggtagcaggctcccgggcgagggggttttttcctagcccgacggggcccgg

SEQ ID NO: 36383 - DNA, 122 bp, Glycine max
  unsure (1)..(122): unsure at all n locations
  Clone ID: PAT_MRT3847_132857C.1
aatgatgatatcagcaccacgaatctcanntncnttctggtgccattttttctgtcaactccgtctgattttctggcncctgaatgtttttgcgattcgtggtgctgatttcatatctcgct

SEQ ID NO: 36384 - DNA, 294 bp, Glycine max
  Clone ID: PAT_MRT3847_132858C.1
gtttttctgttcaatcttacttatctgatgaaaatgcctaatatttattttgtcaaagaaaaggaatgatgcaccttcatcaacatgcacatgtttgctatttgatttattctgtaaaaatgaaagtaatttctataaatggtaattttacaactaatcaaaaactgggctgcctctcgctagtgagcgaatctacccgtgatgtgaaatcggaccgatcctttctaacttgccagctttcactattgagtgtgttataaaagtttgaagtaaacaaaaccatggccggcccct

SEQ ID NO: 36385 - DNA, 258 bp, Glycine max
  Clone ID: PAT_MRT3847_132859C.1
ggctcgagcttctctgcttcttgtttttggatgctgggaaagcgaactacttcttgtcctttgattttatttgattgaaagatgggtcaagcactaggttgctatcaagttgatcagtcaaatgtggctatcaaggagcattgtggaaaatttgatgaaggcctgcaacgttggagtcatcgcctggcttggtgccatgggtaccagattgctggtagtttgtcactgcgtgtgcagcaacttgatgatcgatgtgag

SEQ ID NO: 36386 - DNA, 526 bp, Glycine max
  Clone ID: PAT_MRT3847_13285C.1
aaagaaacacctgccacatgccccttttattataacatcggttcaaaaaattggctcagcctacccacaaaatttaaaacaaaacaaaacttactaagggttacctagggcatttttttccactaccttgaaaaaaaatggtcatgcctataacttggtcattttcttaaaaaagggctattttataacttaccgcccctcttaaaatacactcactttttaccaccagcctttttaggaggaggagcagggtccccatgatcaaactgggtatttccatactggcaaatcccgcacctattggcccaagcttcgccctggaacggatccaagttatcaagggcctggtggctttcttttctggcccacctattccttttttctagcctagcaaggccttcctggaggatggccgctttaacactgatttcaaaatctacagcaacaagcgttaccggaagcactggcccaaaaccctgcccttttgctttccctccggaagaaatttttccttgaccttggccct

SEQ ID NO: 36387 - DNA, 450 bp, Glycine max
  Clone ID: PAT_MRT3847_132860C.1
agaaaaaaaaaaccctagtaatgccgccgatggggaggaagcgaaaggtagcacccaaatcttctctatccaccgagccacctctgagcggggcaaccaaaacccgaaaatccccctcaagaatacgaagaagaagaagaaaacgacgtcgtcaaacaacagcagcagcaacagcaagacgaagacgacatcccgatatcgaaacttctggaaccgttgggcaaggaccagcttctgaaccttctttgcgacgcggcggcgaagcaccgcgatgtggaggagaggatccgaaaggcggcggatggagatccggtgcaccggaagatatttgtccacggattgggctgggacactaccgccggaaccctaattagcgcgttccggcagtacggagagatcgaggactgcaaggccgtcaccgacaaggtctccggcaagtccaagggctac

SEQ ID NO: 36388 - DNA, 271 bp, Glycine max
  Clone ID: PAT_MRT3847_132861C.1
cgatatcacacatccaatacttaaaacaaagggggtaccgaggaaacaataagcccattattacctctacctctatcacagagataaactaagactggattgtcagaggcactcataccttgaacaattttataagaaactgttaaaactgaactgtgtggcattcatggtgttcttgatcacctgagctctaggtcgcgcaactttcttattttggggtgcacaagcacccctatagatgactgctgcgtcagacttagaaccattagca

SEQ ID NO: 36389 - DNA, 2249 bp, Glycine max
  Clone ID: PAT_MRT3847_132862C.1
acggctgcgagaagatcacagaagggggataccgaaaattcctaatgcacaaaaaaaaaaccctagtaatgccgccgatggggaggaagcgaaaggtagcacccaaatcttctctatccaccgagccacctctcaagcagcaacaaccaaaacccgaaaatccccctcaagaatacgaagaagtcgaagaggaagttgaggaagaagaggtagaggaagaggtcgaagaggaagaagaagaagaagaggaggacgaggaagaagaggaggaggaagaagaagaagaagaagaaaacgacgtcgtcaaacaacagcagcagcaacagcaagacgaagacgacatcccgatatcgaaacttctggaaccgttgggcaaggaccagcttctgaaccttctttgcgacgcggcggcgaagcaccgcgatgtggaggagaggatccgaaaggcggcggatggagatccggtgcaccggaagatatttgtccacggattgggctgggacactaccgccggaaccctaattagcgcgttccggcagtacggagagatcgaggactgcaaggccgtcaccgacaaggtctccggcaagtccaagggctacggcttcatcctcttcaagacgcgccgcggcgcgcaaaacgcgctcaaggagccgcagaagaagatcggcaaccgcatgacagcgtgccagctggcatccatcggaccggttagcaacccgccgccgacgccgatggcgccttcagcggctccgtcgtcgtcggtttcggagtacacacagaagaagatctacgtgagcaacgtcggtgcggacctggatccgcagaagcttctcgcgtttttttcacggttcggggagattgaggaagggccgttggggcttgacaaggccaccggaaaacctaaggggttctgtttgtttgtttacaggaatccggagagtgcgaggagagcgttggaagagcctcataaggatttcgaagggcacattttgcattgccagaaggcgattgatgggcccaaggccgggaaatttcaacagcagcagcagcacgggaatgttaatgcgcacgcccagcgggcccagtttcagaggaatagtaatgttggtgctaatgctgctgcgggttatggtggtggtggttcggcggtgcagccggggcacttgatggcgccggctgggccggggattgggtttaatccgtcggctgctgcagctgcgcaggctgcgttgaatccggcaatggcacaggcgttgacggccctgctggcgtcacaggggacgttggggctgacgaatttgttggggagtattggaacgagtgctgcggtgaaccctggtgtgcctgctgcagggtctgcggtgcagggtggtggttatagtgctcagccgaatataagtcccggtgttgttggaggatatgggaatcaggtggggttacaggctgcgtatccgaatcagaatcagcagatagggcagggtggatctggaagagggcagtatggtggtggagctgcgccctacatggggcactagattccacataagtgcatcagtcttttattactggcctggcgtttcttctgagttctgaagtttaaggagctgatgcaattggcgtgtttataatgaaatgctacttactgatcagaatattttaattaccaaatggagttctgttttcgccacctgctttttcttattttcttccctttcaaaatattgtagtattttgactttggtttatcttcaaaaaaatcgtacggaactgtttttgtaccgtgaattgaagttttatcggtacaaattatatttttaaatatttatgtttgcgtgtaccattgtgtttcaacttagtattctcgacttgtttgatggtttttatatagttatttgataccgtttccccttgtttttttattgctctatttttttcttactttttcattcttatgtaatcattgaaatgaaattgcataatataccttttccccttgaaaagataaaatggaatgaagccaaattataatttttttttcatttttcttctgttgtgcacttaaatctttgcaattattttgcaggtttaatcagtttattgaaattaaaaaggaagaaatacaaatgattttcatttaagtttgattttgatctgcttgtaaagttcccacattttgagaaatctttttatgtagtagagttccttaactaggtatttgatgtaaccttttacctccttccaacaga

SEQ ID NO: 36390 - DNA, 453 bp, Glycine max
  Clone ID: PAT_MRT3847_132863C.1
ttttgtgtatcacttttgtttttttgctctttattttttatcttatttttttttttttttggggcgtggggccggtttaaataaaaaccttggaaaacaaaaattacaaggtttaagcacttggccctttaaaaaaattttttgttttggcaaaacaaagttttttcaaatatgtttaacccattcaaatttttgctcttttgccccatttttccaggcagccttaacctaaaaacacccttttttttttttttttttcccagacctgattttccaaaaaaaatctttcttgaaaaaaaatttttggaggaagggtttttttttcctttttagggtcccccaaaaagaaatcttaaaaaaaaaccccccccgggggcggcatggcccttggttggggggcggccccaaaaaaaattcccggtgttttgcccataaaaaaaaagacggctcggc

SEQ ID NO: 36391 - DNA, 1080 bp, Glycine max
  Clone ID: PAT_MRT3847_132864C.1
tgatgacgacagaaggggggtgctttttttctaatcagcgccaattaccccagtaatggtccgcaaagaccccgagtcgacccacgcgtaaggttcctataaacagaaaaaatcagtgggggggatgccgaaaacctaatcagaaaaaaaatcgtagttggaggcgccgcactccactccactccaatcaatcagatactagcgatggggaggaagcgaaaggtagcaccgaaatcttctgtatccgccgagcccccgctgaagcaacaccaaccaaaacaacagcaagacgaagacgacgacccacccgaaaatgccgctcaggaatacgaagaagaggtcgaagaggaagttgaggaagaagaggtagaggaagaggtcgaagaggaagaagaagaagaggaggacgaagaggacgaggaagaagaagaagaagaccaaaaagaccaataccagcaccaacaacaacagcaagacgaagacgacgacccgatctccaagcttctggaaccgttgagcaaggaccagctcctcatccttctctgcgaggcggcggccaagcaccaagacgtggctgagagcatccgaacggcggtccgacgaggatccggtgcaccggaagatatttgtccactgagggggctgggacacaaacgcgggaaccctactcaaatcggtccgacagtacggcgagatcgaggaactgcaaggcagtaaacgataaggctctccatcacgtcaaagcacctacggcttcttgctcttctagaccacccgcggcgcgcgccacgccctgcatgtagccctccgtcggcatcggtatccgagtaaaggcgtgccagcttgtcagtgatcaatgccgttgccgacctggatccgcagaagcttctcgcgtttttttcacggttcgtcgtcattgaggaagggccgttggggcttgacaaggccaccggaaaacctaaggggttctgtttgtttgtttacaggaatccggagagtgcgaggagagcgttggaagagcctcataaggatttcgaagggcacattttgcattgccagaaagcgattgatgggcccaag

SEQ ID NO: 36392 - DNA, 463 bp, Glycine max
  Clone ID: PAT_MRT3847_132865C.1
tagcgacgtataaccggacgcgtgcgcggacgcgtgcgcgtgtagcacgggtagcacccggtattacagaaccgggacctgctagcctaccatgttaccctatagcgagtctatttagagatcgaagtaaacatggctgtacgtggtttctgagcgaaagttgctgtccaaatcacatttgcacacaacatacaatccgtaggcatacattgtaaatttctggcagcgtgctagatgagatgagactaacgtcacgattaagatgcgttcgttctcactgtcgggtatccagaatggaaaacgggactgccaccttgaattaatgaataagcccacgcgcggtgagaggcactctcagtattgcccgtccacttggcatttcttttaaccaccgtgactggcatcagttgattgcctttctccgcacggtcctcagatagtcgcatcaagctgtacacgctgg

SEQ ID NO: 36393 - DNA, 658 bp, Glycine max
  Clone ID: PAT_MRT3847_132866C.1
aaacggggacaggaataacccccacaaaagaggaaccgggggtctttttttttttgggggggggaaaaacaaaagaaagggacccctaggggggggggcccccacaggggaaaagaccatttgccccttatgggaccacccttacaaaaggaggttaaaaaagcttattaaaaagggccccccaacccggtttataaaaccttccctggggcaccaaaaaaaacttaattgggtatttgggccccacgttttttggccaaaaaaaggcccacaggaggcaaaaaccccggggggggggccaaagccccttggggatttcgggccccccccagagggacattaagggggggacgggcccgggaaaacccccccccattttttaaaggccccaaaaaaccccggtttttaactgacattggggagcaaacaaaatttaaaacgcaaatttttgggcccccccctactaccaggaaagggggtattttattttttttcccccaatttacaaaaacatttgaaccctttttttggtttgggcccaaatatccataaaaacaatcctttcgccggatgggaacattagggtcattttctacccattttaaggggggaaccaaatttgattcattaaagccacaatacagggggggggaaaagg

SEQ ID NO: 36394 - DNA, 573 bp, Glycine max
  unsure (1)..(573): unsure at all n locations
  Clone ID: PAT_MRT3847_132867C.1
caacactcaagtaatcatccagtgcaagaagtgttacatcacagaaaggttttgagtttttacaagccagaagatgtttcaagcctctatgtgggtctatttgcttctaaatttccacgctcaattctccaagcttttcaagcagcagagatagatacttcaactgattcaaaagggtacaagaattctgagtttaacaattgcaattcttggtgtttttgaagtggctgacacaagataatggctcttcaccaccgcttgttgcttgtcgacacaaattcaagctcacctgcaccaagcagcatgaataagacaagagagactttcacaggcgatgcaaattttgacaccaacatggtgattatcttggccgcgttgctttgtgcacttatatgtgctttggggctcaactcaattgtgagatgtgctctaagatgcagccgcagatttgcttttgagaccccagaagagacagcggcacgcctggtggcgaaaggcctaaaaaagagtgcattgnatnagatncctatagnnggnnatggnnnagacaatcttngctngagcatacaacta

SEQ ID NO: 36395 - DNA, 256 bp, Glycine max
  Clone ID: PAT_MRT3847_132868C.1
gggcaccccagaaaaacatttttaaatatggattaaggggaaaggccaacaataaacaaccttattgcttccaagaaacatttttttattacactctgcgggggttgtttattttttaaagggatgaacccgatttttggacatttccaggtttatattatcgccgccaagaaaacttacccgaaacaattcaaggtggtaagggtgaatcctggcaccaaacccttccctttaaataattaaaccctttggaaac

SEQ ID NO: 36396 - DNA, 1027 bp, Glycine max
  Clone ID: PAT_MRT3847_132869C.1
aattcggctcgaggtggctagtgctgtgtatatgaagtacttatgtttcgctagctttccgttcttctctttttgttcgcttcggctcctttaggttttccttccgtgcgtttactcggaactactcttccactcttcgtttaaaatgtctgacgtggaagagtatcgttgtttcattggtggccttgcgtggtcaacatctgatagaaagttaaaggatacgtttgaaaagtttggcaagcttattgaggcaaaggtggttgttgacaagttctctgggcgttctcgtggttttggatttgtcacatttgatgacaagaaagcaatggacgaggctattgatgctatgaatgggatggatttagacgggcgaactattactgttgatagagctcagcctcaacaaggatcaactagaggtgatggtgatcgctaccgggatcgtggtcgtgatcgtgaccgagatcatggaggtggaggtggccgaggatctaatggtggtgaatgctttaagtgtggaaaacctggtcattttgctagggagtgccctagtgaagggtccaggggaggaaagtatggtggtagggaaagtacatatggtggaagcagtggtggtggttatggaccagatagagcagatcgttcttcaggggggcgcagcaggggatggtggtagtcatggagattctggaagtgatcgattttatcgtgatcgttcaggaccatatgagcgagagcgacggggatcaggaggctttcgttgatatcatgtagtctttcaatgagatgtgaaattgaagaggttgctgttaatgcttcaactttccttttcattcgcacttgacaatgctctgtggacttctgggattgttgtttggatggatcattgataccagtattttgatatgcaatactcagcacattatgcaaactctttatgttcctaaatgctgatcttttggtcttgtgaaatcttatgcatgcttgacttgaggtcaaattcgatgttgagatcaatgctatctat

SEQ ID NO: 36397 - DNA, 171 bp, Glycine max
  Clone ID: PAT_MRT3847_13286C.1
ttcgtatttagaggccatgtctcccttgtgacaatgtgtgctgctgctcatgtctgatcttgagtactatcttgaggataagtcaatgctttattaatacagtgcgatgcatcaggtgtttttgatgaacaatactatattaccttgtgcgtaatgtgtatgactcttacc

SEQ ID NO: 36398 - DNA, 420 bp, Glycine max
  Clone ID: PAT_MRT3847_132870C.1
atttttgggggcgcttttcttttttttttcttcttttttttttttctttttttttgggaaagagaaaaaaactttctccctctgccgaaaaacaaaccataatatacgaatgaagaatcctgaaaccttcccaaaacctggtccggcgaaaacccccctcccaaaatacataagggttaaacctttgggggccccacgcccccagggcacccagcatagccgcggccccaacccagcccctgcatcaaaccaagaggccaaaatcctcccaagaaaaaccgccacaaagaacacccctccacacaacaaatggatgcgcggggtgaaaagggggaaaccaagtgccctaaaaaaatttccaaactaaaatatgaactcaaaacccccccaaaaatcacatgccttcctaaaaaacccccc

SEQ ID NO: 36399 - DNA, 371 bp, Glycine max
  Clone ID: PAT_MRT3847_132871C.1
catacataacttatcgccaattcattgcataacttgtatagagcagggcctataagacttacggcttcgttagagactgaggcctccgacctgcccaagctatagtttgaccatttcttcactgacgtcccccatcctttcaacctccgttgcgagtgacttcacattccacatacaccacagctcatgatttgccaacgagacgcgctctaaaaattcccgctgcactcttaagacttggcacatcagttaacggcctgcgtggtaggagttgcaggctcctggcacatttactgcctaccgctgttaccctgtgtacggagttacaggagaatctcgctctctacacgaaggcatcatccggcatccga

SEQ ID NO: 36400 - DNA, 1480 bp, Glycine max
  Clone ID: PAT_MRT3847_132872C.1
tggcaacgtccaacctctcccaccaaactgcacggccgttccccacagcgtgcgtcagttcccggccaccaagcgccgccgttaacctccggcggcacctcccacctcctcccaagcccagaaaactgaccctcaaaaccaacaaccgctccaagtgggccattcaattgagcctagtggagcaaagcccaccaaaatcaacgttcaacatgcagcaactcgtgggctttctctacgacgatctaacccacctcttcgacgatcaaggtatcgatcaaacggcctacgacgaacgcgtcttctttcgagacccaatcaccaaacacgacactttgagtggctacctcttcaacattgcacttctaaaaaatctcttcaggccccaatttcagttgcattgggtcaaaccgacaggaccgtatgagataactacacggtggaccatggttatgaaattggtgctacttccttggaaaccggaactgatctttacaggaacttccgttatgggcattaacccagaaaatggcaagttctgtagccacgtggacttttgggattcaatagagaaaaatgagtatttttcttttgaaggtttgttggatgtaatcaaacagttgaggatttataagacaccagaattggaatcacccaaatatcaaatattgaaaaggacggaaaattatgaggttagacagtacaatccattcatagtagtagaaacaaatggagacaagctatctgggtctactggcttcaatgatgttgctggatatatatttggaaagaattccacaacagagaagataccaatgactactcctgtattcacggaaaccaatgatgctgacctgtccaaagtgtcaatccaaatagttcttccattagacaaagaaacagaaagtttaccaaatcctaatcaagaaacagttcgcttgagaaaggttgaaggaggcattgctgcagtaatgaagtttagtggaaagcccacagaggatactgttcgtgaaaaggagaaaaccctgcgtgccaatatcattaaagatggtcttaagcctcaatctggttgtttgcttgcacggtacaatgatccaggtcgaacatggacctttataatgaggaatgaagtgctcatatggctagatgacttttccttggattagcatcaatgcagtaaccgtagctactttttatcatcacttgacactatttttcgaacatatctttggctgtatatgaaagatatggttagaaattctcttatcaaggagggatgtttggaaccaaaaataggctatagactacaacattgaaagtagaaagttagtgattaaggtacatgtttattagctgctattcatcgagttgtaaaagaacattaagtttacagtacgcagttatatttattctttatgctcctgcaatttatgtatggcataattcaacaaaagaaaggtgcagcgttatgataactactttt

SEQ ID NO: 36401 - DNA, 106 bp, Glycine max
  Clone ID: PAT_MRT3847_132873C.1
ggctcgagctctgagaggcctcatacgaggtgagtaagatgaataaacactggagcaccttctcccttccggttcgtatgcttagagcaatgcgtcatctacgatg

SEQ ID NO: 36402 - DNA, 480 bp, Glycine max
  Clone ID: PAT_MRT3847_132874C.1
ggcacgctattttaggcactttttaaaaataattaaaaattataaaattttatgaatctcacttcttatttttaaaaaatctagatgactcataattttataaatttttaaaaattcaacaaataaaaaagaataaactattataaaaagtgtgataaaatatatattactatcactcctctctatttgtaaatacacattattgatccctacaacctaatccaacttaattttcgttttaacttttatacacaaaattatactgtagtccttacacgaacaatctttttaatcactataccatggccaagtgactttgttagctttggattccccaaaaccatcataaaattggaattgacagtgtgaatctgttagctagaaaattctgacaaatgccaaacaaccagaaaaatgtgcaaaacctccaaaaacaaagacctttttttaaaaaaaattgacaatttcaaaatcgctaga

SEQ ID NO: 36403 - DNA, 268 bp, Glycine max
  Clone ID: PAT_MRT3847_132875C.1
ggaacataaacgaattgaaacatcaaatggctaaagatatggaggcaaacagtaagcagacttctgttgacaatcaacaagcaatacaggaacagccagttgagctgattgatagtggtggagcacatcaagctgaaccaggaaattccattaattggaattatcctaaagaagcttcggttgactatcaacaaacaatgcaggagcaatcagttgagctgtttgatggtggtggagctgttcaaagtgaaccacaaaactccataaa

SEQ ID NO: 36404 - DNA, 479 bp, Glycine max
  Clone ID: PAT_MRT3847_132876C.1
ggggagctcatttttatatttttttatttatttggggggaatatattatttctttttaacaagctaaagcttagtaagcttcagcatgagggtgagtgttgaaaatcagaatattaggttctgattctattaataatagtggtttataggcacatttagaggaaacagaatatcctctatttatgtgaaatttatgtaattgacctatataaacacgcatccgttgtgtactctagcacacggttttcagtccattataactcatttctcctattttaacagaagtattagtgcagtattcaatactgatatgaatcagacaaggttacaacacaacacagctatcatttaagggtttcgtctgtcttaaggtcctcccccatttttttaggttgcaggaaccaattaattttctgtataacataaagcaccgagcttttatgaagcactaattccaataccattcccaaataaattta

SEQ ID NO: 36405 - DNA, 466 bp, Glycine max
  Clone ID: PAT_MRT3847_132877C.1
aagcaaattacctttctaactaatctttaatcaatcctctaataatctccgattcaacagcaagctcaatctcaaacagcaggcgaaagctgaatcaatccttccaagttccaccaccaccgtcccaaccctcttcttattattcttcttcttcttcttaatataaacaacctcatccatactaaggaaacaaacgacatatactgcaaccatatacgttgatcacacgtcttcgatatctgactaagatgtcattatgggaaccttgtacaccgtcaacatcaaacctcccatcacggacatcgccctcgccgttacccttctctttgctacatactcagcatcgtcataagctccctcatggtctacaaccatgtcatcggcgacactgttcacagcatcttctatgcaattctgggacttatcttgttcataccggtactctactacacgcaaattgcgtatt

SEQ ID NO: 36406 - DNA, 956 bp, Glycine max
  Clone ID: PAT_MRT3847_132878C.1
ctcttcaaccagcatattttttaaaatgataatatatactttttttgtgtcctccaatatccagatgcccatattgaggccatagtctagtcaggaatttgagtacattttgagggaatttaataaagaacatgataccatatcgttatcaatgcagtaagaatcacattcaactagcacatcaactatattttttatgtgttgagcttcttgagagcttgtgaatcacatgaactagactatcactaaacttacacgagttatggcacagaaaaaagcttctcatgtgcttgtatgcaaagagttaaagccacacctgctaatggtcttagtccaggtgggctatacctttttgtatttcatcactgaagcctccttcaatcatggtatgagcccttatgtgtatgtaacctatcgccatattgtggctgcggttgtgatgttcccttttgcatactttttggagagaaatgcaagaccgaagctgacatttgctcttttcatggaaatttttgtgctttctctgttaggggttagtgtgactcttaatatgtactttgcaagcctaaaatacacaaatccgacctttgttgcttccatgatcaacaccatagcttcccttaccttcatcattgcagtggcactcaggtttgaggttcttgatcttcgaaatcctcggggtatagcaaaagttattgggaccattatctccttagctggtgttttgatcatgacactgtacaaaggacccgttatgagaaatttatggcatccactaatccatattccagggaaaagtgctgctataaatgaagactggttaaagggttcaattcttacagtttcaagttgtgttacatggtctttatggtacattatgcaggcatccactttgaaaagataccctgcccaactctcactcaccacgtggatgagctttgttggagcagcacaat

SEQ ID NO: 36407 - DNA, 515 bp, Glycine max
  unsure (1)..(515): unsure at all n locations
  Clone ID: PAT_MRT3847_132879C.1
aattcggcaccaggagaaatctaataatggacttcgcaagggagcaagtatgttgttattcttattttacaatgttcatttatattggtgtgatgattgttattcttattgtgcaacaaaatcaaatttgtcttgattatttgattttgttactaaattattttgtcatgtataaagattctgtcaattcccaatcagtataatgatccttagtgctgtagaagttttctttaatataaaggagttggtttgttatttttgcagtactattcttggcaatctccacattcattgagttagtttgtatcattctgtatgcaatctgcttcaccaaattgcccatagtgaaatattaccgttcaaaagcagcgttagagggatcaaaaactgttgcagctgaccttgctgctgctggcattcaaacaaagactaatgatcaagtaatataattatcctaaaacaataaaactttactcacgtggaaataatattntattatctcctaaaagatttgg

SEQ ID NO: 36408 - DNA, 226 bp, Glycine max
  unsure (1)..(226): unsure at all n locations
  Clone ID: PAT_MRT3847_13287C.1
gtcgacctcttccattaacgagtggtgcctctcttccatctccccagccagaacctgtctcaagaaggccacattagggccttctgtcttcncaagcgtgggcgctgcttcttctccttcttctgcttcttctgcggcttccttcccttgtctcattgaagacagggctgtctttgctgcccctgcccccatcgtcaccggaactgtgaaaaaagatatgtcaaaa

SEQ ID NO: 36409 - DNA, 135 bp, Glycine max
  Clone ID: PAT_MRT3847_132880C.1
ggctcgagcactgacacagccgccagttttagctcacctagacatacaacggacacagggacatcgtaggtgcatcagtatttaaagggggtgatgaccactattccatagcgaacagggccaccctgcacgatg

SEQ ID NO: 36410 - DNA, 149 bp, Glycine max
  Clone ID: PAT_MRT3847_132881C.1
ctttttataatttctcttgggggcggtaagagaaaatagggggatttttgaacggttcaccccgcaactgcaagccagagaaaaggggaaacaacggacaatggcacaatagagaggcaatgtacgtaggaagggaaacttcacaccag

SEQ ID NO: 36411 - DNA, 161 bp, Glycine max
  Clone ID: PAT_MRT3847_132882C.1
gcggttcttgtcggctgcggtaagagacagaaagggaccgacagaaatggcggcaggtagcgacggcgtggacataaacgaccccggttcgcccagaacaaccaccagcaagagggggcgactcaccacctccacccaatcacgccgaaaaaacctaacat

SEQ ID NO: 36412 - DNA, 316 bp, Glycine max
  Clone ID: PAT_MRT3847_132883C.1
cgcgtgcgaaatctcggagatacgctggagcgctagagcccccactatgaatggtcatgaaaatggctttcgaatatcagcgcaggccatgctaatccacttggatgacctgatccttatctaggagattacataatgcacctgtgaccctaagtggggcagaggaggatgcatcgaaactgcatcctgctgctaagggttgctcccacggggggactaaggcacgctcgcaagattgcgacactggctcgccagccacatggggtgaagactcaccaagagtcaggacatgtcacaggttgaaccacaaactggc

SEQ ID NO: 36413 - DNA, 796 bp, Glycine max
  Clone ID: PAT_MRT3847_132884C.1
agaactagggggggacgctttccatagactaaaaatagaaagtaacttgtttatttattatcaagtccgtggcaaggaactcaacatgagaattaccatatatgcagcaaaagcataaagtagttcattacacttattcattattctttaattagttttgttatcaattcaataattaagcccgctggaacttcactttgtatggttcagaacttagagcaagacgcttgccatattcatcctggtatattccaatatcactgcatggataactgcaatcgttgcacacacttggacagtagaccaacttgtaagcatcctcatacttctcaatcttgaaccaattcgccacggtttgcgaaccggggttgccgaaatcaccaccagtagtcacaaaccactgtgatgttgaataatcatagtccttaagcttccacactgtggtctgtggacaacttgtggcaacggggaaatagatgttgagatcagtggaaacacgaatgacacctttgttaaaattaacaggtgtaaagatcaaaggctggccttggtaaccatcaacagctacaacatcaagagggcaatctgcacctgtgcttgccatatcaaggccacctaaatcgggggaagccggaacgatgtagtaactcgaacgagctcgaactatcttccctgatgtgtccagcacttgctcaggtgcaggaccagctgcaccaagaagtgcctttgtgctcaaggcaactataaggaccaatgttaccaatgtcatcttcatttttctgtttttagttttgtg

SEQ ID NO: 36414 - DNA, 322 bp, Glycine max
  Clone ID: PAT_MRT3847_132885C.1
ggctcgagctcttcggctggactcgagcctttgactggatacttcacgacaccaaaattacccggaggacccatagggctgctggagaaccacccaatacaggggaaccctgctcactacataatcgggattattagagaccgcacacaccatggaactagcttttttaagtgccctggacatgagcaacctgagatgtcgggtttggaacctgattatgatagggcgggcactgaaggcatgcagggcactgttagggtggagctcaacgctgtgaccactgtctacacagatgggtccaaccaaactaaactgttggttg

SEQ ID NO: 36415 - DNA, 799 bp, Glycine max
  Clone ID: PAT_MRT3847_132886C.1
ggaccagacatatttaaaagctgatgggaagaactttgctgttttgggcagtgtcagcaccccagatgttatgtatggcaccacctttagagtagaagtactttatgtgatcacacctggaccagagttgccatcaggggaacagtgttcacgtctcgtgatatcttggcgaatgaattttttacagagcaccatgatgaaaggaatgatagaaagtggagctcggcaaggtatgaaggacagctttgatcagtatgctactttgttatgtcagactgtaaagcctgttgtctcaaaggaccttggttctagtaaggagcaagctttggcaacattacggcctgagccccagtcaatcttgaagctggcaatgcagtatttagcgaacttcacagtcttcacaacattcttaatggtatcatacgtgcttgtccatatttatctggcagctcctcgcacaattcaagggcttgagtttgttgggtttgacttaccagattctattggtgaatttgttgtgtgcattgtcttggttcttcaaggtgaaagggtgttgggtttaatctcacgcttcatgcaggccagagccagagcacgcaagggtaatcccttagttgcctttattttttcaatgatccttcaatttgagaattccctttattttaaacactcatctgactggggtgtatatctcagagcaaatgaaaattcttttgtcttttctattggtcaaagaataatgccttaagatagataaacaaaataagaagttggggaacgacagaccctcctaagaaaa

SEQ ID NO: 36416 - DNA, 511 bp, Glycine max
  Clone ID: PAT_MRT3847_132887C.1
tcgatcaatgtcaaaacattagacaaattgatcatatattactttgaaatctggggcctctaacgcactagcctcacataaattatatgttgatcatacacagcggtgattgcagcaaaagaagaatggtttatcaatggttttttattatcaaattcatgtgccttctttgcttcgttgctggtcagaacagtagcaatacacaaccacttgattatagatatgcttgtttggaccaaacttctgttcctccttctactacataccaaaccaatctcgacgatttgatctcttccctctcatctgattctgctaccagcaatggttttgggaatggaacttcaggtattgatgaaaacatggtttatggactctatctttgtcgtggcgatgtgaacaccagcctttgccactcatgtgttcaaaactctagcatattgctcaagcagcactgccccaacactgcctcagctattttgtggtaccccctttgtcttctgaggactcaaac

SEQ ID NO: 36417 - DNA, 426 bp, Glycine max
  Clone ID: PAT_MRT3847_132888C.1
cggacgcgtgggctggccaatattatcctgagggggctccaagtaactgtcgggttcatcgacaaccaatgcacatgactgaaggaaagtatgtcagacagcaggaggccagcattgaatatgatgcgtgtacaattccacatgattgtggtcattggacgatgccaaggtgggaaaccacaaacaaatacgtggggtacatggtgctgggagcaacggaagactgggatatgcttcattgctaccatatgttgtgccagttgtgcacgctcaaagtgctgaagggtactttgactctttacctgcggaggatgatagtcatgagggagtggctcacattggcgagatcgaatctggtgtctatgatgcactggctacaaaaactaatatggtgggaactgccagggcatggcgactggatctacc

SEQ ID NO: 36418 - DNA, 277 bp, Glycine max
  Clone ID: PAT_MRT3847_132889C.1
catcctcctatcctatcgtaccgtatgtgggcaatgcagagagagagagagagagagggaggagatttattatggtggcagggggaataataaaaaaaaaaaaaaaaaggagggtgaagtcaaaaatggtgagagatttgatttcaggtcaaaattagagttttgataggcagagggtaggtggtgttgggaatagtggatagaggtagtagctagtaggaagcagaagaggtgaagagagggagataaataagatggtggtgggtctatggtgggg

SEQ ID NO: 36419 - DNA, 207 bp, Glycine max
  Clone ID: PAT_MRT3847_13288C.1
aacaaggaacttctattatatattgagtgactaaccataacctttagaatctctacaaacttagaaaaactcgtcctgtatggttcgtgtctctccatatccttatatggcagggaaaaaaatggaatacatcataactgcatctagttattgctttgagctaacctcagtgaatatagctaaataaaccacttgagggttacctat

SEQ ID NO: 36420 - DNA, 700 bp, Glycine max
  Clone ID: PAT_MRT3847_132890C.1
cccacgcgtccgcccacgcgtccgtttccctatccttcttccatttgtgtatgtgtcaactccttccatgcatttttggccttttccacttctactctctatgcattattttttcgtcaccttttcacgcctcttcatcactctgaattctgacccttcataccttccttcaaaaaaattccatttttcttcccttcctcgcttgttttctccaaaatatcatctgggtattccctggaatttagtggggtgcctttgttttcttcatcggaaatcgttgttgttgggttccaagcatgggaggctgttgcagccacgatgtttcggttcgagggaaggtggagagcgagatggatgatagagaatatgagtatgattatgaaaatgatgtgtcttatcaacaaggtggagcattggtcaggttaagaggttcctctaggtttgcatcaatgtactcccaacaaggccagaaaggtgtgaaccaagatgcaatgacagtttgggaggactatactggagaaaaagatgtgatcttttgtggtgtgttcgatggtcatggtcctctacgccacaaggtttcacaatttattcgagacaatctaccctcaaaactgtctgcagcaatagaaatttcacaacagaagacaatcaaatactatgatgccaatgatgcagaaactggtagctttgatgatgccta

SEQ ID NO: 36421 - DNA, 455 bp, Glycine max
  Clone ID: PAT_MRT3847_132891C.1
cggtcttttgggcggacgcgtgggtgcgaaatagcgactgaccgggatcacaggtcgctgcaccttaaaaccggaagcaaaggcagtcgttactggatctcaagaatctcccagctactggctgcttcttggtgtacgatttcttaagggaaagaaaatcactctgtgcgctggccacagacttggtgaatgattatcttttccactcttagttcatttgctgaacactctactattcgatataggacttcatgtgagatttaaactttttctgctactttctcagatctctgctaaattacaagttcaagaatggtgaaatgttggattagcgctcccactctcctatctggcataggactacgcgggtagactattgtatgtatgtgctttctttcactctctacgactcactgatcccgattgccgatcaagtggtcttatctgaaaacact

SEQ ID NO: 36422 - DNA, 367 bp, Glycine max
  Clone ID: PAT_MRT3847_132892C.1
ttgccttgagcatgaccaaaacaggaatgatgcttgcaactgatgcactttatcctacttggacactggatgagaacaactccataccagcgtcgacgttgactgctagaagatcctgcttgactcctgcacgatcatccgctgaccatctatgatgtggaactcgatgttgacaagatgtatggtgctagtgatcatagagcacctgatgtctaatattgctcatgatatacactgctgccttatcatagtacctgaagaaattgatgctggctaccatagtaacatgtttggctatgccactgatgaaactgctgaattgaagtcagtgagctgtgttcttgcgacataactcgccgctcgcatc

SEQ ID NO: 36423 - DNA, 131 bp, Glycine max
  Clone ID: PAT_MRT3847_132893C.1
agaatggttaaagggagaggggaaggaggctcggcagggaaggagaggggatcgattcctcagcagcaccagacatttatataagctctatcccgttcatcaaatcgcgcatactcttacaatcttttgtt

SEQ ID NO: 36424 - DNA, 374 bp, Glycine max
  unsure (1)..(374): unsure at all n locations
  Clone ID: PAT_MRT3847_132894C.1
gtgctatccgtgagcgcctggggccactggnggagcagggtcgtcagcgcacagcctagctatgtgctggggccgcccagcccctgggcgagcgcgcccaggctttgagtgaccgcatcccatggcgggtggaggaagtgggcaaccaagcccgagatctcctatatgaggtgcgtgagcagatggaggaagtgcgctccaagatggaggagcagacccatcagatactcctggangccgagatgttccaagtccgctttaagggctggttcaagacgccagtggaagacatacatcgccagtggggaaacctaatggagaagatacaggcctctgtgggtaccaactccattggctgcaccacaatgcccctg

SEQ ID NO: 36425 - DNA, 291 bp, Glycine max
  Clone ID: PAT_MRT3847_132895C.1
ctctatttgattcaacgagtacgctagaccatggatcgcgtcctgactctcttctgaatcctgaggaatgggcgaagcttgacttcagagaatactagggacagctggttgcgatactagaacaggagtatggctgccttggctcgagctagctgtagcaagagtgtgatagcaacaacaagcttcttcattaaagatacggctgagagtactcgcttccccagaggcggaactcagactcgaagatggaacatactatgaaacttacgtgatgcctacgtgtagcaatat

SEQ ID NO: 36426 - DNA, 308 bp, Glycine max
  unsure (1)..(308): unsure at all n locations
  Clone ID: PAT_MRT3847_132896C.1
anccnnancacnnagtcgcatgcacgcgtacgtaagctcgggaattcggctcgagngcgaanagnatgnnngatctggggtaanntgatcanaattcnaggctaagtatgcatttnanngnantgnatttngagcattacatcttcattcanctccatcttcctccaggttattccanttcctttgtctcttgtgnnttngtnntcngtngtgacantgagaaactannccttctatngttgggannncacccannaaanactcttgatgtaatgatngtnantanntattnaatatnatgtcgataa

SEQ ID NO: 36427 - DNA, 411 bp, Glycine max
  Clone ID: PAT_MRT3847_132897C.1
ggctgtgctagttagcaggcattcaagagaatgaactgcggcaaaataaaagtattgcagcaacaacttagatagaataatccccaattccaaatcgtagtataaaaagcatagcataagaaatacaagccatggttttgttctttctgattacagcaacatacacttaataagtgcaaaggagggaaacatgtaattaatggacactaacattgtacaaactatatcttacaacatgctctaagaggcatggtactttcgtgtgaataaatgacaggtcacctgactgcatcacatcaatgaagccatccttcttaattctttccaaataatctttaccaaggcgttcttcaagccctgccttcagatcataccgtccagagaggttgacaactgctttaatgtcatgat

SEQ ID NO: 36428 - DNA, 509 bp, Glycine max
  Clone ID: PAT_MRT3847_132898C.1
tcgcgatcttcttcccattgatgtcactgcatctccaggcgccgatgtcctcctccacttcgccttccctatactgggaaccgtgcgtgaagttgctggcaaagggttcggaggagatgacgaaaggattttcaatttgttttttccaagttatttcttcgacttgttggtggtactgttgagaagctgagatcgttgtcggtggtgatggcagacctatctggtggaccaattacaaactgctctacgctagccaaacccatcttctgttgtagatctcaacaactagatattgagcaaggatgctaacgtatcttgtactattgtaaaaaaaatctcaatgtaagtggattacttgagttgtctttagtagttaggacttgggagtgaaattgatttcaaaatgtaagcgaatcaaccaaggtggtagtaattataaacctgataataagttgtaactctaaagtaacgtcaattgataaaatattacctcttgcatttcctgctac

SEQ ID NO: 36429 - DNA, 518 bp, Glycine max
  Clone ID: PAT_MRT3847_132899C.1
ccacgcgtccgctgaaccatagccgataccggatgatgattatagagatgaagaaacggatgtttaccatctcaagaggaggatgtggagggaaacattgcgcctgaagcgagagacagagcagagtaaccctaccgagggacttgatgctgtgaagcagaggcaggcccgagatcaagcttagaggaaaaagatgtcacagggctctatatggaatcttgaattacatgctgaactgatggatgcttgtaaggcccagggtcctgcctatggcattatcgcaaataagggagaggcagcgactggacgcatcggatattctgcaggaatggtgtaacgacaaatatcggccagatcaaacagggcctgctgccataaccaacactcacgctgatatcgctattccgaggaagaatgatggaagccatccgatcggtgccaacaccacacaccttgctagaactgcaagacacaaccttgcgtgctctcttgacagcactcatgcaggactgtgatcc

SEQ ID NO: 36430 - DNA, 597 bp, Glycine max
  Clone ID: PAT_MRT3847_13289C.1
tacggctgcgagaagacgacagaaggggtcattagaattaatgcttactgactttattgtggccattgattctggcgttcctcgtcgaccccctgctggaaaacgtgcagatgaccaggttaattatcctaagttggtcgagttactactcaatagctcagagttttcctctaacctgttacatgatataaccggagggagactaggattccctcatccagaagacacaaatacaatcattgatgttcatactactgatgtaacatcagtagttcatgcgttccgtagtggttttcgtgctgctcttagggatctgcagggattccacatattcctactcacactgcatcaaaaacttgataatttgttaagatcatttatgaatactataggcaaaatatcatcaggggagtctgaaaaagaggatgcagtggttcctgactcaccttcacccactgttgtgggtagttgtccctctccatctagtaaggaaaggcttctaatgatgtccatcaagattgtagtgattcagaatctcagagaaccgctccaaggacatcatcgtcttcaggcaatagagattgttgcgatctgctt

SEQ ID NO: 36431 - DNA, 408 bp, Glycine max
  Clone ID: PAT_MRT3847_1328C.1
tcggaattgcggctcaagacaacacatggcctgcctatgttagcatcaaatattatgacgtatggctcaaacccaggggtggtagagttcagattcaaatcgtacggtgacagaaggatgcaaattgatgcctactcggccgaccaatatgcaatatcaccggcggtacatcgcctccaacgcctctacagtgctcccaacaacggcacagcaaacccacatgggaaactacgccccctagctttataaggtaaagtcaccctatgggtccagatgcaaatctgggagctatacttaccctgacttgcaaaggaaaaagatgattgttagtttcaagacctatgctgatgatgggatactcaaatgcttactcacgaagagattcaagtggttcaaagacacgttcaa

SEQ ID NO: 36432 - DNA, 339 bp, Glycine max
  Clone ID: PAT_MRT3847_132900C.1
tacggctgcgagaagacgacagaaggggaaagggaggagattagagccaaagcttcattgggagcggcttaagaggccaggaggagggcaaaacaagatgcacaagagaagaaaggattcagagatgaaagccaggttagaggccaaaaaaaaaggacctgccttatcttcgttggctcataacgataaccggtatagaaaatacactatagtggagattgaagcaaccacaaaaaagttctacccattaaacaaaattggtgaaagtggatatggacctttgtattaaggccaccttgatcacaccccagttgcaatcaaaattttaaggcctgatgc

SEQ ID NO: 36433 - DNA, 303 bp, Glycine max
  Clone ID: PAT_MRT3847_132901C.1
ggctcgaggcataatccattctatttttttagaaagaggaatagctcgagcagacggaatgggactagattctggattgatactatcgcaaagtgtgaaggaatacaacgaacacctttattctggccaagatgatcctacagcagctccaaaggcaccggattaagggacgaagaaagggtgcctgaacaggacgggaggacctgcaaactcttaatgtaactacggacgagttacgcatagcacatggggaagatgggtacatgagattagaggaccccgatacatgaagccggcttaggt

SEQ ID NO: 36434 - DNA, 495 bp, Glycine max
  Clone ID: PAT_MRT3847_132902C.1
taccggtcgcgaaattcccgggtcgacccacgcgtccgcccacgcgtgcgtgctcgcgctggggggggagggggaggagctctaaatctatcttgaaataatttttgtatatatagggggctatagagggtgcatatttgtctttgtattggtcttgtgtatgggatggagccctcgaaactgcccttaggacagactttaattgagaccatactgaggggggggggaatatgggaaaggaacttaaatatcaacttaaaattaattgtgacatgggttattacatgggtaaaaaaaaaaaaaaaaaaaaaagggggggccactctgggggggccaatctaacatccacgttcatgcaaccggatatgccatctatagggggacctaaattgaaaccaatagccaattcactacaacggcggttaacaaggaaaaccattgggaaaaccaacttaatacccaactaaaacatcctcctttacacacctcttttaa

SEQ ID NO: 36435 - DNA, 317 bp, Glycine max
  Clone ID: PAT_MRT3847_132903C.1
aggggagagagcagcgagtgttgtgttggcaattaggacagagacgatggatgccgctcaagttggagggaggagccactgtcggttcccttctccgatgtgttgcaatttctcactgttcacatcgctggagccgaagatcactagaggttcttcagctggaatgtgacgtatggtgacatttaaccacttggtgttcaccaaacgggaatattgataaacgggcaaatcttatatccagatattcattctgttaccaacgacatcctcatcatcaatgtcttcaacagcttggctgagccctttcttctctcttg

SEQ ID NO: 36436 - DNA, 345 bp, Glycine max
  Clone ID: PAT_MRT3847_132904C.1
cgtcacgcctcccgtcctgcatgcatgcgctctattttgcagcttcttaaaaatgcgttatggaactatgggtgtgcatatcatgaatgcttttatgtaacagccaaatgtgtttctcaactcgtagtaaactgataatggaaagagacccgggtatgggtgtgaacactcttatggaaatccactgggcttggctttaatacttccagggaagccatccaatgaacctacattgactagatgtgtcatttaagtgtctatgataccattcgtggccgcatcttggctataacatttcacagtgctaagatgaacatgactattattggtaggaagaattatctt

SEQ ID NO: 36437 - DNA, 219 bp, Glycine max
  Clone ID: PAT_MRT3847_132905C.1
gaccccgcgtccgcccacgcgtccgtacttttgcgagaagaggacagcagggaacatcaaacatgaatcatcaattcatggcagcaattaaagtgttttggggtatttacatctcatccatgaacttataaacataaacataagatcataaaatctacccatggcacattttcattcatgcaaaggaagaaaaagagagaactcacatcctttaacctc

SEQ ID NO: 36438 - DNA, 343 bp, Glycine max
  Clone ID: PAT_MRT3847_132906C.1
tgacaaaagaacaacaaaaggggaaaaagtaactgtgctaatcgaaacatctgcacatagtgtgctgaaaatgcatgtccctgcattcatcggcgctgtcaatatgggaaccaggcgatttcaaacatatgacagtttggctcccagaatcaatatgggctaagatgaccttaaacccgatgtcataaacgaaactttcatgcctactgattaatcacatacatctttggctattacagtattcacgaacactgcattcatcacaatgtcgaagtaaacgatgacaaaacacttctattagatgacaaagcagtcaatgaatatgcatacatttacgccaaag

SEQ ID NO: 36439 - DNA, 484 bp, Glycine max
  Clone ID: PAT_MRT3847_132907C.1
ctcgagccgcaaatgggctaataagcttttattcaagatttgatgagatattagctgctttgtctttgttttttgacaggagtgaaaaaccgttgatcacttggaattctatgatatctggctgcgttcaggctggaaaatcaagtgatgccatggagttgttctgccaaatgaacatgtgtggacaaaaaccagatgcaattactatcgctagtctactatcagggtgttgccagcttgggtacttgcggattggagagacgctgcatggctatatccttagaaacaatgtgaaagttgaagattttacaggaactgctctaatagatatgtatactaagtgtggaagattagattatgctgaaaagatattttatagcatcaatgatccatgtttggtaacatggaactccatcatatcgggttacagtttatatggacttgaacacaaagctttcggttgtttttctaaactgcaagaaca

SEQ ID NO: 36440 - DNA, 323 bp, Glycine max
  Clone ID: PAT_MRT3847_132908C.1
ctaaagtgagaaagaaaaagggtgggaaaagaggcagacgtgttcttgggagctaacaaattctcatagaggcaacacgatcggaactgcgggtcatagccaagacagatggaaatggtctacacatatacacacccgcgctccactattggagccgtaccaacttactttttggtccttgtaccgagacataatagtctagtttgtagccacttttgtctatgtttacataaccatcttaaaactgatgggtgttaattagttcagattgaagcgtgctactgtttgcattcaaggcattgcttgggccttgggtggcatga

SEQ ID NO: 36441 - DNA, 397 bp, Glycine max
  Clone ID: PAT_MRT3847_132909C.1
atcccctgctgactgacgcatcacacaccacacctgaaactttagcatttatcaacaatctccagggtaacttttctggaatttgcgattaatcaaccagtattaacagctcgctctccttgacttattcaaataactatcggcaaactaactgctaattgcttctaaaagcatgtgacgcctgacacatctcaatacctctcaccaattctcacaacaatatgaatttagcttcctttggctacatcatcattattacccaagatcaaactattaaatggatcatacatgcacattctcgtattatcggcattagtgaacagtttcatgcttgtgcgttaaaaaacaatgttattcgatcgcttatctatacattaaaattttgatcttgattaca

SEQ ID NO: 36442 - DNA, 162 bp, Glycine max
  Clone ID: PAT_MRT3847_13290C.1
attatcaggaacagaggaaaagataacgttcaacggaagaagcaaaccacaatggacagggtcaaaaactgcgctgtagcactgggggtaagatgacagccaaacacaggggaatatgtaacgaaccacactatacactggaacaggaaaagctatatggaa

SEQ ID NO: 36443 - DNA, 2063 bp, Glycine max
  Clone ID: PAT_MRT3847_132910C.1
cggaaaggctcgagctcgagccgaagccggttcttgtgggtgttgttggattggaatcggagagaaatggagagcagcgccgtctacggaagcattcgaccaagttacccgatctgcccctctcgacgttcttcctctcttctctctcaccaatctcccttcctattcgagccttctctttctctcaagcttcgcaagcagtttcctctcatttcgcagaattttctggaagccgcttctcctctcaggccttctgccactttgtcttctgattcctaccgcgcccacgcgtccgtacggctgcgggctgttctcggaaggggaggagaccagacagtgtcgcagctctttctccaatctccatcctgtaagtttagggtttttcacaaattgacttttcactccttcatcattcccatatactttcttcccaatctccatttcaaatccataatcgtctcatcgtcatactacgcaggacttcgcttttttgcttgccgtatttttacgaagcgaactgtctcgatagggataccgtcacgttgtattatgaatcatttcgtgttagagcttgataacctactgattattctcttaacatgatctgaacaccaattccaagatttccttgtaggatgatgcaagactatgaggagggtagattagcactctcattttacggctgtatcatttggggtgggtattgctttgggttgatttactcaacttgccattatatagcagaatatggctctaaggcgatggggaaacggatggaagatgcaagtcattaatggatgcaaatagaggcttcaattgtaaaacggtccatggtagaatgctgctctttcagtagttcataaaagccattctggttcatgctcatttcctgtttctggaccacaaggcactggtgtcttgcagcagagggaggttcgaaatggagatgacccttggtcttcgtttttccttcctcgtgattgggacattttaatcatggatgctctcctccatgtacctgggaatgaggagaagcaccaaacactgcggatcaatcttgctgacaagcctctttcttgtactacttgcaccgagtgcacacctcatccatcagaaaattcaaaggcaaaattgagttctaagcaataaaagcttaattggcagtttgacacaatatttaattcatctaaaatcaagtttttgacatttttatgttctaaaccatttacatgatttttagactaggtgggcgtcaatatttggccgacagaataaatttattttcaaattttcttctggtaatgtgttgtagtattattcaccagtcttatttcattgtgaaaataaattttgccttgtgcaatgatgtcgattagtgtcagtggatgaattgctagatgctgacgaggtcttctgcacgggaacagctgtggttgtatcacctgttggcagtattacttatcttgacaagagggtagcatatggggatggtattggcgtggttgcacagcaactttatactgtccttaccagattacagatgggtcttacggaggatgagatgaattggactgttgagctgagataagcgcaccatgaatagtttgcagttcatgttttgctggaacacatgttcttttaaaatttccgagctctagaagttgcttttaaaattttgctatcatatgattagatgctgtagatagtattatggtgtgtttattgctattgaatgactatagcaagtacatacggttgcctcttgctatctggagaaatcgttgctagtggattagtaaaccttttcattggtcgaaaaatagaattctggtagatgcggtaattgtgtaccctgtttttttaacaatatttttggtggacgtagaaaaagggccatggcacaagtgtctgagaatagaaaagtaggggtaaaaccagcggaagagttgaagtcctacacatgctcaattgatgttgcagggttctttactttttacaagttcgcgaaaacttagtttccctgacggagctacccaaagatttttagctaatgtttcttggtt

SEQ ID NO: 36444 - DNA, 462 bp, Glycine max
  Clone ID: PAT_MRT3847_132911C.1
ctccttgcctatgtggttccactaagtgtcggggacgcctgtactagaacctcaacatccatgctgttatcttcagatagttcaatttgggtagcaaatgattcactcaacatttcaacattccaatgaggaaatcatgcctgcctaattttgaagggttacagtagtcttgatctcttttaacagatgacactagttaaggcatctatatgaagccaggtattaaattgctagctgtctataccaaacttgatcgtgctaaaatgattaggattttttgctgtgtaaaatttccctccccctctaagtttttgtagctagttgcacttttgttttcttttctcttcctttactctctaattttctccatccaagtgcatgtattcatgaaataattagggaatggccatttgttcctaactgctcatcaaattaatgaagttcaagagaaaggaagagaca

SEQ ID NO: 36445 - DNA, 710 bp, Glycine max
  unsure (1)..(710): unsure at all n locations
  Clone ID: PAT_MRT3847_132912C.1
ttgatgcctgcgttaatttagagatgctataagctcattcggtccaaaagtgtccaacattattatatgaatgcaacaattttcaaaacatgtagtaaatatcaatgaggaagttttcaaaacacatcaccatatattacaatttacaagcaaaactgacaaggatttgcaaataataataataataataataataataataataataataaattaatgaatgaataaatgaacatactagtgcattgtagcacatgcatgatacaagatccacaatttaattatttgaattgaccataaacttgtctaggaaataaaaaaatggaaaaagaaaaggccaagatccataataaaaatcaagatagaagagaagaggacccttatgctaatccgaagaagaagaaagaaaaaatgaattgaatcaatttaaaacaagttttccaaatttcatttatattattatgttaatagagcaatgaaattgaaacctttacattagctccggcttgaagaagcttctccacacaggcgatgttcccatgcattgttgccaacataagcggagtctaaagcattcccgttttttctttcttccatattaagtgcaagaagtataaacccatatggaaacaaacattgaaaatatgtttgcaaattaataatgaacatcaattntaaaaagccaaaatatgtttgcaaatatgggagct

SEQ ID NO: 36446 - DNA, 608 bp, Glycine max
  unsure (1)..(608): unsure at all n locations
  Clone ID: PAT_MRT3847_132913C.1
attcccggngtcgacccacgcgtccgttaatgttccataatggtagctagctatagccagcttttttttttaaaagggttattagctttgctgcaccttcctcgtgtgtgctgttgtgctgctcttgttttttagtgtggaagaatctgtaaagctcaggagggatagcgccatggatgatctcttctccactcttgatcttctcttgcgctatccatcctgagtttcatggcttctatccacacacaatggaagaagctcctctctgttttttgcctctatatttgcctgaatcttgacttttcaggagacaccccccaaaggaaaaagaaattggtctcttaatcatcatgccctactctatacactagtcaagttttgtttccccaagtgaaagagagtgcctaaggatgaagtaataagtggaagaaagtagacaccaaaatgtgttaagcctcttgggttgtgtagagtgattctctctttaatttgcttcaaagttttctctttttaaagtgtattttaaaagttgatgactagccaaaatttggtatctgttaatgtctatctaacactatatccatatatgctacaatataagttcaagt

SEQ ID NO: 36447 - DNA, 362 bp, Glycine max
  Clone ID: PAT_MRT3847_132914C.1
gacgtaagctcggaattcggctcgagcgtcaaatcacagtattcttattgccgagagagagaaagaggagaaggagtagtgataaggcgatcatagcagcagtcccaagagagggaaccctaaaggagggaggcctcaagaaggagcacatggcgtgtgaggaaactgaacgcaggctaggacggcctgaaaacggctgacctgaaagagggcatcataaaagaaaggggacaagggcgggacagcccctgaagatgaaagagcatgccgccagcacataaggttctggagcgaccactgagaagccgagagagagtatgaaacacgctggtgcaagatgccgcctaacgcaacgaatgggc

SEQ ID NO: 36448 - DNA, 197 bp, Glycine max
  unsure (1)..(197): unsure at all n locations
  Clone ID: PAT_MRT3847_132915C.1
gctnacaagagcaagggagggcngggnggcanggggccaaaacnnaanngagcangcagaaaggncaagggcacaagccngnacagannccnataacaagacnctaaagaagnggcagggcnggcnngcaagnncaagcggcaggggagcgaagaagttggtgtttganaggaagaaanncanggaggngacacaag

SEQ ID NO: 36449 - DNA, 702 bp, Glycine max
  Clone ID: PAT_MRT3847_132916C.1
tcgagacgagatccctgtgaaaatcgacactcagacttttgagattttactacttagacaaattgatacacttgccaatcggttaacaaattcctgaaacgaatttgtggtctactgaactctcaaagcttgcagccagtgcctttatggcacagaggatcacatctgtgaatgacatgtcagcactctgtgagactattgatgctgatgtgtcacaggttatttttatttttatttttttatttgtgattgttagttgttagtttttgttagaacatctccaatgcatgatgcttaaatgaattgcttaaagttaaacaatgtttcttaacaattttttttattagaatggatgatatgtcaatgctctgtataattgagttgtttaattgattattataaaaaaagaccaattttttaatctaaaatttaatgtgactcaagttaagtgcttactttaaaaactttagagttgaagtaaatttttgtataaagttcttaaatctatgtggcatttaattgtaggattcacaaatttaagacaaacaattcatttaagcaatcatacatgatagacgctttttgtggagaaattcgaacccccaacttctccttttccttcacttcactactaagtcaaccttataaccttctcttatgtgttacaggtgttgcactcaattgggacagactcaagggttg

SEQ ID NO: 36450 - DNA, 346 bp, Glycine max
  unsure (1)..(346): unsure at all n locations
  Clone ID: PAT_MRT3847_132917C.1
gnnnncaantccagtgcnacacgcntctacccnccgnnnncgtcgnangnnatgnnntnnncttcacntnntnnnnnnnaancnaccnncatgcacnnttntccatnnnnancatcanatttccaaccccntaacnnananttgantcnaactananatgttcaagtnggnnnattcatngnttccanannnacatacacccnnaatcnaaccngattaancncttcgctatgggctncncnnccttnattgtgncanctnnnatnctaangctcttnnaagtcntcacaatnncnnnaacnaaattaatcatnntctnnnactacntntttctcanatnngcncc

SEQ ID NO: 36451 - DNA, 803 bp, Glycine max
  unsure (1)..(803): unsure at all n locations
  Clone ID: PAT_MRT3847_132918C.1
atgggtggaaccaagagaaattgttttgccgcggagttatctccatgcatgggaagtcgtgtggctttgatttcaatgactgtttatgatcacactatcgaagagcatgaccaaatcagagcaagaagtgacccagggacaccactggaatggaccgattacaagtcaatggcgtttactcaatgtgttgtgaatgagaccttgagagtggcaaacataattggtgggatttttaggagagcaaggacagacattgacataaaaggttacactattcctaagggatggaaagtctttgcatcatttcgtgctgtacatctgaatcctgaccattacaaagatgcccggtccttcaatccctggagatggcagagtaactcatcagaagcaacaaaccctggtaatgtttatacaccatttggaggagggccacggttgtgccctggctataagctagccagagttgtactttccgtcttccttcaccgcattgttacccgcttcagttgggttcctgctgaggaagataagttggtgtttttcccaactactaggacgcagaagaggtatcccattattgtgcagcgtagagactagagaggaatgaccatgtatagcaatatgaaaattaagagcacaacagatagagaagggaaaaaaggaagctgagtgtagatcagtttaataagttaattttcatcacatgtaaataaataataaaattcatatctccccgttcatatatcaattgtctctgcaatgcccacccaccaanaaaaaaaaaaaaaaaaaaccaaggaaaa

SEQ ID NO: 36452 - DNA, 721 bp, Glycine max
  unsure (1)..(721): unsure at all n locations
  Clone ID: PAT_MRT3847_132919C.1
gaagctcggaattcgggcgtccgaaagagaaagcgcagggtccgacccgatacctcatctttcgccctagtgctcgttttcagagctgcaaaggaatcgacacagaaagtgattaaaaaagggagaagatatctttggtgtcaaacgctccctgattcttctgctgtggactccacttctctactgttccacctctccacactacgattctgtgaaatctctgaacgaacgctctgtaattggtgattttggagccgaactgtttcgtccaatgaaaatcaatcgcgaaagtttccgttgataagtcgtggagaatttactggtaaaatttgatccagttaaaacagttattcgttggcgaaattgagtgaatgcgtctccgatcttcagccggccggggacgtaatctgagaagatctgagaatttttaatactaaccgaagctgcaagttctcgaatcccgtgttcgtttccgaattcaaacgggatcgaattctatgagatttcatctccggaaggagcgaaattcaaaattccgttgaattaccgggaaggaaaaggaaaacagaaaaacggaaaagcatcatattcanngttttgatggagctttctcaagcacgcccccttggaaccgaaagggaggaacccgacccatgactttctgtcactcttacagaatttcaactgcccaacaagatccaaggccacctttctcaggaaa

SEQ ID NO: 36453 - DNA, 495 bp, Glycine max
  Clone ID: PAT_MRT3847_13291C.1
ttacatactctctctcgctctggcttcgactggcaactgactgcggaagattttcatctatcccacctcatgtcttctttacaacgtacgaaaccgatgaaatggagataatagttgtgagcataggcggggcgaatttctttttcataatcaaactttgaggggcacgtaacttgtagacaattgtcagaacaaggtcatccttctttcagctaagggggtgagtataatgcaatagatcttacctgttaacacaacatccttcgcgatatgagattgtcatgacaatgttgcggccgtagtcgatctcgacatctactatcgctatctacacaaccaatatgattctgatgatcatcatgctagtattgcgatcttcacaagccaatcgctcaaaaggcacattgagtacctgtaaggcgtgttgatgcctgtactcaactgtctatgcatgtcatatatgcaaccttgctttaattaacacctagtgctatg

SEQ ID NO: 36454 - DNA, 206 bp, Glycine max
  unsure (1)..(206): unsure at all n locations
  Clone ID: PAT_MRT3847_132920C.1
cttatgaggagaggnacgctaagtcgttggacacggtggcagcccatcaactctggctgctgagtctgatgaaaatgatgactagatatgaattgcggctcccgtctcataactgaacgagtaaaaactcatgtaccttgcctgtgctgatgatcatctatatgcaaaattaaggatacttttgaatagtcgacatccttattttt

SEQ ID NO: 36455 - DNA, 481 bp, Glycine max
  unsure (1)..(481): unsure at all n locations
  Clone ID: PAT_MRT3847_132921C.1
gcttgtgtatcccttctacggtgcctccatagatgtctgggaaatcctgtacctcaagttttgggatttgttatggaaattttgatgacattgcaagttatggtggagaatatggagccagagaaggtgatactctatcctcagctattttgggggtgtgttgctatgatgcacacggattttgtccatgtctaccgccaggttctagagcttttctctcatgtgattgatcgtttatctttccgtgatcgtacaacagaaaatgtactcctttcaagtatgcccagagatgaacttactactagtgatttaggagaatttcagcgcacagaatctaaaagtagctatgaacctctacaagaggggagnttgccaacatatgaaggggtgcagcctcttgttcttaaaggacttatgtcaagtgtcagtcacagtgtctctattgatgtcctctctcgtataacagttcattcatgtgatt

SEQ ID NO: 36456 - DNA, 386 bp, Glycine max
  Clone ID: PAT_MRT3847_132922C.1
aattcggctcgagggaaattcgaggtggcactcaattgccggagtcagatatagttaaatcttgtcgaagggttagtcattatttatttatttattcattttcacatggaaactgggttataactggtagctggtttgaagctgaacactagtctgaatctgtttcaatattttcttacagttgttggatgagaggcagagtttgaatgtgtggcgattcctggaagctattaacgagtatgattacactttcaaaatagtgattctcgtatttctttttgagggaagagtaatgtagaagtggtgattatcaggaagttattaattattgctaaggttgcagcgtcacttagaaagtggttattgttataattgcactcttggct

SEQ ID NO: 36457 - DNA, 342 bp, Glycine max
  Clone ID: PAT_MRT3847_132923C.1
cccacgcgtccgcgagcttcagcaattgtgtacttcaatgttcataaatcaaaagcctacttcagtatatagcaagttttgttcaagacaataagagagggaaaaaccgattaccgtgccaggattcggttgattaatcatgacatgaacaaatataacactccgaaataccgatttgtggttcgctttaacaacaatgacattgttgcacaaataatatctgctatcattgccagctatttacttcttgctacatcatattcacatgagctgtcacgatatggtcttgaattatgacttacaaattatgcatcatcttattgcacttgtctcctgatggcc

SEQ ID NO: 36458 - DNA, 116 bp, Glycine max
  Clone ID: PAT_MRT3847_132924C.1
ctagatcgcgaggttcgccctttattattttgatgagtactgtaccttgtttagacggtaagaagactctgagatatttcgaattccacaagcagctaaagggttttagtccattc

SEQ ID NO: 36459 - DNA, 223 bp, Glycine max
  Clone ID: PAT_MRT3847_132925C.1
acgcctacctacccaccaccaacaccttatactcagcgggaagcactttcattacgtacgttccctcgacgactacttcatccataatgaatgcgctctccacctcatactccgccttcgtggcctggccggaaacctcactagtactacctacaccactcccaataatatcaagcacaatcacaagaaggtctagctcggcattcttcacctctacaaagtc

SEQ ID NO: 36460 - DNA, 668 bp, Glycine max
  unsure (1)..(668): unsure at all n locations
  Clone ID: PAT_MRT3847_132926C.1
gaagaatcttatgtgctgtggctcatgtacatcaatagtcgggggaagcttgctgaccgattggttgcctatgatactgctctttcagtgctctgtcagcatgcagctgccagtcccaaggacataatacatgaaagtccatgcatcttagacctgtttttacagatgatgcattgcttatgcatgtcagggaatgttgagaaggccattgaaagaagttatggaatattccctactacaacaaaatccaatgagcctcatcatctgtcactctcagaaatactcaattgcttaacagtttctgacaaatgtgtattctgggtttgttgtgtttacttagttatttacaggagactgcctgatgctgttgttcagaagtttgaatctgagaaaagtctccttgatattgaatggcccgttgtcagtttatctgaagatgacaaggagatggctattaaacttgtggagacagctgttgaatctattgattcttttgtctatagtgaatctgtaaaaagtgaagttaatcttaggtctgctcaactttttgcactcaatcatatcagatgcatggctgctcttgataacaaagaatgctttagagatttgctggataaatatggttaagctgtatcccttnctgcatagaattgggtcctggcatcagc

SEQ ID NO: 36461 - DNA, 552 bp, Glycine max
  Clone ID: PAT_MRT3847_132927C.1
tcggcccgcctattttttttgttttgggaacggagcacgaggaatgatattataatcgttaaagcgtttatctaacgtactagattctccagcttctgattccaattttatactctcgcacttgtgcccgtgcatagtgaatactccagctggaattatatatgaattggtaattcaaaagttgagcagtgagattggtgggagagcgatgccacaatctagttccgccatgcacaaggcgggtcagagctctaataattttgtgttccacgctcacggaaggtggttacaccttttaggttttcgcccatgagcaaggaactcgatcttctggcttgatgaaaaccgaccataatagaacggaaaccagtggattgctagatctgcattctttcgataccgagctcttacctgacggacacagttctgatggctactactctatactctctggctacaatctagccccatggtcttggggctggcctaagagccatctccttaaaggtgtctcagcatataacgagagagcatactatgccgccaaaatca

SEQ ID NO: 36462 - DNA, 199 bp, Glycine max
  Clone ID: PAT_MRT3847_132928C.1
tcttgctttacccacgcgcttgtacggctgcgagaagactacagaagggggggagtgttatgattaacaagcacccacttcaatctccacaccactctcatctgctacatacatctacctactcacgatggataaagcgtcacagacaggcagcagacattttctattttacctcatgagtcagggaacgaggtgacac

SEQ ID NO: 36463 - DNA, 467 bp, Glycine max
  unsure (1)..(467): unsure at all n locations
  Clone ID: PAT_MRT3847_132929C.1
ctcaagcacggcctgctaaatctcgagccttcttggctctctgtttatcggaccaacccacatatggggaccggtcctccatactctgaaggcccgaacatcaccatttgttgaacttaatatcacacatccattcatacagccgctttacatacaacatcataaagagtgtgtccatacacagttagcttgtataggctatcaccaacatcggacactcattctggcttgcnagaggcggacacatgcttaagctcatcatactgacaaagattactgatcccacaatgtcctttcttatcaaacactctacagccatatgcatctattaaaaagctattttattgtttgctcaaacatattggtctggtcaataacaattctgaaccctacaatacataggggtatgataagcatctactccgcacagtcaattatgcggatgcgttcctggaatattctctgtt

SEQ ID NO: 36464 - DNA, 1979 bp, Glycine max
  unsure (1)..(1979): unsure at all n locations
  Clone ID: PAT_MRT3847_13292C.1
aatcctgagagcatgccttgctctagctgaacatgcatcatcgatcttgcctgcgaataagaacatatcatttaggaataaggagagatgaggaaactcttcagccaactatatatttgaacaagttacccgagaaatttccagaaggatcgaaagtttttgtggttgatcctattctggcaacaggtggcactatagtggcagctgtaagcctcttaaaggaacgtggacttggcaacgagcacttgttcaaggcaaattccccagtcacacacaaacagctcaacctcggaccaagatttacattagatagatacatcattcatacatggcttgttcccgcattcacttcaaccttaatctccctttcccctccgatgcggcaccaattccgtacacatgtcactctccctctcgcctctctctttcccctctcttcacattcacaacaccaaagatcgcttattccagtgctccgcggcgcacgtgtggtgcggtgtgctgtcagatgaccatggaggagaagcctctctctgagaaccaaatgctcgtgtatgtgcctcctcatccgttgatcaagcactgggtttcagttttgaggaatgagcaaactccttgtcccatcttcagaaatgcaatggctgagttgggaaggctactaatgtatgaagcttcaagagattggttgccaactgtttctggagagattcaatcaccaatggggtgtagtcctctgtggaactcattgatcccagggagcctgtggctgtaattccaatcctgagagcaggccttgctctagctgaacatgcatcatcgatcttgcctgcaataaaaacatatcatttaggaataagcagagatgaggaaactccttcagcctactatatatttagaacaagttacccgagaaatttccagaatgatcgataagtttttgtgtttgatcctatgctggcgacaggtggcactatagtggcagctgtgagtatcttaaaggaacgtggagttggcaccaagcagattaaagtgatatcggctgtctctgcccctccagctcatcaaaagctgagcgaacagttccctgggcttcatgtgtatactggaataattgaccccgaagttaatgaaaaagggttcataattcctggccttggagatgctggggaccgcagctttggtacagatacatgaaaaatatatgaaatacctcatctcctctcccttgggtgccatgtttttcaatttttgaggcccaaaatttgtctatttgttcggatggatactgaagccttgataaatttcgggttaaaattacataggtattggtcattattattatgaattacataggtgttataagttcaaattcctaacgtaaaactgactagcatgtcaattcaaattgtttttctttatggcttaaatatatttttagttccttgcaggtggcactatagtggcagctgtgagcctcttaaaggaacgtggagttggcaacaagcagattaaagtgatatctgctgtctctgcccctccagctcttcaaaagctgagcgaacagttccctgggcttcatgtgtatactggaataattgaccccgaagttaatgaaaaagggttcataattcctggccttggagatgctggggaccgcagctttggtacagatacatgaaaaatatatgaaatacctcatctcctctcccttgggtgccatatttttcaatttttgaggcccaaaatttgtctatttcttcggatggatactgaagccttgatcagtggcaccctttcgggttacaattacataggtattggtcattattattatgaattacataggtgttataagttcaaactcctaacgtaaaactgactagcatgtcaattcaaattgtttttctttatggcttaaatttagttccttaatgtatttttggccccctnnnnnnnnnnnnnnnnnnnnnnnnnnnnnn

SEQ ID NO: 36465 - DNA, 297 bp, Glycine max
  Clone ID: PAT_MRT3847_132930C.1
tctggccacctcaacttttattgtctttgctcctagcctcttttgggctcttaccaaggcacactcgccgataccgtttttaccttcaacaagttcaaccatcaaccaaacattatgctcaaaaagagctgttttatcttgggtgtacaactaccaaagtggcgcacggcgtgccacctgggatcttggcgtgccttacgctgccaatcagattgggcagcgaaaccggcaggtagccagtgggctacatcttaattaacatttgaccaacaataaactagtgacggctgccttttc

SEQ ID NO: 36466 - DNA, 726 bp, Glycine max
  unsure (1)..(726): unsure at all n locations
  Clone ID: PAT_MRT3847_132931C.1
ccacgcgtccgctttcttgtatttggggtgtgaatccggttctagtcttcgcaaaggtggtcactttctttgtggtgttcacatgtttgttacattttgtactcttcaatttgaaaattggtttaaaaatattttatgattttgacttgaagtggttcagtaaatgattctacttattaaataatgcttaaaagaatcacttttttaagttttttgattttctgggtgtgtaggcatcaaatggtgagtgaggttaatataatatatttttttatcgataaatattaataattagatggttagattttatgtcaaacaggagagattaaaagatattaaatccccacgatcttttttttcttaaccattcaaccaaccggttaatataatactacatggttatggttatggggttgccatggaatttgcttggtgtttaaggatttatcatgggttggtgagagtggtggacctgttacagttcacctggtctttatcttcaatgtgaagccttttttgttgtttccatataagtttggaaagctgaatgtaaactagcttctctttttgtcttctctttaatttggtatactagaatgtttttcttgtttgtgtgaacaaccttttagctaggctttccattcttttaattgatctatctttctactttttggntggcttcaacatgtttttttttttacctttaattgagtctaggggcccttt

SEQ ID NO: 36467 - DNA, 377 bp, Glycine max
  Clone ID: PAT_MRT3847_132932C.1
gaaattctgggactttgaaactgcaagcaggctagatagctggatagtgcattccggcaacggctgctaacatagccacttgtgcacctgctaaaagggggaacgccaaaggcactgctcaagtgatcgctcaatgactgacggactgtgatccggtcctcacatagtacacaactctgaagaacgaggcggatatgcaccacacacagcttgacttgcagacaacacatctgcataacacactggaaaatcatgctgcgacgccttggtacataggacatcccttttatacccatcagacatatgctatgcccagtcatctaaccttacaaggcacggaccatgtcaccgaaggagacattggctcacatactatt

SEQ ID NO: 36468 - DNA, 599 bp, Glycine max
  unsure (1)..(599): unsure at all n locations
  Clone ID: PAT_MRT3847_132933C.1
tgcaatttcctttgccatcattagacaaagagcacttgccagaaggtgctgaggccactgtagacattccnatctgaaaaaattgagtacttaaagttggcatatgataaattgcaacatgctgtcaaacaatttgtggccaatcagttgccaaattggataatttgtgattttagtcctcactggatagtagacattgttcatgagtttcaggtaaagttgatcttctataatgttttatctgctcctgcattaacagtttggggaccaccaggtacaaggaaaactcccttgtctccagaaagtttaacagcaccaccagaatgggtgacatttccatcttcagtggcttatcgaatacacgaggcaatagcgctttgtgccggtgccaacccggtaaatgcttctggggtaagtgattttgaaaggcttcacaaggtatttaatgcctctgaagctgtaatttttcgtaactgctacgagattgaaggagaatatctcaatgcataccaaaagctagttgggaagcctgtgattcctataggtttattgcctgcagatagtgaagaaagagggagagaaatattgatggggagact

SEQ ID NO: 36469 - DNA, 161 bp, Glycine max
  Clone ID: PAT_MRT3847_132934C.1
catccctctcagatttggaactttagggaacaagtattttttttatggtggacaatacgaatgcactgggtggggagttaacatattgggtggctggtaaaaaacacctaacacaatgtgatgttgaagacctgctaaattgtttcaaacaacttatttct

SEQ ID NO: 36470 - DNA, 395 bp, Glycine max
  Clone ID: PAT_MRT3847_132935C.1
gccaaaattaaagagggcttcattttcaattgcgagacattttacaaagtcatctgcattcttacattcaacaacaatttccaaccctttattaatacatcgcttagttctgtcatagatcccaaactgcttaatgagacataagttttaaaatgtctgtaataaatacattaaggttaccatataaggaaccccctgcatcaatcgctctgagacacataaccttaatttgtgttgccctgactctgacctcctacccctattggctcaaaagatacatcaacctctaaactcgctattctaacttttctttggccacaataactacactgtacatctctgatgagattacccaacaccgatcctatcactcatacacaataaaactactcttt

SEQ ID NO: 36471 - DNA, 202 bp, Glycine max
  Clone ID: PAT_MRT3847_132936C.1
gcagatcttcgttcagacactgaccggggggaccataaccctataggtagagagctacgacgccgtcgatgacgtcgaggccaagatccaagacaaggagggtatccccccggaccagcaacgtatcatcttcaccggaaagcagctggaggacggtaccaccctcgacgactgcaacatgcaggagggaatgaaccattta

SEQ ID NO: 36472 - DNA, 1099 bp, Glycine max
  Clone ID: PAT_MRT3847_132937C.1
gtcccctttgttttacaatcttaatataatttctaaccctataaatatgatcatgaccttacaccctattgtgacgctcttccttgcccgaatagctcatgatcagcattttctttatcgttaagttttttctcctcctcactagtctttgaatttcttctgtccgggtattaggaagaaaaaaaaaggctttagagtttagtggtgaaggtagaggatcttgagattaataaataaagggtgatatttatggctgatgcatttgatgaagagtgtgattatctcttcaaggctgttttgatcggagactctggagttgggaaatcaaatatgctctcaaggtttgcaaaagatgaattccgcttggattccaaacccaccataggagttgaattcgcttaccggaacatcagggttggagacaaactcatcaaagctcaaatatgggacactgccggccaagaaaggtttagagcaatcacgagttcatactacagaggagccttaggggcaatgctagtgtatgacataagcatgagatcaagttatgagaatgtgagcaaatggctactggagctaagggagtttggaggtgaagacatggtggttgttctggtgggaaacaaatgtgatcttgatgaatcaagagaagttgagaaagaagaaggaaaagggtttgcggaaacagaagggttatgcttcatggaaacctctgctttaaagaatctgaatgttgaggaagtgttcttacaaatgatcacaaggatttatgacatgacaagccagaaaaatttggcagccaaaatggaggagcaaccgattaatcttttgaatgggaaagagatccatatagctgatgaagtgactgcaactaaacaaactagtacttgctgttcaagatgagggatttccaggggaaagttttttttatttttgccagtaaaattcattcttcctattttctccacttcccctttacaattttttcttcttatttcttcattacatggtgaagatggagttaatttttaaattatacacaagtggtgacttcttggtagaatgtaaatgttgattttatatcataatggattttttt

SEQ ID NO: 36473 - DNA, 644 bp, Glycine max
  Clone ID: PAT_MRT3847_132938C.1
cacgcgtccggtcccttttgtctacttgctgctctctctgatggggtcacggacacatcctatgcaacttgccaaactcattctgtgtgatgaacaagcagaactgtgccccctcccactgctcttcatggctcatttgatgcatggctgagttgatttcagttgagaaagtgaagggaatttgaggaaagaaaaaaaaggggaagttgttgtctttttgagtttttttcattctctcagctttcattaaggaaaaggtggaaaagggaaacatggagatggacccttttgagaataaggattgtgagagagttaagttgaagagcacagaaacataggagagtctagtagttgaagtgaatggagaaagtagaagagaaaaagaagataaagggaaacattaaggataacatgccaacagtgtggttctctctgaagaagtccttacactgcaaatctgagccatctgatgttcatgaccccaaaacaaggaagcagttgagcacaatcttgacaaagagagcagggagggcagggtgttcaaggtccatagcaaatctcaaagatgtatccatggaagcaagaggcatcttgataagccaccaagttgcagtccaagatccataaggagcagtgagttcctc

SEQ ID NO: 36474 - DNA, 496 bp, Glycine max
  Clone ID: PAT_MRT3847_132939C.1
atgcctgcatgtcgactctagaaattcaaatgggcataacttttcacccagaggtctgattcaagcggataatatatcgagacgcatgaaattgaacaacggaggctctcgagaaattcaaatggtcataacgtttcactcgttggtccgattcaggcgcataatatatcgagacgcacgaaatagaacaacagaagctctcgtgaaattcaaatggtcataacttttcactcggaagttcgattcaagcgcataatatatcgagacacacgaaattgaacaacagtagccctcgagaaagtcaaatggtcataacttttcactcggaggttcgattcaagcgcataatatatcgagacgcacggaattgaacaacggaacctctcgagaaattcaaatggtcataacttttcacactgaggttcgattcatgcgcataatatatcgagacccacggaactcaacaacggtagctctcgagacattctaatggtca

SEQ ID NO: 36475 - DNA, 1072 bp, Glycine max
  unsure (1)..(1072): unsure at all n locations
  Clone ID: PAT_MRT3847_13293C.1
ccacgcgtccgatgcaatgccctgaattcatatccatatatgatctatctctgtctatccaaaacaaccgttgatgctaaaaantagcatatcatatcatcttccccacaagtcacacacaaagaacagctcaaaccctcggaccaaaattacatcttacatagatacaccattcattattcatacatggcttgttcccgcattcacttcaaccttaatctccgtttcccctctgatgcggcaccaattgcttccacatgtcactctccctctcgcctctctctttccctctcgcactcccctctcttcacaacaacaccaaaggcagataataccactaattctaaaaacagtgaattggatatttttaatttcccatttatttcatgcttcatttattattttaattatttttttaatattgggtttgtttgcttttctttgctttgctcccatttattacgttggattcgattctcacgcatgtttatttatataccctctttttattcgttgtgttgtgttctggtgctttctttctccgctctcatcgctccaagcagtgctccgcggcgcacgtgtaatgcgatgtgctctccttgctcttgctgaacatgcatcatcgatcttgcctgcaacaaaaacatatcatttaggaataagcagagatggggaaactcttcagcccactatatatttaaacaagttacccgggaaatttccagaaggatctaaagtttttgtggttgatcctatgctggcaacaggtggcactatagtggcagctgtgagcctcttaaaggaacgtggagttggcaacaagcagattaaagtgatatctgctgtttctgcccctcctgctcttcaaaagctgagcgagcagttccctgggcttcatgtgtatactggaataattgaccccgaagttaatgaaaaagggttggtgtctcatgatattaaaatttgagttaaatgcctatgtactaacagtgtaaaaaagtttaacattgtcatccaatacccattcactgtttaaattnntttnaggaaatnatttacnaagtccnnnaaa

SEQ ID NO: 36476 - DNA, 753 bp, Glycine max
  Clone ID: PAT_MRT3847_132940C.1
atttctttcaaccgtcccttttttctcactacggcctctattagatgacggtacgggatcatcctatggatttgagtcccttttgtctcactcgctctctctgatggggtcacggacaccaccctatgcaacttgccaaactcattctgtgtaatgaagaagcagaactactgcccctcacactgaacttgagagttttcaaggtgtttgataatagtatggtttggtatttttgaatttttttcccctttgatctctctcgtgaaacatgttttgcttctaggtagcccctttgatgcacatatagttgagttagtgaagggagtttgaggaaagaaaaagggaaagttcaaagttgttgtctttcttgagttttttattttttcattgtctcagctttcacttaggaaaaggaaggggaaaggtggaaaagggaaaacacggagatgaacccttttgagaatgaggattgtgagagttaagttgaagaacacagaaacatagaagagtctagtagctgaagtgaatggagaaagaagagaaaaagaagataaagggaaacgttcaggataacatgccaacagtgtggttctctctgaagaagtctttacactgcacatcggagccatctgatgtacatgaccccagaacaaggaagcagttgagcacaatcttgaccaagagagcacggaggtcagggtgtttaaggtccatagcaaatctcaaagatgtaatccatggaagcaagaggca

SEQ ID NO: 36477 - DNA, 466 bp, Glycine max
  Clone ID: PAT_MRT3847_132941C.1
acccaaaaaacttatgtttggggcccggggaatcccaaatttccaaatcacccattcccaaccttacaaaaaaaacccccgctgaaaactggggaaaacggaaaaaaaaacccggggtaaaaaaaaaacaaagttcgattttggccaaaaggacaaacctagctaaacctttttaagcctttacactatacacaatccccccccccctttggccccatttaataaaccccagggttactctgaagcccgggcccccatgacctatgaagaacatcaggggtttcgttactcgcaggatctttagcggggataaaccgagccaaaacttgttccgaaaaagcggggccaagaacacctgggtaataacaataattctttttcccccccaacaacttttttagccccttttttgagaactttatcttcactttcccattggcatcaaaaaaagctttcaaagccccca

SEQ ID NO: 36478 - DNA, 151 bp, Glycine max
  Clone ID: PAT_MRT3847_132942C.1
aggtaagattataatgaaattggccgatatttcgcaatcatataatcctacaaaatgtgctgccttaactcgtgcacggcttcccatagtcaagctcatggatccagtgacaggaatctcttgcgacatatgcataaccagtctaatagct

SEQ ID NO: 36479 - DNA, 501 bp, Glycine max
  Clone ID: PAT_MRT3847_132943C.1
aattcggctcgaggtcccttttgtctcacttgctgctctctctgatggggtcacggacacatcctatgcaacttgccaaactcattctgtgtgatgaacaagcagaactgtgccccctcccactgctcttcatggtaacaacacctgcacttgagagttttcaaggtgtttaataatagtttggtgttgtattttttatttttccccctttgatccctcttgtgaaacatgttttgctgttaggctcatttgatgcatggctgagttgatttcagttgagaaagtgaagggaatttgaggaaagaaaaaaaaggggaagttgttgtctttttgagtttttttcattctctcagctttcattaaggaaaaggtggaaaagggaaacatggagatggacccttttgagaataaggattgtgagagagttaagttgaagagcacaggaacataggagagtctagtagttgaggtgaatggagcaagtagaagagaaatagaaga

SEQ ID NO: 36480 - DNA, 387 bp, Glycine max
  Clone ID: PAT_MRT3847_132944C.1
gtgggttgatttgttgaggttgagtttgatgttgatgttgttgctgccattgttgttgaccctgaaaaagcgtgggatcagagggtggttggtgttggttttgctgggaagggaatctttgatactcgtgtggaagtgcagacgtggttagagattttgtagttaggggttgggtgaagtggttgccatagataaagtgtgttcgaagcttgaaggaggaagagagcatattggttcgcgcacgctgaatctatgtgaacgtcgccattactgagtgaaacactggcagaaacaactagggtctagggagggaggacgcttttgtatttttattccaagggggacattttgattgggctactcattttgtttttgggccatgggttt

SEQ ID NO: 36481 - DNA, 223 bp, Glycine max
  Clone ID: PAT_MRT3847_132945C.1
aacacacctatactgaaataacccacaatagtgaagcaattcaaacaacctttcttgagggttcataacacgccataaacacatttaacacaaacagctgtttctaagaaaacacaagaacccaacaggaatcgaaaacacatatacgctttaaatagacccgagacactagcagcggtctgaaaactctcggactaaccaaagcctgtttcgcatggaccgc

SEQ ID NO: 36482 - DNA, 305 bp, Glycine max
  unsure (1)..(305): unsure at all n locations
  Clone ID: PAT_MRT3847_132946C.1
caacttatttatttctacacttaattcccaatgtcagggcgcgctgtctaattgagaaactatgagcaacgctatggagtctaccatccatcaacacactgtggaccactgtctgcatctgtggaactaccacttccaaccaatcactgatctgaatcctgcaacatccaaaccaacatggacaatcaaatctgaactgtaccacttttcctcangctcaggctataacactgcgactgtcaatccgaatgtttcttactctcagatttgggtcggcaactgcttcgtgtgtacttctaggaccg

SEQ ID NO: 36483 - DNA, 331 bp, Glycine max
  unsure (1)..(331): unsure at all n locations
  Clone ID: PAT_MRT3847_132947C.1
anantgnnngcacgcgtacgnaagcncggnatgcagatcnggngcaganngaagnnagaggnnnaagaananacgncgtagnggatgngggcaaancgaccgcnaagncaangatgnngacagngancgaggttnngagnnannananncgatggaagggncagannanacaaggagggnnccagngannnganggcgnnngnggagnangnnngggngntncanacnnctggnaggaggcaaganagtgncnnngtagggggaatgnnnanagngaagggngngagagnagancagnagganggaggncanagnganggagtgcatgcan

SEQ ID NO: 36484 - DNA, 374 bp, Glycine max
  unsure (1)..(374): unsure at all n locations
  Clone ID: PAT_MRT3847_132948C.1
ttagtcatgagcggacgccggggactccaacgcgggagattttagggacacacacgacgctgcaacaaccacaagcagagaagataaancacncagaagacangagncgaagccaagccaaacccnncgacgaagaaccaaacgagggnaaaacacncgcgganggaacagctaagggaaaagggccagggcaaccaaganacagaggagggggcagcaaaactactaatacaaaaggctagaagggactctattctatcattacttgaggaatggagtcatagcgagtaatggcagaacatgaattcagtgataatgctataccatattaccatgatagtcagggaataggcgttttctttattgagaaaaga

SEQ ID NO: 36485 - DNA, 373 bp, Glycine max
  Clone ID: PAT_MRT3847_132949C.1
ggaatccccccaacaggaaataagctgggggaattaaaaactgaaattttgggtggaggagggaacattttaataaagctactataacccaaaggggcaaaaaaaaccctataactaaccccaaaaaggattttttaaattacccgtatcaattttgccggttttaaaaaaattcaaacttttacgggcaaaaaggtgcccccaactaaagttttttgcccaattttatcaaaaggggagaccaagcggcaaacttttaacaggggggggaaagggaataaaggcccaaagttaaaaacctggtgccaaaaaaaaaaatttgggcaaaaggacagtttttgaagggaaagaaaaataccgtttttttttgggg

SEQ ID NO: 36486 - DNA, 752 bp, Glycine max
  unsure (1)..(752): unsure at all n locations
  Clone ID: PAT_MRT3847_13294C.1
gcaggcttgctcttgctgaacatgcatcatcgatcttgcctgcaacaaaaacatatcatttaggaataagcagagatggggaaactcttcagcccactatatatttaaacaagttacccgggaaatttccagaaggatctaaagtttttgtggttgatcctatgctggcaacaggtggcactatagtggcagctgtgagcctcttaaaggaacgtggagttggcaacaagcagattaaagtgatatctgctgtttctgcccctcctgctcttcaaaagctgagcgagcagttccctgggcttcatgtgtatactggaataattgaccccgaagttaatgaaaaagggttcataattcctggccttggagatgctggggaccgtagctttggtacagatacatgaaaattatacgaaatacctcatcacctctcccttgggtgccatattttacaatttttgaggcccaaaatttgtcattattttttcggatggatactgaagtcttgatcagtggcacccttccggtttacaattacataggtgttggtcattattattattattattattatgaattacacaggtgttgaaagttgaaactcgtaacgtgaaaactggttagcatgttaattcaaattgttttttatagcttnnnnaanaaaaaaataaaaaaaaaaaataaaaaccccccctaataaataaaaaaaataaaaaattttntgggggccgttttttggggggctttttttt

SEQ ID NO: 36487 - DNA, 424 bp, Glycine max
  unsure (1)..(424): unsure at all n locations
  Clone ID: PAT_MRT3847_132950C.1
cttatctcatgtcacccaagttctcctatctgaactctctagttgagagaaagaagcctcaagaaaccacagatgaattggccattgtgaaagcagctgcatgggcatggtaccaacatggttcaggctctgaaggaaaggctaagagtgagtttgatgtcacaagaactcaacgtatggccaggccttcacgttacaagttagaagctatgagaatggctaaggaagcaccctcaaattcaattcacaccaattataaacctcttcttgatacatatgaagttcaatgcatttcaaggcaattggacaggcttattgtagagtctggccacaacaaacttggcaacagcatcaatgcanataataatgatggtaaggataatgctaatagaaggatgaagaataagaaggggatgagtaaagg

SEQ ID NO: 36488 - DNA, 654 bp, Glycine max
  unsure (1)..(654): unsure at all n locations
  Clone ID: PAT_MRT3847_132951C.1
agaaaattccttgcaaaagttaattcatcttgatgtacatattttaacaacaaatgtgaaccactgaattgattaaaaaattacaagaaattaacaaaactactgttctaagtacaatgaaaatttctggcctgggaaaacttcaattttgattcctacagaaggccattaactggtgatgagctaatagctggcatctccttgtttgctgaaaatgtctcactgctcctaccactctttctccgaggctttgcctctccgagcatcatcataacatccctcatggagggtctatccttggggaacttggcagtgcaaagaagtgcaattctgagaactaatagcatctcttcttgaacatgcttgcagtttcctacactggggtctaatgcttcttctggagatttgttgtctatcttccttctaatccaccctactaggtctatagattctccaaactccgaatttaaaggccgctttccagtgagaagctccaacanaaccactccataactgtaaatgtcaatcttttcatccactttcaaggagtatccatattcaggggcaatgtatccataggatccagcaatcatggaaactgtttcattcttttggaacatcatcttggccaatccgaaatccgctatccttgcc

SEQ ID NO: 36489 - DNA, 474 bp, Glycine max
  Clone ID: PAT_MRT3847_132952C.1
atccatctcaaattggtacgaatgtttatatttttgcatcgtataatcctcttttgagatgtttcagaaaatttcacattgtactgactaattattcatcaacctaatcttaaaccgccgaataaattgaatgttactaaggaattattaagactgtgatcataggaagaagtaactccaaaaactgtcagaaaaatagaatcatttactttggaagcgtcggagaaagaagatctaacccaggctcaagggagcaattgcgcaaagtctccatgtaattcctaacttcttccgctatcaaccgctgcatcatctgcataaagtaattctgatccgaaaccttttgattagcaaactcttctttctcctcctcctcttcttcttcctctgatttttccccaggagggaaaaggctcaacgacgtcgtaacgggactctcttcctcattttccttttcaatgcactgctttttta

SEQ ID NO: 36490 - DNA, 816 bp, Glycine max
  Clone ID: PAT_MRT3847_132953C.1
atccctcggtgctaattagtgtgtattatttttgtacctatgtgtcgtcctctccatgttccccactttctttattatgaaccgaatttcctcatcactagtacttctccatcaccatggctgaaactccatcaccctctgagtctcccacagcctcctttggccccatcataagtaatggccaagttggtggcttcgattggattgtccttgtggcagcaattttatgtgcctttgtgtgtgctcttggcctcaacacaatgttacaatgtgtgtttcaatgtgcttgtcgtgtcctcacagagcctcgccaatggattgcttcacgaaggctcaactctggcctcaagaaaaaggaaatggtggctttgccaacctcaacttacactactacacactctgctgctgcctcttcttcttcttcacctaattctagtagttgtgtcatttgcttggctgagttctctgatggggaccctataaggttccttccaaagtgcaaccactatttccatgtggtttgcattgacaagtggctactctctcactcttcttgccctacttgcaggcacctcctcaagtcaaatgattctcttcactccttacatattgtcatagcttaggtatcctctactcatgagtagcatcattatggctataaaacttttacttttgatatttaatgtaactgtatattcaagattcaaaaattaagatcttcaattaagttagaataattgtatatcaagttaatctagctacttagtgtttcatagcttaattatttaaatagttatcagttgtttagcatttcta

SEQ ID NO: 36491 - DNA, 271 bp, Glycine max
  Clone ID: PAT_MRT3847_132954C.1
cggccccatatgctgcgttatggcatacgagatatttcctttgagacttagagctcaagcatcagctctagtagcggcgggaagtagggtgagcagtggagcaatctccatgtagttcctctcagtctctcgcgctatcaccgaggcaggaacattctttgtttttggcgctgtttcatgttgcgctgtcgcctttgatcattattgtgttccagagactagagggaagactgtggaggaaattgaagtactctttagagacgaggatgat

SEQ ID NO: 36492 - DNA, 575 bp, Glycine max
  Clone ID: PAT_MRT3847_132955C.1
cattcttacaagagtagcgtgtaggaactgttggccatttcttttctctctatcttcttccacctttgtactggtcccgaggaagaccgtttcagttgcataatattgtactgatccctcttctctctctcccttggatctctttgtggcttggtttgtctgtgtgtgtgtttttatatgtgttctcccatcatgattccagcctatcgccactcagtatcttctgttatgcctctggatcttaatgaagatcaaaaccacgagttcttcagtccaactcaccacccttcctcttcgttttcttctctatcttcatatcctattctcttcaacccgccaaatcaagatcaagaagctcgatcatactactgggaaacaacaaagcacttaccaagtcatgaagaagaggctgagaagattatccctactagtggatcatggggtcactccggtggaagaaagtgagcataaggtgacagtttggagaaaagaagagaggaatgaaaatcttgctgaagatggttcggtgaagtggatgccttcgaagatgagaattatgcggaagatgttggtgt

SEQ ID NO: 36493 - DNA, 147 bp, Glycine max
  unsure (1)..(147): unsure at all n locations
  Clone ID: PAT_MRT3847_132956C.1
ctcgagccctaacagccacngcatggcttctctctcttgctncgccaacgagttgacgccactcttcaanganaccgangncgncaactacctntgcgcncaattcgattccantnctngacagctcagngtancaacctacgccgt

SEQ ID NO: 36494 - DNA, 275 bp, Glycine max
  Clone ID: PAT_MRT3847_132957C.1
tcggctcgaggcaactcatttcgttagagtgagagagagatagagagagagagacgggtatcaccgtgaaacgcagaagccgccaatacgcacgcactcattcttgagaaagctctatattcgttcgaccatggcactctcttctcgtcgctcatgcatatccatattgatctatggctgtcaaatacttctgtaaaaggcgcatgctactccagttcgtctatttgctagagagtctgcccctcctgcccttacgggagatcagatgctgaaga

SEQ ID NO: 36495 - DNA, 594 bp, Glycine max
  Clone ID: PAT_MRT3847_132958C.1
atcagctggcgagcctttcaaaatatgaatcactaccgggggaaggacttacaagggatccggacaatcatttttaagtacagaaagctggatagcttccccccaacttttttttgacctgtttctcttgaaggggcatgccccacatcccacaagctttataaatgttcaactacatgaattcaggagtttaagctgtaaagatatcgggattagccgtgcgagtgagctgggctatcttacccacctcatcgggtaaatattcacaacctggtagggatgtatttttcccttgagtatctacctgaacaggatacttgataagatgtccctgcaaaggtgaagaatcttcataaacgaataaaatccaattgtttgcggaactttcattcacttattccacacactctaatctccctggctcttgatagttacatctaccatgccaagaggcgccccccaaagtgacattctgctaccatgcatctggacctgcggatgcctcatgtgtgttggcccctgtaatggggttgatatgcacccataggtgtctccgtatatttagtgccagccaaagatctttggtttatatta

SEQ ID NO: 36496 - DNA, 191 bp, Glycine max
  Clone ID: PAT_MRT3847_132959C.1
attcccggtcgcccacgcgtacgcgttgatgtcataataaggttaatgtaccattttgtggatcactgatcccacgactattttggtttgttagtattaatactataaattatcatctaaaatgaaatatccgacggagtaatttcattgtattgaagaaacattgtttattgaaacttaaatattttctc

SEQ ID NO: 36497 - DNA, 937 bp, Glycine max
  Clone ID: PAT_MRT3847_13295C.1
gttatgattatgatattacagttaatggtgatataagttgtgttgcagatttgtaaaaagcaattaaggtatcatattgttattctgtaatgaaatctggcttaaaccagattatttctatctttattcagaatttagtgtgtttatttcttgagtccaacagaagtagactgaaaccctagacgaactttacctgcaatgtcgagttcgaattctgaagttgcaacattggagagaattttacccaaccaccacccccgaccaaaggattaatctcggtcatatacaaaaacaaaaagaaaatgacttgtgcatcaattttacgtgtttcatattaatattttgtaagaattgcaggtggcactatagtggcagctgtgagcctcttaaaggaacgtggagttggcaacaagcagattaaagtgatatctgctgtctctgcccctccagctcttcaaaagctgagcgaacagttccctgggcttcatgtgtatactggaataattgaccccgaagttaatgaaaaagggttcataattcctggccttggagatgctggggaccgcagctttggtacagatacatgaaaaatatatgaaatacctcatctcctctcccttgggtgccatattttacaatttttgaggcccaaaatttgtcattattttttcggatggatactgaagtcttgatcagtggcacccttccggtttacaattacataggtgttggtcattattattattattattattatgaattacacaagtggttgaaagttgaaactcgtaacgtgaaaactgaccttttcacaccttccttcctcttctacaacttacactcatcttcacaactagcaagcattgtcctctgtctatcctctttgggcggaagttggcttcgttcatccctgcttaaattccgacgaatgtgggtg

SEQ ID NO: 36498 - DNA, 329 bp, Glycine max
  Clone ID: PAT_MRT3847_132960C.1
gaccgcaagcatgacggtactcgcctcaaactggcgtatgcccaaaaggcacgacggcggcccactgagaagagactgccatttttatgaaaccagagaccagtgggacaaaaaaatccttttcctggcccactggaaagataattaccgtggtagaaaaaaaacaaccggccttaagggcaaaaaaaccgctgaaaattaggcggcccccttgaaacctacctgggccccctggtgttaaaaaactttggggggctgtacgaatgacacccggccttgaaaaaaaccccgtgggactaattctcccctggggggggggccctaaaaag

SEQ ID NO: 36499 - DNA, 804 bp, Glycine max
  Clone ID: PAT_MRT3847_132961C.1
ccgtgcccttgcctagtttgtcccaatttggtctacctttcttccccggacattgcttcgatcagtttgatgtgtacggcaatctcccttgggcttctggcggcccatccagttacgccactggtatccctccatcacttggacgtggtagagcccatatttccaaacgtgagccgggtacaggccctgaagaggctgaatgggcccatgaaacttgacccagccgggctcatccaacaatccatttgctatgacaaagcccggacctggaccatatccgtttcatggggctatgcggttcaaattttccggggcaccttttctgcccgggaaatggagatgccggcgaggacattcctgaactggtacaagcgggcggattacacggcgtatccgttcaacacgcgccctgtcagccgccatgtttgtcagaaaccatttgtttattacttgtctagggcagtgtatgatgagggtgctaatgaaactgcaagtcaatatgtacgggttcagcaaaacccggattgcaattggaaaatggaggatccgacccagatcaaagtggtgcaggtttataagaaacccgacccgcatttgtgggacaaggctccaagaagaaattgttgtagggttagacgcacaaagaagaaaggaactatggtgattgatgttggggaatgcagggaagatgaagttgttgaattgtagttagaggtcctaacacatctaattgataattcttaactcaggcctttgctagaggtattttcttcttctagacagatatgatttactttgaggatt

SEQ ID NO: 36500 - DNA, 673 bp, Glycine max
  Clone ID: PAT_MRT3847_132962C.1
aattcggctcgagtgagaatcgaaggataaatgtgtgatgaaactcgcatttcgcaattcgcacacgttgggcgtgcaccgctaaacaaaacataaacctttgctaagaaagtttcttccttttttctcttctgctgtttgaatgtgaagacgcagcacagtgatgaagtgaagtgctgcatcaacctcaatgatctcagttttggaccttttggtttggctcaaaaggttgaatttcaaagaaattcttggttgatggttgatgctatgtctcatcagtgtgttctataagaagttggggttttgccatcgctatgtatgtagctagtcattgcatttgagaactgttggggatcttctccaacattgtagaaggttgagaagacattagttggtgggcatggttttgtgttcgagggatttgagctttggatgcagattgaagagggctaactgttaaatccataactcccatcaaggtttttgctttgtgtgtttgtggaaatagcataccctttgagctgctctgtctattttcttctggtgtcttgttctattttctggaaggttgcttcattggacccttgtttgatcttcaacaatgtcagagaagatcatggttcactcaagggttatattttgtgtgatgataattctatgttccttttgagct

SEQ ID NO: 36501 - DNA, 465 bp, Glycine max
  Clone ID: PAT_MRT3847_132963C.1
acaaacaagacgcaccggctgcaagcatttgaacattatagcaattgtgtcaaaattacatttgacgtttctaccttatagtgcatgagataaccaccgtggtctgcacttaaaccattaatggccctactgggggttttcataagctagaacccctattcagggctgtacgggtgccccatcttgacgcttatggaacggactttaaccatgcctgacaactatctcttgttacacactatgatctttggctaactacccaaaggccccaagggacaatgtttcctgacgccctaaatatgttatctacgtaaccgagaccaaacctcgggggaggagactaagaagaacactctgtgcagagcttaaagatccatctcacctgcttctgtgccctgaatgtaatgaagcaggccctaacactcgctatggttcctagccttgcatgtcgcatatgatgctcac

SEQ ID NO: 36502 - DNA, 276 bp, Glycine max
  Clone ID: PAT_MRT3847_132964C.1
cttcaagagttgattgaaaattctggccaatcttcttctgaaactttccagactatgtttgtcaaagacaaatcagggagagtacgttgccacgggagaactacgacacctactctcttgaaaagaaataaagaaatttcagaaattgaaaaaagacatgctgaagaggtgaaagaattaaatgataaaatccaagagatagaagaaaaatgcaatagagaaatggcagcagcagaggaaaaatgctgtcaagaaatggcagcaatggagcataaa

SEQ ID NO: 36503 - DNA, 499 bp, Glycine max
  Clone ID: PAT_MRT3847_132965C.1
ctttcgcgtgggtaagttttgttatattttattcgagaagactttaattaccattctccgatttgttttgactttttgcaattggacaatgtcttcggaacaagcattaaaagcaaaacaacttggcaacgaggcgtacaaacggaaggaatttgccactgctcacaaatattatgacgaagccatcaaatatgaaccaacgaacatcgtattttacagcaacaaagccgcagtttttttcgaggaaggaaaatacgacgaatgcatcgaaatgtgtggaaaagcggtggaagttggacgagagaatcgggcggactatgcgctggtggcaaaggcttacgctcgaatggcaaacagttacaaaatgaaggacgaccccaagaaggcactgcacttctacgaaaaggcattgtcggaacatttcgacccggacattgtgaagaagcacaaggaattagcgaaggaagtcaaagagatggagcagaagcatacattgacc

SEQ ID NO: 36504 - DNA, 313 bp, Glycine max
  unsure (1)..(313): unsure at all n locations
  Clone ID: PAT_MRT3847_132966C.1
ggcactccatactcaactcttccacactccaatagttttaactttatctccatacgtctcatttaccagaaatggtttttttttaaaacagttttgttctaaaacacttcatcattttcaccaacattcattttaatncattttattctctacctttctttaaacaataaacatttcctccatttttaattccttcttcctctaaattaaaatttaaaaacaaaccctcttaacaaataatactttattaccactattcatttacaacaccttattttttaaatttcactttttaaatttattaaaatcccaa

SEQ ID NO: 36505 - DNA, 578 bp, Glycine max
  unsure (1)..(578): unsure at all n locations
  Clone ID: PAT_MRT3847_132967C.1
tacggctgcgagaagacgacagaagggaacagaactactatttagaagtgtttgtacatcttagtaggttgagtattcagcagtttatactcggaactttttcaaataaatgttttcatttacgttcttgaatgtagtatactttttacgttttgaagataacggagttttttttaagtgtttttgtgaagtaattttgttttgacattcattgtattaccacaatttgttgtttttgatttcaacagccgagccttttacttccacaagatcgggatttcatggccagaaccactattcatcatgattcgttccagacaacatactgaatgcttttttgtacataatttccgtcagatagctcgtaggaattggcacaatacaggaatctaatttacctcctacattccaagttgtacgatagagaatctcatgtcaagtctcattagtttggacaacaccatgtctggcagagatagcattccatgcagttgatacatgcctctgccatgaagttggaggtttataatnggatctcaccatacaatcacacacgtatttttaaagtgacatttata

SEQ ID NO: 36506 - DNA, 1432 bp, Glycine max
  Clone ID: PAT_MRT3847_132968C.1
ttatttttggagacttttgtagggtcaatgtctgcaggtgttggagttggatttatatctgctttgctgtttaagtatgcaggattggatattgacaaccttcagaacttggaaagttgtctctttgaccttttcccatatttctcgtatatgcttgccgaaggccttggtctgtctggtattgtgtcaatcctgttcacaggaatagtcatgaaacattatacgtattccaatttatcgcaaagttctcaacggtttgcctctgcttttttcgagttgatatcatctttagctgaaacatttgtatttatatacatgggctttgatattgctatggagcaacatagctggtcacatgttggatttatattcttctccattatattcattggaattgcaagggcaacaaatgttttctcatgtgcttatttggtcaatctggtcagacccacacaaaatgtgttctcatgtgcttatttggtcaatctggtcaggcccactcatcgaaagataccttcaaaacatcagaaggcactttggtatagtggacttcgaggagcaatggcttttgcgcttgctctgcaatcaattcatgatcttccagaaggacatgggcagactatctttactgcaactactgcaatagttgttttgacggtattgctgattggtggttcaacaggtagcatgctggaagctctagatgttgtaggtggagataatgatagccctttggcttcagttggtaccatcacaaatttcgatggaaacaatggttatattgctcctcattacaacgaagaatcatcttctgggaacaaaatcaagatgaagctaaaagaattccacaagactgctgcatcttttacggcattagataaaaactacctgaccccattctttacaagtcaaaatggagatgaagatgatgaagccgagccttttacttccacaagatcgggatttcatggccagaaccactattcatcatgatacgttccagacaacatactgaatgcttttttgtacataatttccgtcagatagctcgtaggaattggcgcaatacaggaatcgaatttacctcctacattccaagttgtacgattgagaatatcatgtcaagtctctttagtttggacaacatcatctcggcagaagcagcattccatgcagttgttgtatttctctgccatgaagttgaaggtttataacttggatctcaccacacaatcacacatgtatttttaagttgacatctatataggttttcttacttagtctaattcagttgaattctgaaaattctggctcacttcatcattgtgacagtgaaattatatctcaaaatgaattcaatcatggaaaactatatatctcaaaataaatgcatcatggactatggctgagtccttatacaggtagtgaattg

SEQ ID NO: 36507 - DNA, 503 bp, Glycine max
  unsure (1)..(503): unsure at all n locations
  Clone ID: PAT_MRT3847_132969C.1
cggaaaacccgcgncgacccacgcgtccggttttataagggtccaataatcgtttggtatttttgttttgaaagtcactaataattataattgttttagaaagtagaaggcacgctcgggcacggaggaagagagaccatagacatcgtgctcagaaccaagtttgaagagaaaacgttgatccgattccgaatttgcaaatcagaataggaagcatttctatgtcaagagacattcataaccatattacttaggattatgtgtgaaggtggngtggggtctatctgcaattataactatgtaatggaggactttgaatagaagattttttttaattaactactaaaagaattttgaagactggtgtacattttttactttgatagctgatgcagcaccatatgacattgataggtatattattttattttcccttttgcttatatatttgtttttanntntatgggctgttgtatgggattgttgtgtttggtgggggtgtg

SEQ ID NO: 36508 - DNA, 175 bp, Glycine max
  Clone ID: PAT_MRT3847_13296C.1
gtcccataggagacatcaaaggcatggaagtatacctgccaattacatcccattgcatttttattattggagggggaatggcccaagtaacttggaggttcattaagtaattctgcaggatgacccaatgtcaagcaccttctcccttggatcaatcatccaatgagacataaac

SEQ ID NO: 36509 - DNA, 438 bp, Glycine max
  Clone ID: PAT_MRT3847_132970C.1
gagggtcgatctccagcccttcgaactgctcggaaattccatcaacggtgcgattccttgggaccttcgacactgtcagaagttgattttactgaatctgaatcgaaactcactcaccggcatcattccacgggaaatctgagccctaccttccatcaccgacgttgatctctcttacaattcactcaccagaaccattcctcttaacctgaacaactgctcaaagctggagaatttcaaccgcagcttgaagttccttaccggtccaattacgtaaaccggcatttttcctaacctacatacttagtactacttcgacgaccaaggcctatgcagcgtcgtgctgaccataccctgcgcagccgacaccctttccgtcgtcgacaaccaggtcgacgttaggcgacagcagactaagcgaactgtcggctcaattgt

SEQ ID NO: 36510 - DNA, 436 bp, Glycine max
  Clone ID: PAT_MRT3847_132971C.1
aagcaaataaagaaaaaatagtatcgggggaatgaaatgcagagcatgagcatgaaactttgttcctctgtaccattcaattcaatttttccatttacgcaccaaatcctaacgaatctaatatactttctagcatagcatagcatagattatattaaatactctgttacttgtaaccaccaaaaccctcaaacctacctaactcactcgatccctttctgttcaattccatggcttaaagattttgagctgctgcatcaattcaattaattaggttcatttgatcactatgcaggccagacaacggagtccgcgagggttttacgcgtccgagtaccgccagcagcgtgacggagggctggggagaggccggagaggcggcggcgacattttcgttgaggcagggcggcttgcggcggagtatttggtctcccag

SEQ ID NO: 36511 - DNA, 400 bp, Glycine max
  unsure (1)..(400): unsure at all n locations
  Clone ID: PAT_MRT3847_132972C.1
cggacgcgtgggcncnnnnactttttttttttaataaaatattgtatatnaangtnactgctggcaattattagaaggagacattaacaaactgctaatagactatagatcatagagagacatttacattcaacctgcatcacagagaattaagcaggactccagcttaatgaagatcttccctctggatctcatgtccgccatcttcaagggctagcctgaccccttcaacgtatgctacttcaccaacagcgccgcacgcgccttctacttgagaaccgcgagcttctaatgctactaaccacctgcgtcgccgaactcattggctgcgtcgtcgtcttcatctggcgcagatcatccttccccaaagccaaacctctcgagcctcctaaacgcgtcg

SEQ ID NO: 36512 - DNA, 748 bp, Glycine max
  Clone ID: PAT_MRT3847_132973C.1
cccgggtcgacccacgcgtccgttaattctgcttttttcctttgaagggaagccctaatcattctttttagtgctctacttcataagtataagcattgttccctgagagaatgtgcaatttcaaccctcctcttctctttctcacaccaaatattcttgttcttccttttagtaccgcagtatcaactttgggcacactacacgacaaacactttgctcatgacacaaatcatcacatgctgcatacttagttcataggttttttttttctcttcaagtgtggctctctgctgcttctgttctgcatcatcatcattttcttcaataactatagttagttccctttgatatttgatctgggtcaccttctttttttcttctgggaccagttttcacccatcccattttgcactgcttgctttgtgtctgtgacttggtctcaccaaaacctcagaattcaagagaatttcgaaatttggtggtgcctagtttgttcattttggatgtaagtaaaacaaccactgcatcgacactttgcttttggttaattggttttgaggtcactttgtattgggaattatttgtatttgggaaatgaaacaacatatagagttgtagtagggtggttcataatgggatctcaaagtggggcaacccaagaccaagagccaaagactggttctttgaccagacaagggtctttgtacaatctcacccttgatgaggtgcaaaaccagcttggaaattt

SEQ ID NO: 36513 - DNA, 255 bp, Glycine max
  Clone ID: PAT_MRT3847_132974C.1
cccacgcgtccgaaaaaaaaaaaaaaaaattatataaaaaaaaaaaaaaaaaaaaaaaaaaaggaggaataaaaaaaatgggagagcataggaactcctattctatgggtacctaacttccgtgcgcttgcttgcgactccatttttcttctttcgggtcgcctatttttattttattgtccgcttcttgacagctctgttgcttgtaaatccctgccttttcctagcataatgtcccttcagctcatacctctt

SEQ ID NO: 36514 - DNA, 338 bp, Glycine max
  Clone ID: PAT_MRT3847_132975C.1
ggctcgagctccagacacacactcggttgctttttgggttggctctcattgttatcaaaagaaaagaactcgggggatggctcgcccagcacaccaagagcacacctatccgttcaaggctgtactgcgcggtctttatggtggtggaaaccccactctcccgtgcctattcattcggaccgaggttcgcctcgaatccaagttcaccctaggggtcgaatgcgctgctcgcactcttcacggggagggaagaactgggaaagcccaaatatgggactctgtcggacaggaacgatccagatcatttacgagtgcctactaccggtgggcccttggag

SEQ ID NO: 36515 - DNA, 260 bp, Glycine max
  unsure (1)..(260): unsure at all n locations
  Clone ID: PAT_MRT3847_132976C.1
actcactagccggccttcgccctggggggggggggggggttctttttttttttttttttttttttttttaactcatggaaaaaaacctggccttacaagccacacacattgctaatccctcataacccagacaccccacccaagaaacggaacaaaaaaaccaagttgcccaaccctcgcgggggggcgaagatatgcatgcctattnatgcatgatggcatccactggagtctcctgcaggctcaaaaaaaagcccctt

SEQ ID NO: 36516 - DNA, 351 bp, Glycine max
  unsure (1)..(351): unsure at all n locations
  Clone ID: PAT_MRT3847_132977C.1
cacgcgtccggnctcgcttggtggcggcacgaggccagcacgtgaccatcattaccacccccgccaacgctgaactcttcgagcagaacatcgacaaggacaccgcctccggccaccacatccgcgtccacatcatcaagttccccaacgcccacgtagggctaccggaaggcatcgagcacctctccgccggcaccaacaatgaaacactctccaccggacgtcttcatccctgacatactcttcacctggaccaaagacttctcccagaaactctncatctcgcggctagtcttcaaccctatatccatcttcgacgtctgcatgatccacgcccttaaaacccaccct

SEQ ID NO: 36517 - DNA, 548 bp, Glycine max
  Clone ID: PAT_MRT3847_132978C.1
ccaaaaattcaaaaattcaatttcaatcaattttggggggatttttattcaccccccccaaaatttttttttggctgcaaaaaaaaaaaaactttaaaaatttttcctaaaaaaaactggttaaacaatttccttttttttcacataaaaccttaaaaaaggacccctccttttttaaaaaactttgcattccccaaaaaaagggtttgtctccaaaaaaccccccaaggggcccccccccccccttttagggccccctggccccttgtttgtttttaaatggcccaaatccccccctttttggttggaacccctttttttggcataccaagcaccccctttaaccattttttttcccatgaccattggcaagggggggtcatttgtagaggaaacttcaaacccggggaagtctataaacccaaggggaacatcacacccgtccaaaacccctttgagcggcccctaaagtgcctttttgaaagctgcattcccattttaagaaaaaaaaccctttttttcaacattcacaaaaggggcaacaactg

SEQ ID NO: 36518 - DNA, 735 bp, Glycine max
  Clone ID: PAT_MRT3847_132979C.1
tgcgccctgtaagtttctggtagtgttgagtgtactcggcgtcgagatcggcgaagctgtttacgatgaccccgtgactgtcctgttccccgtcgaggagagattcggttaaggcggcgaaaccggggggaaggcttgacggggagagttaaagggtggggtagatcaggatttagaaaaggcccagagtcggaagcgaaggcttcagggtgggttttaatggcgtggatcatgcagacgtcgaagatggaaatagggttgaagactagccgcgagatggagagtttctgggagaagtctttggtccaggtgaagaggatgtcagggatgaagacgtccggtggagagtgtttgaccagagactcgagctggggcatgatgagatgcgccgccatgtggatcttgtaggcggtttcattgttggtggcggcggagaggtgctcgatgccttccggtagccctacgtgggcgttggggaacttgatgatgtggacgcggatgtggtggccggaggcggtgtccttgtcgatgttctggtcgaagagttgagcgttggcgggggtggtgatgatggtcacgtgctggcctcgtgccgccaccaagcgagccagctggaccagagggattaggtgccccggtgagaagaatgggaggaagtatattttcagtggccgagatactgatgctactctttccatctcttctcttactcttactctctctagtctgatgata

SEQ ID NO: 36519 - DNA, 1389 bp, Glycine max
  unsure (1)..(1389): unsure at all n locations
  Clone ID: PAT_MRT3847_13297C.1
cggagggttgggctttcccctccgatgcggcaccaattccgtacacatgtcactctccctctcgcctctctctttcccctctcttcacattcacaacaccaaaggcaatgctaccaataataaattagatctttttaatttcccatttattttgtgcttcatttattagtttttttttttatatatatattaatgggtttgtttgcgttgctttgctcccatttattacgttggattcgattctcacatatatttatttatataccctttttataagttgtgtttccactcctgctttcttcgccgctcagatcgcttattccagtgctccgcggcgcacgtgtggtgcggtgtgctgtcagatgaccatggaggagaagcctctctctgagaaccaaatgctcgtgtatgtgcctcctcatccgttgatcaagcactgggtttcagttttgaggaatgagcaaactcctggtcccattcttcagaaatgcaatggctgagttgggaaggctactaatgtatgaagcttcaagaagattggttgccaactgtttctggagaaaattcaatcaccaatgggtgtagcctctgtggaactcattgatcccagggagcctgtggctgtaattccaatcctgagagcaggccttgctctagctgaacatgcatcnatcgatcttgcctgcaataaaaacatatcatctacgcgtccgcagagatgaggaaactcttcagccaactatatatttgaacaagttacccgagaaatttccagaaggatcgaaagtttttgtggttgatcctatgctggcgacaggtatgtatagtctgctcatgtttgagcttttgttctcatctcatgatcatcatcactacactggagtcttttgatctgtgtctttgtaatgttatgaatttctttagtacttatgttggttagtaagtttcagaacatagctgctcaccagtgcgtggtggctgaacctttgctggtcttcgtcatctcacgaaatgcaagttctttgttatgtgcatatgtgtctaatatgtagactcaaataaacattttatatgtagtggtgtcataattgcatatatctgggatctcgtgtttggtataacagcaggttttatgttggttgccaagggactaacacaaccctcctccttaacccgagcttgggactagatatgaaaaacatgggcagagtttatattttacattgaattgagttgtgttgtccttttcatggttacgagtacgagcatgccattatttacaaactagagctgtattatggattgngtggcatgttagctttggaatttgtttggatccaattgcanaggtatgctaattggaaacttgagttccacattgggagtata

SEQ ID NO: 36520 - DNA, 320 bp, Glycine max
  Clone ID: PAT_MRT3847_132980C.1
acgggctgctgcaagaaaaggtatggctagtgttgtcaacaagaccaaaacgcgtgactgacaacgggcctctgatcaccagctgatacacagacatacactaacaagggctaacacgaatcgcgccacgatacacatcatgcagctactgcgcatgactatcaaaccttacttccaagtgaacaagcccatcatagtgcatttacactgtgcccattccgaaactgcactgcgctaggtatccactattaatgatatcgactcaactgctgcactcactctcaaagacaagaccgccgataaaaccaagaagtaaggcc

SEQ ID NO: 36521 - DNA, 378 bp, Glycine max
  Clone ID: PAT_MRT3847_132981C.1
ctggtgaacaatgcctctgagaatacaaggcttggagatgaagggttacaagaagctgatcgaaggcactacacatagttacaaaagtttctgcaggcgctaaatctaattgcactgaaatacgcttactactaattagccttagggtattactaccgttgctttctttaatgcttcaatctgtgagccaatctatcagtatgcgaacaatgaggctagggccattatcaacagttacacagcagcactcacttattgtagacacacacgttacatatctagagatccacacagttgtagcagacagagatctccagatgaggaccacatattagccatatcatatgcttatacagacacatgcttactacagcactc

SEQ ID NO: 36522 - DNA, 513 bp, Glycine max
  unsure (1)..(513): unsure at all n locations
  Clone ID: PAT_MRT3847_132982C.1
ggctcgagcatcgattaaagacttgcttccaagatggttctgctagagaagctctgggatgacgttgttgctggccctcaacctgagcgtggccttggcaagctcagaaaactcaccaccctcaaaactagtacgtatcctttttatatataacactataataagagagagctagggaaaactatttgtaattaattgattagtgtttgattgttgatatagttgatgaaggagacagtagcaagctgcagaagacgttgtcgatgccgtcgacaccgacaaccccgatgactcccacgactccaacgacaccgggatccgcgcgtaaagctgacaacgtttggaggagcgtcttccatcctgggagcaactccgccacaaagaccatcggtgctcagatgtttgacaaaccacttcccaacactcccactgtctacgactggtaatattattgtttcttcttttaataaaaaaaactntacaaattatgaattcatttttggcaacctttga

SEQ ID NO: 36523 - DNA, 888 bp, Glycine max
  Clone ID: PAT_MRT3847_132983C.1
ccttcttatatatatatatatagattaattcctaattaactataatacacatatagctatttctaattaatgtttttagaattttgattaagaaattaaaaagataatttttttttttattggaatggacaaaatttggatgtttatgaattgtttcttttaattgtttatcgaaatgttagggaactgatttagcattagatagatcctagcatatctctgtagctagaaagagagagagagagagagctagctaaaactaaatatttgtaattaattaatgtttgatccttcatgtagttgatgaaggagaaagtagcaagctgcagaagacgttgtcgatgccgtcgacaccaacaaccccgatgactccgacgactccaacgacaccgggatcggcccgtaaagctgacaacgtttggaggagcgtcttccatcctgggagcaactccgccacaaagaccatcggtgctcagatgtttgacaaaccacttcccaacactcccactgtctatgactggctgtacagtggggagaccagaagcaggcaccgctgaagctgaagtctttagctaagatgaccgtgggttgcatgtaaatattgtcgtttttcgttaagcatctgccacgtttgcagctactattactattatgtgtcgggaatttattgctccgttgctgactcaaacataatattactagcgtgtttggtttttttgagcaagtgaatgtaaaaatgctaaataattcgttagtatgctaagttttgttaagccagatctgccttgaactttggcgattggttaatctttttctccctttgttaaatgattagtattaaaataaataaatttttgttaaaaaaaaaaaaaaagctcgagccgaatt

SEQ ID NO: 36524 - DNA, 1555 bp, Glycine max
  Clone ID: PAT_MRT3847_132984C.1
ccacgcgggcgcacttttcatccttcgatcatacacttagttgcttccaattaagatggttctgctagagaagctctgggatgatgttgtggctggccctcaacctgagcgtggccttggcaagctcagaaaactcaccaccctcaaaactagtacgtacccttcttatatatatatatatatatagattaattcctaattaactataatacacatatagctatttctaattaatgtttttagaattttgattaagaaattaaaaagataatttttttttttattggaatggacaaaatttggatgtttatgaattttttcttttaattttttatcaatatctaaggagactcattagtcattagatagatcctaacatatctctgtagctagaaagagagagagagagagagctagctaaaactaaatatttgtaattaattaatgtttgatccttcatgtagttgatgaaggagaaagtagcaagctgcagaagacgttgtcgatgccgtcgacaccaacaaccccgatgactccgacgactccaacgacaccgggatcgggcccgtaaagctgacaacgtttggaggagcgtcttccatcctgggagcaactccgccacaaagaccatcggtgctcagatgtttgacaaaccacttcccaacactcccactgtctatgactggtatattattgtttgttgctacgttcttttccccatgtataactaatcaacaacttaatttgcatgcatcaagtgttgagaaactatgaattttattttaggattttatctcacactcctagcctaggatacctgggatacataataacatgttgattcatctttttaactagaattttaagaatttaagtttaagtttatgaattttttttaagactttatctcacactcctttcctaggatacataataacatgttgattcatctttttaactaaaattttaagaatttaagtttaagtttatgaatttttttttattttattttaaattatgtgatttttctttgctaagttgtaaaaaaaggattggggtgatgtgagccgttagatcatgtgagaaatcaacggttgatatatatgtatactgtggtataatgaaacgtgttgtactatgtgattgcaggctgtacagtggggagaccagaagcaggcaccgctgaagctgaagtctttagctaagatgaccgtgggttgcatgtaaatattgtcgtttttcgttaagcatctgccacgtttgcagctactattactattatgtgtcgggaatttattgctccgttgctgactcaaacataatattactagcgtgtttggtttttttgagcaagtgaatgtaaaaatgctaaataattcgttagtatgctaagttttgttaagccagatctgccttgaactttggcgattggttaatctttttctccctttgttaaatgattagtattaaaataaataaatttttgttaaaatcttatgttgtaactagttgttagtgccatctgtatttataactaaaatataattacatgttc

SEQ ID NO: 36525 - DNA, 760 bp, Glycine max
  Clone ID: PAT_MRT3847_132985C.1
ggctcgagaaaatctgtttctggccctccacaaaagaagagggcattccatatgagtgcacacgaggattgtctggatctggatgatgatgcttatccaaatggagctgtcgcttctttttctcctgttcagaaagaaatgacaaactccactgctgtgatggagaaaactacttctggtactgaagcaattgcagaggagaatccatcagcattatctgtaacaatgccacctaaaagttctacaatagatggtgaggctcatgttgggactgccgatgagtctagggttggtgagaaagttgatgcatatatctctacgacatcatctatccttgatccaatcttcaagccatttacatcagctacacaaacaagttttggttttatcaagcctgcttcaccaaatggatcaattgttaaaccttcctttacttttgggaataaagtggtttcgtcgacggagtttatggctcctggtgctccatcaatggagataaccaaatctggtccaatatttggattggaaaaagttgtttcattaagggagcctgttgctgatggtccattggttgactttggctccaataaaaatgttaacaaggttccatcaatgccatttactgctgcatcatcaggtggtggtgaatccccttttctaaaatttggtgtttcttctgactcacatctgggaagtgcaattggctctactattgtgactggtgtgactgattctattccaaaagttcgggaatctgata

SEQ ID NO: 36526 - DNA, 1448 bp, Glycine max
  Clone ID: PAT_MRT3847_132986C.1
acgtggcaggtgtttaaggaaaagcgcaaatatttacatgcaacccacggttttcttagcttatcctttcagcggtgcctgcttctggtctccccactgtacagccagtcgtaaacagtgggagtgttgggaagtggtttgtcaaacatctaagcaccgatggtctttgtggcggaattgctcccaggatggaagacactcctccaaacgttgtcagctaaaaaaaaggatcccggtgtcgttggagtcgtgggagtcatcgggattgtcggtgtcgacggcatcgacaacgtattctgcagcttgctactgtctccttcatcaatagttttgagggtggtgagttttctgagcttgccaaggccaagctctgggatgacgttgttgctggccctcaacctgagcgtggccttggcaagctcagaaaactcaccaccctcaaaactattgatgaaggagacagtagcaagctgcagaagacgttgtcgatgccgtcgacaccgacaaccccgatgactcccacgactccaacgacaccgggatccgcgcgtaaagctgacaacgtttggaggagcgtcttccatcctgggagcaactccgccacaaagaccatcggtgctcagatgtttgacaaaccacttcccaacactcccactgtctacgactggtaatattattgtttcttcttttaataaaaaaactttacaaattatgaattcatttttggcaacctttgatttgttggcgttgctacgttcttttggccataactcattaacaactttgcatgcatacataataacaagttgattcatattttttgtttttattaaaagaaattacaaggggtgatttttgtctgctaagttgtaaaaaatatgtataataggattggggtgatgtgagccgttagatcttgtgagaaatcgacggttgatatgtatgtatattgcggtataatgaagcgagttgtatgtgattgcaggctgtacagtggggagaccagaagcaggcaccgctgaaaggataagctaagaaaaccgtgggttgcatgtaaatattgtcgtttttcgttaagcacctgccacgtttgaatctactactaccattatgcgtcggaaattaattgctctgttgctgactcaaatatatattactagcgtgtttgattttgagcaagtgaatgtaaaatgctaaataattaccgtaattagcatcagtatgctatgttttgttaagccagatctgccttcaactttggcaattggttaatctttttctccctctgttaaatgattaatatatattaaaataaataaatattatattttctaaatctgtaactagtcagtgccatctgtatttatgcaacttcaactcaactaaaatataattacatatgttcaaagttatgatgatatgttgaaagttacgatatttttctgtac

SEQ ID NO: 36527 - DNA, 966 bp, Glycine max
  Clone ID: PAT_MRT3847_132987C.1
tacggctgcgagaagacgacagaagaggcatgccactttggtcagagatatttttatttttagacatcatcactaacgatcacccctctatatatatacagcctgcacaacctcattaggaaccccccattactcacttttcatccttcgatcatacacttagttgcttccaattaagatggttctgctagagaagctctgggatgatgttgtggctggccctcaacctgagcgtggccttggcaagctcagaaaactcaccaccctcaaaactattgatgaaggagaaagtagcaagctgcagaagacgttgtcgatgccgtcgacaccaacaaccccgatgactccgacgactccaacgacaccgggatcggcccgtaaagctgacaacgtttggaggagcgtcttccatcctgggagcaactccgccacaaagaccatcggtgctcagatgtttgacaaaccacttcccaacactcccactgtctatgactggctgtacagtggggagaccagaagcaggcaccgctgaagctgaagtctttagctaagatgaccgtgggttgcatgtaaatattgtcgtttttcgttaagcatctgccacgtttgcagctactattactattatgtgtcgggaatttattgctccgttgctgactcaaacataatattactagcgtgtttggtttttttgagcaagtgaatgtaaaaatgctaaataattcgttagtatgctaagttttgttaagccagatctgccttgaactttggcgattggttaatctttttctccctttgttaaatgattagtattaaaataaataaatttttgttaaaatcttatgttgtaactagttgttagtgccatctgtatttataactaaaatataattacatgttcaaaattgtgatatgttgaaagttaacgataaaaaaaaaaaaaaaaaaaaaaaaaaaaagaacaag

SEQ ID NO: 36528 - DNA, 510 bp, Glycine max
  unsure (1)..(510): unsure at all n locations
  Clone ID: PAT_MRT3847_132988C.1
acccccaacccccccccaccctttgaggtcgacaaaaagcagggcctcttgcttcctctgtacccctccctcgaagacgacgaatcagacccctacgtaagtttctttcttaaaggcacgtgaactgtgtcaaatttttaacgccttttcgaagactggtgccagcgtttaaacccgactaaaaaaagcaaaagaaggaacgcgtgttaaagggggcgcttggaccctttaaaaaactgtgtttttttcaagtgaatttttttaacggacaaaagctttgatcttttgtgaagttgatttttagcctttaatttcacttttagtttattagtcaattcaattaagaaaagaaaaaatcccaaagaagaaaacgtccgattgatttttttgtttcattttactaaaagatattttttgattattatattatttattttaccttctttttggtttccaacggtggttacggcatgaccgaacgatcagatttcattttaaccgnacgcgtgg

SEQ ID NO: 36529 - DNA, 154 bp, Glycine max
  unsure (1)..(154): unsure at all n locations
  Clone ID: PAT_MRT3847_132989C.1
tagcacngacgcgtacggacagctcggtnactctggctccgaggntcncaaacgtcgggcacngtccaactcctngnaagcggcttntcngggnganntcatgngggaaaggtncaatatgcngaatcacaccgantgtnggaaganntgggcn

SEQ ID NO: 36530 - DNA, 604 bp, Glycine max
  unsure (1)..(604): unsure at all n locations
  Clone ID: PAT_MRT3847_13298C.1
gctgttctgactctgcgggatacacatgccagaatagctccatgctcctgcctagcctttcggtgtgcaaaaatgtgcctggaaatgatatttctggacagcattgtgcacccagtgagcctagcatactacagcagctggaagaggttgttgtcatacccaactaccaccgactattccctggtggtgctagaaaattatttaatatatttggcagctcctactgtgacgagactgctaaacggcttgcctgctgggtatgctgtcttttcaaactatatttgttctttagcttttcctgttttgtaattgtagcatggttgtttttagttattcttaaaattttgttttgcaatctgatttctgatggttttcattccttcactttctttcctagttggttcatacattatttaagtttaccacatgtgacactcattacgataaaaccatagtttaagccgaacttaaatggttccataggtgtttaatgatgtggctgttttattagccgagataatcctgactttcttagtttaatatgccaattaaaacccgagtgatgaatctttttacattaggtgngaactgaggaaaagaatgc

SEQ ID NO: 36531 - DNA, 558 bp, Glycine max
  Clone ID: PAT_MRT3847_132990C.1
cgaccaaactcactcttaacattatttatagctatggttgaacagtgagcaccaaactgaattgaaattgcaccaaatccacaaaaggcagcacacttacacactatcatgtttattgatgctataaacacacttgtgtgtgaagttatgattcctagaaaagaaatattactatccttttgaaaatcatttgaaatttttaactccatcttcctcacctctggatctgatcttcgcacggtgccatggatcgaatcctgaaagcggcgagagcctctggttctctcaacctctccaatcgctccctcacagaaattcccgacgaggtttaccggaatctggaggggctcggcggcgacgacaagtggtgggaggctgcggagcttcagaagcttattctggctcacaatagcattgcatcgttgaaggaagatctgaggaatttgccttttctttctgtgttgaatcttagccacaactctctttctcagcttccagctgctattggagagctggctcagttgaagatgttggatgtttcgttcaattcgatagtta

SEQ ID NO: 36532 - DNA, 775 bp, Glycine max
  Clone ID: PAT_MRT3847_132991C.1
cccggggatcctctagagtcgacctgcagcgcaaactcatgcagccaaacgatatcgtttatcgacggcctgtgcatcccatcttctaacaaacaactcatcccaatctcacaaaacttctcgaagcactcgggcgcgatagtccccttcaacgaggggtccacaatctgtgccatggtcccattttgataacagcgcctggcccaattggcaagcgacacctgttccgtctctgcattacggatcagaggcggtcgagcgcatagtatctcaaacagtactactccaaaagagtacacatcagacttctctgtcaaacggtaccttttataatactctgggtctaaatatccaaagcttcccttcacattggtgctgacatgggacttggacgtgtccgtgggcccaattctggaaagcccgaagtctgaaaccttggccacccatttatcatctaataagatgtttgtcgttttaacgtcgcggtggatgatcatgtgctttgcgcctgtgtgaagataatgcagcccacgcgcggcaccgatgcaaatctgcaaccgttgcttccacggtagagtggggttatccggtgttgtagagatggtcacggaggttgccacgtgtcatgaaatcatagaccaggatcatttccttattatcgttgcagtagccgatgagagagacgaggtggcgatggccgagttgtgagagcattctcaatttctttcaaaaaactgtgaaccccctgttgtgaaccccgtttgaggcgcttgat

SEQ ID NO: 36533 - DNA, 354 bp, Glycine max
  Clone ID: PAT_MRT3847_132992C.1
taaaaatatgcacactcccatgacagcccctatatgaagggattttttatgaggaaacaggagagtggaacggatccctgaacgcttggctaaggccaagagaaaaagtgcaggcactcaacacaagaacattcacagaagcaccaatggacacataacttgtagcaagaactcgtgttgatgagatcaacaaccaattgtacagccttaatcttacatgtccatggacagttggtatgaccaaattctatagaggttgggataagttgatgaaaagttgaccccactggagggttggcctgtcaaacaaatgggctacactttgatagctccctgacgcccttactactgaat

SEQ ID NO: 36534 - DNA, 172 bp, Glycine max
  Clone ID: PAT_MRT3847_132993C.1
ggaagcagcttcttccatggctctctcatccccatccttggctggtaaggtcgtgaacctgggtccatcagtcccataagtgtgaacgatgagcatgaggaagaccgtcgacaagcatgtctcctcaagaatcccatgaaacggtccagagcgactcatgtatcttggaccc

SEQ ID NO: 36535 - DNA, 548 bp, Glycine max
  Clone ID: PAT_MRT3847_132994C.1
atcataaaatgaacctgcaatttagggtttatctccttaaagcccgcactactgaccctagataaaggcaacacatagcaaatacagaaacagcgttgacctaagaatcgaccaaaaataaaaagcgagatgcgtgtatgtaaattagtgacaaagatcacacaaaaataataataaaaaaactcttacagtagtgcgtaggtacatagtaacctaaaacattacacaccaaacaacaacctttgctggattggatccctcgttttttttatttattttaaaagcctacccccaaagtggtgggattggattgttcttcaagagtcctttgaggaaggcgcgtcttgatcggaggacttggcggcggcggcggtggtggtgggaggaggaggaggaggagggttgcgaccgaaacgcgtgacgaagatgttgatgaggctgtagaagtggtagaatagttgggcactcaccagcactatcaggcacaaaacgacaaaatccattttgaaacgccaagaggacgaaagcaccaaagcggaaggtcccgg

SEQ ID NO: 36536 - DNA, 482 bp, Glycine max
  unsure (1)..(482): unsure at all n locations
  Clone ID: PAT_MRT3847_132995C.1
tgaaantnnnaagacagcatagatttcgatcggangacgctaggcgctcatcccacctccgaagtcggctcgagggttggagctctaactcgatcttcttcttttgttgttctgcgattgcgtttgttttttactctcacctggaaatgtcttgctgcggtggtaactgtggatgctgaagctcctgcacgcgcagcaacggctgctgatgctgcaacatgtacccagactctgagctacacgtggttaaccaccaccgacacctcggacatgggagtggcacctgagaaggctgaatttgacggtgctgaaatgggtgtgcccgctaaaaacgatggctgcgaatgtggaccaaactggttctgcaacccctgcacttgtacgtgaggtggcgcgagaccaagactgaaaccgacatagcccttaattacgaataatgataaactatttatgcgtagctaagaacttatgcttatgtctgt

SEQ ID NO: 36537 - DNA, 600 bp, Glycine max
  Clone ID: PAT_MRT3847_132996C.1
atcttctccataacgcttcattcttctcgctttttttgtttttatctcacatagagaagcgaaacgattgcttgcgctttctacgtagcaacaaatattcccctatttatcggcacgccttctgctgaatgaccaatctaccatttttctttctttctattgatgcggagtaagtccacaacagctaccgctagagattcgtcggtttttccattatctctgcgaattttgatggaatcctacaggcgattgaagtattccgcatcaactacaaccgcacgctgctatacagtgtttttttctcttcttgctgatccagacggcccgatgaacccgatgccaagatgccgaaagggagagactctgctccggcaactgcggcttctgcggatagccccgccacaatgaatcgctgggcctgatgctacagagacatccgtttgagggaatacaaacgcgccaagactagatccacaatcgaaaccgatcgttgtggaacttcctccgacagcgatcgccggtgcctccgccgtggattctcttccggcgacgggtgaatccctccctcaaccgtcggtggcgagttcgcaaaatgtggcc

SEQ ID NO: 36538 - DNA, 773 bp, Glycine max
  Clone ID: PAT_MRT3847_132997C.1
gaagttaacttgtatgggacacattcttgccaaacgccttatttgacggcctccacttgtcaatcatggctcccattgaaattttaatcaccgaaagagaattacaataaggcaagtaactgctaaatctcatgatgaaatatttcgaattcaaagtattaacaataatccatctccataaaagtgaatatccaatacaccaaggccccacttttagatgaaacaatcggaaagtaatgaagaaaagtaaatggcaattagaccgcaaaatctgtcgccattagtaagtttgttccacatcctagtctacctccacttctccaaatgtacacaatcagaaagccaattacaattgacttatgattatccatcacaagtaactacaagaagtaaaatgaaacaccaaagaaaaaaatcatgctaacatataataactgagccttttttcctcgaaggaatattcagcctcttgaaccatgtcatttccatgaggaactgatgtgggagttgttgaattcaagcttatgttcttgaaaattgaagaaggaactggagtcatggccatattcattggaactgatactgtcgaaggggtagctggggcaggaatatgtaggttggagtcctaggtcgtagcagattctcttcatctaccacagtaggaactgtcttggagggagtagtaaatggcccattgttaagcgacactgttctctgcaacttctcattctgtttactcagttcatctgtagcatttgccacattagcttttg

SEQ ID NO: 36539 - DNA, 234 bp, Glycine max
  Clone ID: PAT_MRT3847_132998C.1
gtaggacagctcctcatagtagctctttctttgcaacaaaactttgtctcacttttaagggaacgttcaccatcgtaccatggttactccaagacccatttatattcatactcacctctatttctggctttatatatatacatatatatattaatatacccattgtcaatcaataaaaccgaaatctactacgaaacaaacagcatatacatcacataactgctaccaataaaa

SEQ ID NO: 36540 - DNA, 503 bp, Glycine max
  Clone ID: PAT_MRT3847_132999C.1
ctattcatacacctcctcacactttatgacgacagttcctggcgtgttcgtggcgagccctaccgtctcgactccgctgctctcagatcaggccatgcagtcagagcgtatgactaagttgcacagatgtacactctgagtacaccatccaacggttggggttgggcctatatgccatctacatatgatttcttatcacgtgcaggagctgatccatcgactctggaccgctattcctaggactggtacggattatatggtggccagctaatccatatggctactaaatactttagacatcggtgattccatctaagtatgatagcgtgaacaggctcaaatgccctagcaaaccatattataaggatgtgatcgcttatagggggcttgctagttattgtttagggagagaatgtgttataacgttggatgtgagcgcaactggctgtactaaaagcgaatgatggccgacagtatgtctaaacaacaccaatattgccctg

SEQ ID NO: 36541 - DNA, 497 bp, Glycine max
  Clone ID: PAT_MRT3847_13299C.1
ggggttctggaacttttcctatgtaaagatgataacatgctttggacttacaataacccgtgttggacttacaatactgcgatattattttggatgacatgggcttccaataacctgcaattaggacttacccaaggtcatgtttacaggaagggggaatttttgtggttagccactacagtattatttattatactgtcatatacttgggtatagtagctggatcactaatgatggcttcgaaatatttggttttggttttgaaatgttgatgcttgactttagtgaatttcatagcacatccagtgatagtttcataatattctttttttatcaaaataatagatcctaaatgtcattatgtattaagaaaaaaagagtgtgttcaatttttggaatttcaaaaacaccctttgaacgttaacagctgttgtggggaagcgaggttggtttttaagttttaacagttgttgtgaggaagatgagggcaaaagtgt

SEQ ID NO: 36542 - DNA, 148 bp, Glycine max
  Clone ID: PAT_MRT3847_1329C.1
tcccacgcatacgaacatcacttaactgtcacaaaaaccctacgcattgtggcctttttcattcactcataaacatacatctgccattcttaaactactaatctactttatacaacatattttactaatacttttacttatatcttta

SEQ ID NO: 36543 - DNA, 902 bp, Glycine max
  Clone ID: PAT_MRT3847_132C.1
tgctctccaatcaagaatattcaatcacattttgataggttgaatttgttaccaacagttaattgctaatatggcatgcatgaagagtgttgtgtgtgcgtaagaactacatctacatacatacatactacaacacaatcaacactagcctttattgctttgtattgatcactcttgtcttcacttgtttgattatattttccttttcttgtaaaaactcttttagagtttcaggtgtataaggaggaggcaatatacatggaggtgtatcacttggtgagatcaccatggattcaaccataaaatgtttcctttgaccatgcaaggaacaagccatactttcagaacaaatctcaacagctcctataggtatggttggtttgaatttcaagagttttgaatagttatttaataaatgaaacatgtaatcatatacaaatttcatctttaaattctctaagatgtagttagttcctccatctccaattgcttgtgcatggtcaaggtgagcatttccccaatccactgcatacttaatctcttcacacatattttttgtgctgataggccagtagtgtcgcaaaggtaacatatttcttgtaaagaagtcataatacttaggttctataaacatagtcattgagtcacatgctatgatgtacttttcactcacagaccacgtggccccttctgcatagatcttatatctaaaggtacattgattttcaagttttgaattctcaaaattacttgctctctcctgtagccattgtatgtcatatattcttgcattccaatcttgtttttctgtgacattgcacttgccaagttctctcctaataatagacacttttgggttgcccttccaaaaagcatagggaatcctatccttccatatgacc

SEQ ID NO: 36544 - DNA, 236 bp, Glycine max
  Clone ID: PAT_MRT3847_133000C.1
gcagaatgtgccgtggtcgcttttggatgcaacgacgacgggcagttaggcacgggtgcgaatcgccgaaagacgctggctatcgacgatgtgtcggcttccaatttccccaagctggtcgacggcctgctggacgaggaaatcgtcgctgtctcttgtggctctcgccatacaatggcgctcaactgcaaacggtgccgtgtactcatggggatggggatcgatgggacaattgg

SEQ ID NO: 36545 - DNA, 1179 bp, Glycine max
  Clone ID: PAT_MRT3847_133001C.1
cccgccttcgtcgtctccgctgtcggccctgtttcgtataaacctacccaaccacccttttctttcttttgtgtttcttgctttcttcttcttcgctttcgtcccttttcggagtatccctcccaaccatggacgttgatccttgccaatacgaacaaattgctataaatgaaaaagatgtcaacaacatcattctgtcataccttatacataattgctacaaagagtcatcagagtcattcatttcttgcactgggatgaagcagcctgcagatcatttggagaacatggaaaaaagaaaaagtagtaaggcctccttgatggataaatttcattcatctttaggaatctttcaccatgcattggagggaaatgtacttaaggcgattgagctcacagggcagctggcacaggatattctggagaacaataatgatttgctgtttgatcttctaagccttcattttgtagaccttgtctgctctaaggaatgggcagaagctttggagtttgctcagaccaagttgagtccttttagtgtgaaggagcagaaatatatggaaaaaatagaaggttttatgtcccttcttgcttatgagaatccagtggaatgcccaatgtttcatctgattggcttagactatcggcaacaagttgtggatagtttgaatcaaactattctcgcacactttaaccttcccatccacactgccatggagcggcttatacaacagacctcagtagttagacaatgcttaagcctggaggatggggggcctccaccattttccttgaaggatattcttaaaagtcaatgaaaagcagttaaatatccactgggatgttgaggaatgaagcatgtgtacattgtgccttttttgccacataagggattggtgcatgcatgatttgatcactagtgtaaagttgtcttcgtatacttttgtataaattttttggtagcaggctatctagatctttcgggtcatattgcattctttaggtattagtgttccatgaaaatggagaaaattgcaattctaccggattaagataatattttctttctggggaatttgatctaattgtggccttaagatgtcgtcaaaaatccataggttcccacattttagattgtattcaaccccttgtgaggtttagatgacaaccatatacatt

SEQ ID NO: 36546 - DNA, 393 bp, Glycine max
  Clone ID: PAT_MRT3847_133002C.1
ggggaaaaaataaggccccaaaaatttattaaatcattgaacccccaagggaaaaatgtaaaaaaggcccaaaagggggccccaaagggacatttaacccacaaaaaaactaggggtttcccctttaacaaagggttttttagaaaacaaatttttaaagcctgaaaaatggggaccccacattggggcccccttttaaaaaacatgtttggccctttgaaagcccagatttgggggggggtaattttaaaaatggggagcctggaaaatttaattttggtaaaccccaatttttctggccaaatggaatccggtttttaaaaaggtgggaccacaaaatttttcacattcaaaaaagcccgcagcctttaaaagcctgccaaaagggtttgg

SEQ ID NO: 36547 - DNA, 572 bp, Glycine max
  unsure (1)..(572): unsure at all n locations
  Clone ID: PAT_MRT3847_133003C.1
tcgcaaaaattactttttgttgacttgaacacttaagttgtcatctttacacaattaatacactttaaaaaaacataaaagattggtttaaaaatatgaatatatcatcatttaaatatttcattatatgttactcatacttcatttagttagaatgtctttgtttgtgtgtgtatgcagtgttcctgtgtattttagatgttaattgcattaaagtgtatgtgttgtatccgatgttcaagtcagagttcatgcttcatagatctatagtccctcctaagattttggttttttcttggagattattacaagacagactgcccacgtgttagcaactacacagaagaagggcctactatatcaacctttacaacaatcttgcagattatgtaaatctaaggtggagaccaacatctttttttatcatgttcttctccttccatatatggaatgcagttatcaactggctaagtataaactttgtaattccagaagacatcaatttgctatacacagggtcgatcctaacattntgtaggcccatggtgaaataataaatatgggccctttac

SEQ ID NO: 36548 - DNA, 1562 bp, Glycine max
  Clone ID: PAT_MRT3847_133004C.1
ccttcgcgtccgccaatgcggctcgggatttgcgtttactgatctcaagtcttccacctcactgtcgtagcgtagtgattgtggggtttctcttctcagttctcatcgtgacgatcttgctgctccgaaaaagggttttcctaacatcgcccattcaatttccgggctgttcagttcgtgaatagactgttgtttgttctaaaaagtagtggatagtaaaaattatcgaacttttttaagagaaaaatgcagagtaaagaagcagttgtggaagatggggaaataaagagtgtgactgctgtagggtctgaaattgatgggtggaccaattttggggatgatgacataatgcaacagcagtatacaattcaggctgaggaagccaagaaggttccatttgtgggtgacaaggaaccactgagtagcttagctgctgaatataaattaggcagtcctatcttgctggagaaaataaaggtgcttgatgagcaatatgctgccattcgtcgtactcggggagatggaaactgcttctttcgaagctttatgttttcatatcttgagcatattatggaatgtcaagaccaagcagaaattgatcgtttggaagccgatgtggaaaaaagtagaaaggcgctgcagcagacttgacttttgaagatttttttgcgttattccttgagcagctggaatctgttattcaagggaaagagacttccataagtcatgaagagcttgttcttagaagccgagatcagtcagtatctgattatgtcgttatgttcttcagatttgttacctctgctgaaatacaaaagcgcacagaattttttgaaccattcatactaggcttaactaatacaacggtcgagcagttttgcaaatcatctgttgaaccaatgggtgaagagagcgaccacatgcacattactgccctttcggacgcattgggcattccaatccgtgttgtgtaccttgaccgcagctcatgtgatactggcggtgtcagtgtaaatcatcatgatttcatgccagtggctggtgatctcccaaatgctagttgcagctctgaaaagaacattcctttcatcacgctgctatatcgtcctggtcactatgatatcctctatacaaaatgatgacctttttggggggaaaagacctttgtttgttacttttttggtggtagtgggagccgcaacagctctgcactcagagctgttgctgtaggacatatgtggtctgtatcttgttaatgttgaatggtcaattttcttgaacgttacctgtttagaagagattgatcaacaaagtacgtcaacattaacgcactaataatttaaaacccagtttgattttgctgctttacatgttatccatgatttcattgttctcaatatctctccatgggggtttagtgattagtgtaatagcatggctccttgtagcttctgtagaatgaagcacgtgcattatctcaatggcaatggcaatggcagtttctgttttgcatgtgtgctcatttgttacacaataatattgcacaaatgatctttttatcc

SEQ ID NO: 36549 - DNA, 865 bp, Glycine max
  Clone ID: PAT_MRT3847_133005C.1
tttgcttttactgatctcagtcttccacctcactgtcctagattgtggggtttctcttttcagttctcatcgtaactaccataggttccgttaaacattccccttttcgtgctctttttatttttatttttttcatttctcaatgcgaattgaagcagatttcactgtggttttttattctcttttcatttgcagttgctgctccgaaaagggttttcctaacaccgcccatgcaatcaatttccgaaaaatgcagagtaaagaagctgttgtggaagatggggaaataaagagtgtgactgctgtagggtctgaaattgatgggtggaccaattttggggacgatgacataatgcagcagcagtatacaattcagtctgaagaggctaagaaagttccatttgtgggcgacaaggaaccactgagtagcttagctgctgaatataaatcaggcagtcctatcttgctggagaaaataaaggtgcttgatgagcaatacgctgccattcgtcgtactcgaggagatggaaactgcttctttcgaagctttatgttttcatatcttgagcatgttatgaaatgtcaagaccaagcagaagttgatcgtatccaagccaatgttgaaaaaagtagaaaagcactgcagaccttgggttatgcagacttgacttttgaagatttttttgcgttattccttgagcagctggaatctgttattcaagggaaagagacttccataagtcatgaagagcttgttcttagaagccgagatcagtcagtatctgattatgtcgttatgttctttcagatttgttacctctgccgcaatacaaaagcgcacagaattttttgaaccattcatact

SEQ ID NO: 36550 - DNA, 123 bp, Glycine max
  Clone ID: PAT_MRT3847_133006C.1
acagagaaatttcccaaattttatttaacccgatttgcggccccattaacttgatataaataaaagtcgtatggccttggcctgggccaaactatgtgaaaagcttaattagcctgaattggt

SEQ ID NO: 36551 - DNA, 467 bp, Glycine max
  unsure (1)..(467): unsure at all n locations
  Clone ID: PAT_MRT3847_133007C.1
gcgagcgaaatgctatatgaagtgcctaaagccacctttcgagaataattacccattgctgggatataacncgtcggccgagattctcaatattgcaggggggagactaaagacatattacactcttcatcaacaaatgagattcatactaatattctcaatattatcaatatacacagccatctttttctcatattgggaccaaatattatatcggaaccttctccaatgacattacaagctcccctgtctcagagacacccttatattccctcagaaaagcgaatatagcgcaactctattgctacatcgtcttgacaccgaatgcatggatacagacaatatagaatttgaatttctcctccttacataaacaaaccatgctcagcattgctgccaacttacagatcattcgacgaagcatttggaacttctttacgatagagaatgagcattcgaacaacgtt

SEQ ID NO: 36552 - DNA, 264 bp, Glycine max
  Clone ID: PAT_MRT3847_133008C.1
ctcgagccgaatcggctcgacttaatcgcttatcacttcacttcactattgcatcatggcacacgagacccagaacaagtatgagagctctgaggttgaggtccaggatcgtggtgtttttgactttctcggtaagaaaaaggatgaagaatacaagcctcatcctcaggaggaggtcatggccacggagtttcaagaagtcactgtctcataccaaggagatttcacgcgcagcctcttagaaaagcttcactgatgtcactg

SEQ ID NO: 36553 - DNA, 504 bp, Glycine max
  Clone ID: PAT_MRT3847_133009C.1
acatcgttagtagtgccgccttcttggggggggggggggggggggggggggggggggggggggggggggggggggggggggggggggggggggggggggggggagccacaaaaaaacttaattgggggggggggggagaaaaccccggataaattccggggggccaaagggtttaacagtgaaaattttggccctttacggggggggggttaaatggaaaaaaaattctaaatggggcaaatttgggtattacccccaccgccttggcctttttagaagaagggggaatttttgaaagaagctttacgtgggggcgcttaaaaaaaggttttgccaaaaagaaccttttactggaaatgcccggattattgggccaaccccccttttgcctttaaaaaaaaagtccccccccaggaaaataaccgtttccccaggggccaggttttaattacccgcggccggggataactttcccattttacaagatgggccggctttttttaa

SEQ ID NO: 36554 - DNA, 258 bp, Glycine max
  Clone ID: PAT_MRT3847_13300C.1
ggaccctttgactcctatgcattgaagactgaactggtgcgtactggaagctcataccgacatacttcgagatggcccgttcaaagcatactgcttgtaagtcaactggaggaaatgctccgagatagcagcttgcaacctgggctgaacgttagtctgcacgaacaactgctggtgtgaagaaacctcatcgttatcgacctataactgttgctcttcgtgagattacgaaataccagaatagcactgagctcctaa

SEQ ID NO: 36555 - DNA, 256 bp, Glycine max
  Clone ID: PAT_MRT3847_133010C.1
ccagaggcacgttgagattggaagggtcgctccgatcaactatggcaaagagtacgggcggctcgcgatccttgtcgctgtcattgaccaaaatagggctctgggtgatgctcccgacatgggtgaggcacccagtgaacttcaagaggctctcaatcaccgacatatgattttttctcccccgctccccggaaggaggatctcctctccacccatgggggctgctgccgctaaaaccaaaagagaaaaaacttct

SEQ ID NO: 36556 - DNA, 593 bp, Glycine max
  unsure (1)..(593): unsure at all n locations
  Clone ID: PAT_MRT3847_133011C.1
aaatgagctttggcagtaccaaggctaggcttcacagatttggccaaaccagctctacactcctccacgaaacccaaccccaacccaagatgtgcgatttggcgacgatcagaatgaagcaaatttccagaaattaaaaaatcagacgcggtgtggttgttgatgttgagaagtggcaacatattacttaaaattcgtcgttgaaatcaaaacgaagagagagaaatagggcttgattatgggttgtgactgtgggggaaagttaaatgtgagaaagcctcatttctatgaggtttattcttctgccttcagctctcacagactgagacttcccgatggatttgtctgttatatggagggaagggcatatggatcagtttcgttgactggtcctagtggaaacatatggactgtgcaattgattaagcaagacaatgatctatttttccatcatggatggtcgacatttgtggtggatcatcgactagaatgtggtgaacttttggttttcagatatgagggtcacttgcattntaccgtgcanatatttgataaggatgcatgtgagaaagaggcagcgtttcattctgaat

SEQ ID NO: 36557 - DNA, 1115 bp, Glycine max
  unsure (1)..(1115): unsure at all n locations
  Clone ID: PAT_MRT3847_133012C.1
accaggtgattctctcacactgtcttgtgttgtgttgtgtcatggcattaactgccactacttcaatcaacataagtcaccatagcactttgatttttcctccgaaacaacacaagcagcaccttagaatccacaggtttcgatgcagtggaactaatccgaacaaagagtcggaatcacagaacaatgcaattctcaagcttgcatggtatagttccgagcttcttggcattgcagcgtccgttttccgttcaccatctaatgaggaagttcctcctcagaggcttcttcagaccattgatcgtgctgcggttgtggacactatcaaacaagactttgaaagatcctattttgtcacagacccagcaggctcatttaaagggcttcagcgattcaaaaggaactgcactaattttggatcccttctggagaagtcaaacatgaagctgatgaagtgggaagattttgaagacaaaggaattggacattggcgattcaactgtatcttgtcctttccttggaggcccattctttctgcaactggatacacagaatactattttgatgcacgatcgggaaaagtatgcaggcatgtggagcactggaatgttcccaaaaaggcattgttcaagcaaattctaaggcctagtcgtggatttggcttaaaagattatgtgaataggtggttgaaagcagtgcagatgaagctttaaattacaatagttctgtgatggtgtcaacaatatatatagctttgaaatattggatgcttgatgtaagcttatgaagatctcgtgctgcaaattacatggacgaaggatcaattaggatattccttatatattttggatcaataagagtaaaaaaacataacaaatattttttatttttgtttttgcaaacataacttacaacattttttatttttgtatttttgtccgtgcataaaacaaaagtcaaaaaggcaaatcattttcttagatcttaactagaaaaaaaaaaaaaaaaaaaaaaaaaaaaaaaaaaaaaaaaaaaaaaaaaaaaaaagctaacataatagcaaagaaacccacaccaatcacccttcccaacagttacccancctaaataacgaa

SEQ ID NO: 36558 - DNA, 890 bp, Glycine max
  Clone ID: PAT_MRT3847_133013C.1
gttgtgtcatggcattaactgccactacttcaatcaacataagtcaccatagcactttgatttttcctccgaaacaacacaagcagcaccttagaatccacaggtttcgatgcagtggaactaatccgaacaaagagtcggaatcacagaacaatgcaattctcaagcttgcatggtatagttccgagcttcttggcattgcagcgtccgttttccgttcaccatctaatgaggaagttcctcctcagaggcttcttcagaccattgatcgtgctgcggttgtggacactatcaaacaagactttgaaagatcctattttgtcacaggagatctgacattaaatgcttatgaagaggattgtgaatttgcggacccagcaggctcatttaaagggcttcagcgattcaaaaggaactgcactaattttggatcccttctggagaagtcaaacatgaagcttatgaagtgggaagattttgaagacaaaggaattggacattggcgattcaactgtatcttgtcctttccttggaggcccattctttctgcaactggatacacagaatactattttgatgcacgatcgggaaaagtatgcaggcatgtggagcactggaatgttcccaaaaaggcattgttcaagcaaattctaaggcctagtcgtggatttggcttaaaagattatgtgaataggtggttgaaagcagtgcagatgaagctttaaattacaatagttctgtgatggtgtcaacaatatatatagctttgaaatattggatgcttgatgtaagcttatgaagatctcgtgctgcaaattacatggacgaaggatcaattaggatattccttatatattttggatcaataagagtaaaaaaacatacccaat

SEQ ID NO: 36559 - DNA, 346 bp, Glycine max
  Clone ID: PAT_MRT3847_133014C.1
attgtttccaaagctccttagtcacatatacaacgtaaggatggacatgctggcctctaacgactgggatctagagtctattgacagcttggaggttttggatatcataaagcaacacgtgagtaccgagacaggtatgcgatcaaatactaccgtaagggagagttaccaaacgactcctattcgacaattctgggttgcacgagtctatgtcaactagatattatatggctactgtgtgaagctagtttgattgacgctcaacctaaaccgaattctgtgactgtctgaccaagatcttcataatgagaacacgaccagccctgcattggaagacatggattga

SEQ ID NO: 36560 - DNA, 533 bp, Glycine max
  Clone ID: PAT_MRT3847_133015C.1
cgggtcttctttcgcgtccgcttgcccattcactttcgtcaatttgatggtatccctgattcctggcagctacttgttccaaattctgctgcttcatttctgtgggaagatcttggtagaagacgcttattggaactcttggtagatggaactgacccaatgaaatcactcaagtttgatattgatgaaatttttgatcaccaatccatccatggaaatgatggaccaaccagagccttgcgtgttactattgtaaaggaagaaaaaaccaatgttgttaagatcagtgattggatgcctgaaaatgaacctactggagttccaagaagacatttatcatcaacgaatgattctcaaaagcaacaactgacgtcaattacagattgtgaattccacatcaactctgatcttgctgagcttgggatatctattattgatcatacacctgaggaaattttgtatctctctgttcagaatcttgttttggcatattcaactggtttgggctctggaattagtcgattcaaaatcag

SEQ ID NO: 36561 - DNA, 739 bp, Glycine max
  Clone ID: PAT_MRT3847_133016C.1
caacatatcacaacactcatctccttccttccttgctagttcttgttcaactgcctgcccctccgatcccataatcctatgaaatgacacccttcactcacaatctcaacctcgttcataacgttgtttttcaattaacaaagcaaaacattgttgctcgccacaaccactagaatgtcgtgtttgttgccgcacttcaactgccacctcgacactttcaggactcatccctatgctcttcctacccatccatcaaaaacaagactaaatttgtgtttccagccgcaatgtgtgttgtctgccacatctccttcaacgctgcttagtttggaaaagaagttggcattagatgctccttctgatccaaacacgtcttggccctatatcgctgctgttgcccctccctcaccacacttaaaggccaactttaaatcaaccttatctgcggaatcacttcttactaatgaagaggctgtaatagctgctgctgcatctgaagctcttgctcttgctaaagcagctgtgaaggttgcaaaggatgcagttttactagtaaaaaagaagcctccagcagaagcagagtataaatcccatgtttcttccaaatctgatgatttacttctcaaatggtttcatcaaatggaagcggaagaatggtgtagcagaagagtcccatgggtgctggagcagaaataatggaaagtgttgacataagccccagcgaagaggaatctgatct

SEQ ID NO: 36562 - DNA, 392 bp, Glycine max
  Clone ID: PAT_MRT3847_133017C.1
gttctgaaggttcttcctttacatgtaaatggtttgcaacaagaaagtttcctcttacacgcatatcccttaaataggaccgttttttgttacaaactttgttgatgatgaaactttgttggagtatctgttcgaccacctccggtagagactctcttcccaatcaattctttttatctacaaagttcgaattgaagatcttagtatttttagaaatctaagttgaattctacttggatcaactaattagataatttataataagatataaaaattaacatgacatgccgtatattttaagaaatagtaagcataccaaaatcttaaggattaacaccctagaaattttaagactaaattaatcaacacattcaagtttaaagatgaaaatg

SEQ ID NO: 36563 - DNA, 722 bp, Glycine max
  unsure (1)..(722): unsure at all n locations
  Clone ID: PAT_MRT3847_133018C.1
aaataaatntggaccatttnnatcgttttaaaaaaaagggccaaataaaaacacaaataaacggtgttacaaattttaagcatattgccatattccatttttattaaaaaaatatgaaaagggaaggacggaaattgaaagggtgggaagaaaaagggggcacattgaaataactaaaggggcagggcaattttttcgattattcnccatttaaaaaaactgagaaacaataattaaagggaccaaaaaaaagggnccacacactgatttgnaaaaggaaaaacaaacaaggttaaagggaaaacaaataaattcagaagggtactaaaagttggaaagggagggaaaaggaaataattagttaatagaaccaaactagggtgaaaaaacccacttttaatttcaataaaagaaaaaacaggcaaattattattccctccccccaaaaagggcaagaaaaattgaaaggggggtggggggggggaaaaaagaaaaagcccccatttattattaaaacaataaccccaaaatccacgggaccccggggggggaacggggaaaaaaaggaccggccccggaagggcggccaatatacccaaaaaggagaggaaaagaaaaaagggggggaaaaggggggcaaaaaaggtaacngggaaggaaaaataaaaaaccggaaaaaaaataccaacaaaaaagcaaacgggaaaacaaaaaggggaaaa

SEQ ID NO: 36564 - DNA, 403 bp, Glycine max
  Clone ID: PAT_MRT3847_133019C.1
aagcaattgatagtgaacgtctaattgcttaccttgaccgccaagtgttgcgattttaatggaggttactattaattaggtgcacgaaattaacgtccaataaatacgcgatatgtggcgatcaacgttgacaagtagtcaacgttcaatctcgggattacaaaaaattgagaaagcgtgaattaaattatagggagaccaaaatcaaattttgagacaaatagggagaccaactttacaattttaccttaattttaataccttaagaacctgtacacttttcacagattagtaggaaaattcatgaaaattgccataccattaactgcacgtaaataagtgattccccaaataaagcacataaagaaaaaaggtgaatgagaatgtaagagttattaccaag

SEQ ID NO: 36565 - DNA, 163 bp, Glycine max
  Clone ID: PAT_MRT3847_13301C.1
gggagatcaaggtggtggatgagaaaaacatttgggtttattaacgcgcccattgggtgggtggcaaggtgggtaccaaaagtcattcttatttctgggttggtgaggtcctaaaaaaaaatgattttgggcgataccgggaaaatgaatggatgagtggttt

SEQ ID NO: 36566 - DNA, 431 bp, Glycine max
  Clone ID: PAT_MRT3847_133020C.1
cccacgcgtccgtgaataccaatgcaggctatcaaggcaagaaaaaggttatttgatagcgaaatttcagcagacaatagactcgtataagaaacccatgatcaaaggccgattttttaatgacatgaacaactttccatgaatgagaagtaggagctcaacctctttttagctgtttgaaacttgaaagtaatgctttatgagattttgtttgtttatttttcattggtaatgtttttcgttaaaattgtagggttttaagttttttttgcaaaaatgggtttggtaacttttccactttcactttcctcgctttttttaaatcctccctcctcatctatctcccctttatcaataattgatgtaagagattattgataaaacttattttttaatttatttacatatttaaaaattatgttggaattttt

SEQ ID NO: 36567 - DNA, 459 bp, Glycine max
  Clone ID: PAT_MRT3847_133021C.1
gacaacatggtttggttctttaattcacatttccatgggtttaatgaagacgaggttacaaaactcgcttgttaaaacgccccttccctattttgacaggatatgattaagcatgcattaagtacatcttgggggactctacagaatacgaaagacgcttgaagcaatttggctcttggcattgatacaaatcctggggcactatgaacagtgacttgcgaactcactagacatgtgaacagtatcttatgaagatcgatgcacatattagatagcactaccctcttctactactgctgagcactctttgaaggtggaaagcttatgcctgctctccattcagggatcgcctgactaagcagcatgctttatgctgtctaagtaacctgtccagatgagagtgcgaacaaagcatggaatctttcatatcaagatccgaggacaatctcatggcattta

SEQ ID NO: 36568 - DNA, 378 bp, Glycine max
  Clone ID: PAT_MRT3847_133022C.1
aatgacccgggtactgcgcagctcactagagcggcggaacgccgctttcgagtgggtaaaatgtgttgtcccaaagaaagaccatctttcttctttctgtcaggcaccaaaggaagggactgaaatggcttaaaaaaccgagacttttacctgtgacgacgaggctaagcacaatcacaggagaggatagctggattagaataaaaggcaaactgcatgaggataccccttttttggaagaacatacaggaggtgactaccgtttattggctagaacaaataacgatgcccccactgaaaatgaacgatttgggcacacaagattcaggttcaggagaagatggtaacaaaaattgatggtgaggctgacaccaacac

SEQ ID NO: 36569 - DNA, 462 bp, Glycine max
  Clone ID: PAT_MRT3847_133023C.1
gttaattgcggaatatttcggaaggatgccttacgtggctcataacgatgatcagccccaagagaaagatgcgtcggagggaaaatatgactgtggtattaaagctcgcccagattggaaaaagttacctctacaaaagcacaacatggtagtggaaaaacctccaaatatgacataattggggctggtaacattctacagaagattttcctgaaaaggaagatcaagaaaaacccaaaaaagattgatgccagactgagacaaagaatagatccccaatacaatgaggttcaggctcaaatggaaaacaaattgtctaaaaagactactgaagatggtgaaacccccaaagggtccatgctggaacttaaaaatactcaaactaaaattgcacttcccaaaaaaacagttggaggaaccattctgcggagcgaaccattggcaattttatgacagaggcaa

SEQ ID NO: 36570 - DNA, 200 bp, Glycine max
  Clone ID: PAT_MRT3847_133024C.1
atcagacttacagactcgctttcaagagttgcatcactatctcttcctcggaacctatccggtctaccactttcctcacctgcgcactctacttactatactacatctaccaagctaaacagctatactattactgtacatactcatcataattacatccagactctctcaattgatcctccagcacatcaacatgatca

SEQ ID NO: 36571 - DNA, 395 bp, Glycine max
  Clone ID: PAT_MRT3847_133025C.1
gaagactcatgaagtctacaaggctgttcgagcacctagtgagttagggtctgaagagctaatgcagaatcactattctctacttgaagatgcccatctcataaccgagaaggagatctgctctggcagcgatagatgatatgagagctgatggatatgaaccatcaaaagagatgctaaaaaaggtcagacagccatgcacacgagagatggacaatgaaagagatgccagagagcactcagtgaataattccttgaattaccagcagggagcagataaccgacgggacatatctgtctaatcttaattacagagttggatatgctggaatggaatacctctgtctattataggatgctgatcaagttggcgggatcgagatgtgacaagaaca

SEQ ID NO: 36572 - DNA, 359 bp, Glycine max
  Clone ID: PAT_MRT3847_133026C.1
actcggcctccctttcttttttttttcattttttttttattatacaaacaaaacctgattttctgcgaacattaaatgtctatagccaactataaaaaaaatgtaaaccatttattcatgcttaacacaaaactgaccaaaaataaggctctcaaatccaagattcttccctacttgggccattcaaaatctaccttacacccaaataacattttttttacttgcccagtcattaaaccccattcgacatgaactttcactccccatcataaaaattatcctccgccaaatagatagttgccacccctgcaaccaacttaacctttcttttctaataaatcaacttcttaatggagtac

SEQ ID NO: 36573 - DNA, 260 bp, Glycine max
  Clone ID: PAT_MRT3847_133027C.1
aaaaaacaactgcttgattggtgcagacgacttcaagagtggacagaccaagatgaaatctgtcttggtcgattttcttgttggtgctggaataaagcgcacctcaatcgtgagctacaaccacttgggaaacaacgccggcatgaacctgtctgcccctcaaacattcaggtccaaggagatctccaagatcaacgtggtggatgacatggtctcgagcaatgccatcctctatgagcccggcgagcatcccgatcatg

SEQ ID NO: 36574 - DNA, 319 bp, Glycine max
  Clone ID: PAT_MRT3847_133028C.1
ggctgccaagcgcattcttatggagcttaaggacttgctgaaagacccaccaacttcttgcagagctggaccattagctgatgacatgttgcattggctagcaacgattatgggtcctgctgatagtccttatgctggaggtgtattcctagtcactattcactttcctccggattattctttcaatcctgccacagttgcctatatgactaaggtgtttaatccgaacatcatcagcaatgggatcatgtgtttttgttttcttaaggtagtgtggagtcttgctctaccatatactatgtgcatgcttcttatctgc

SEQ ID NO: 36575 - DNA, 1136 bp, Glycine max
  Clone ID: PAT_MRT3847_133029C.1
ggctcgagaatctagccgagctccttctccttcacttcagtcacctttcctctctgcgtttgtttcccattctcaaagacacttcacaaacacgtttctcttttttctcatcatcatggccagaccccaacaacgctatcgtggagtacgccaaaggcactggggctcttgggtctctgaaatttgccaccctttgttgaagactagaatatggctaggaacttttgaaacagcagaagatgcagcaagagcatatgatgaagcagctaggctcatgtgtgggtcaaaagcacgcaccaatttcccatacaaccccaatgagccacattcatcatcatccaagcttctctctgccactttaacggccaagttacataagtgtcacatggcttccctttcccttcaaatggccaagcagaaaccaccacagagcaaagagcctcaaccatcacatgggtcatccaatccatttgcctttgccaatgtcattgctggatcaagcgctgacaccggttttcgatggccagataacagacatgaggaattcagatggcttgaagggaattgggttggtgtggaaggccaggttgaagtttcccatcaacagtttcagccagttcttgaagatgatcacatagagcagatgatacaggagttgcttgattatggatcaattgagctttgctctgttggcttaacctagactctaaagtataatagcattcaaggttttaaaaaacggtctgcaactgtgttttcagccgcaacataaaggtttttggagtgtctgctactgcaatgcagtcacaattgtggtgactgcattagttgtatttgtctgcaattttctgtaatatcaaggaacacgataaactgcgatcgcgatcgttttttaaaaccttgatagcatattctcaactggcaagtgcaaacatctctttaggggtactaattcaccatgtaataaataaaggtataagcttcgtttagtaccaatggaaaatcttagtcacctttagtttctgttacttcaccaattagtggacaacaatatgcggaaccagaatgtagccaatgatgcgaatgaaatatcgtgcatatgatggactataatagagaatttgtatcaatagagt

SEQ ID NO: 36576 - DNA, 326 bp, Glycine max
  Clone ID: PAT_MRT3847_13302C.1
gaaaaaacacaataatagaaaatgataattttctttctgttttgagcaacgaacaacaccaattacaacaggaaggggaggaaggagagaaaaaaaaaaagcagcgaacaaagctctagctgtgtgcgtcactgtcaagccaccctccatcggtacaagatttctctctgccgtgttccgacatgtgagaccaccactagtgccctcctcctcctcgcatcacatgattacaagaaaatcagaaaaaaatgagagaattttttacagatgagaggggagagaaaaactgttcgagagagaaattaacttttatttatttttaaata

SEQ ID NO: 36577 - DNA, 233 bp, Glycine max
  Clone ID: PAT_MRT3847_133030C.1
aagcaactaggagtaaatgacatggatctactagagacgctatatgctgataggaattattgctgattaaaatactgctgtcttatgatattaccactataggggttattaatgtatgatattgcgattatgatacgacatgagaactttgacctcagagctattgaaaatgatgacatctccatctcatcaaaacatatgaattgtttgatcaatcagaggctagtgccaac

SEQ ID NO: 36578 - DNA, 390 bp, Glycine max
  Clone ID: PAT_MRT3847_133031C.1
accatgctttctgttttgccgagagagggtttctacagtatcccacgcgtgtaagacaatatgcacagggaatagtctgttatattataaaaacaagcagagcggcagggtaaaacatgaattctgtggaaatcagagagctgccaagttggctggccttactgaacagccccatgtgtccggctcggctaattgcaaagatgcccgtacggtagggactatcgaacttgtgaacagggccgaatggctaaagggagaacgccgtgtctcaaatgcattcaaacgtggactctgtgggggatggtatgcaatgcaacttctacacttgtcatcgtgctaaagagcgatccgtggattatctctatttactttctaacttggtttgtgagc

SEQ ID NO: 36579 - DNA, 323 bp, Glycine max
  Clone ID: PAT_MRT3847_133032C.1
cgacccacgcatgcgtccgcatcaagacacacatcattagcataggtattaatacgagggctgagtactcgcaggtggacgagacacgaacgctcgcacgaacgctcatctactggaccttagccttctcattatacatggccatatgctatatatggcctttccgaatgaatcacgtaacagacgctgaacatataaaccgcgcatagcttggaatgcctgctacaaagctgtggcttgcctgttactgtgtacatactcaaacaattcgacggaaccttcgactcagacgaccgttcaaatccagactctatcgccgatat

SEQ ID NO: 36580 - DNA, 343 bp, Glycine max
  Clone ID: PAT_MRT3847_133033C.1
gtcatttgtaaagacaggcttgattcattcacggaggggcagactgctaacataaaggatccttactcaggcgaaattggcgctctctccacttgtactggggggagtattactggttatgggaaacaaaccgattccttgtgctgggcacagactatagaacagcgtttgatagtctattactagtatgttggctcaacacgcttacagtgtaagtaagactctgggtcaaagacaaacttactaagtcactcactcactgaactgtgaaactgggaattcaaggtatattaatctagtattagaagtaagagggttctaagtcatatttgattttcaggtt

SEQ ID NO: 36581 - DNA, 618 bp, Glycine max
  Clone ID: PAT_MRT3847_133034C.1
acgagatttttacattctagcaacctgttaggtgctgggtttgtggttgctgctttcgagggtccagcacctccagaagaagaagataagaagaagacaagctcatggtaaggaggaaattctatttctcatatcctgcttgtttatttacatggctatatatagaggaattcacataacagatttgtatcaattcttatccaaaaggaatattctaataacagatcttgttatgcatgtatgtctatgagggagtacacaccccaagcaggatttggtgctgattctattaatccggtcttccaattctgcctcttagacgtcatcatcaaggtatgctggcttcaccactcttctcttggtctcttcttctctttgcacctttgctgctggtgcttcctctgttttctgggattataagcttgctcgtatcacaaccttccttgtaaattgtcctttccacattagttgttaaataggttaccacttaccaatcatattcccctagactttttctattttttttttgtcacagacaagtaaatgagtattgtcaaatgtctacgttaaacattgaaatgtaatctttatccagaagcactcagcatacaaaaaaaa

SEQ ID NO: 36582 - DNA, 319 bp, Glycine max
  Clone ID: PAT_MRT3847_133035C.1
gtttgtagataacgtaatcgcgggtgtcatggaccatcttaatatgcagattcatccatgagtcaggattgatcttttccacattatcctattgcatgccctcatcatcgatgaaagatatgtgaactgtactctccatgttgcaagatgccatggacaaaaagcagcattgcctttcatcgagtctgttgagatctcctatttggacatggaagataacaaagcatccaatctggatcaccacccattatagcttaataggacaacagcatataacagagcatgtgaaatggttctcagactcatctctaatgatggt

SEQ ID NO: 36583 - DNA, 564 bp, Glycine max
  Clone ID: PAT_MRT3847_133036C.1
gtacttgagatttgagaatcatatttaaaaaaatggatataataatattacacacttgacacttccaaaaataaatttgagggataaaaaaaagtagagaaaacaattttacatttacatcatacagttagaaatctaagacacagaaaaggcacagaagataaattaaaattaaaaagagacacacataatgattgtcagcataagatgtaggcttagtaatttactatacacataacatcatgtgttatacacttgcatcatgcacctgctctaagcacttctccatggccaggtctcaaattaaaatctttcatggtatcattaacatgaagtaactggggtcctcctgtgccagcagctccatgaccatgatgaccatgaccacgttctttggttcttataattggtggtggcattcttatgtcaccctcaaattcaatgtccccttcatgaccatgaccatgaccatgttcttgttgggttcttataatcggtggtggcattcctttgtcaccaaattcaatgtccccttcatgatgatgatgatctcttggatgcaaa

SEQ ID NO: 36584 - DNA, 1481 bp, Glycine max
  Clone ID: PAT_MRT3847_133037C.1
aagaaagggaaagcaagtaaacattcccccgatactaatgcataattatcccaaaatcaaattataaataactccattacctctcactccttaaattctcaacgccgctcccacttctctccctctctattgcagcatggtgtcttcctcccaacacattctggtcaccggtggtgccggtttcattggcacccacaccgtcgttcagcttctcaaagctggcttcagcgtttcaataatcgacaatttcgataactccgtcatggaagcagtggaccgcgtccgccaagtggttggccctctgctttctcagaacctccaattcacccagggcgatctccggaatagggatgacttggagaaactcttctccaaaacaacatttgatgccgtgatccactttgctggcttgaaagcggttgctgaaagcgttgcgaagccccgtcgctattttgattttaatttggttggcaccatcaacctctacgaatttatggcaaagtataattgcaaaaagatggttttctcatcatctgcaaccgtttatggccaacctgaaaagataccgtgtgaggaggatttcaagttacaagctatgaatccctatggacggaccaagcttttcctggaagaaattgcccgagatattcagaaagctgaaccagaatggaagatcatattactgagatacttcaatccagttggggctcatgaaagtggcaaactcggtgaagatcccaagggcatcccaaataacctcatgccttacattcagcaagtagctgttggaagattgactgaactcaatgtatacggtcatgattatccaacgagggatggctctgcgatccgggactatatccatgtgatggacttggcagatggccatattgctgccctgcgaaagctcttcacaacggagaacataggttgtactgcttacaacctgggaactggtcgtggaacatctgtgcttgaaatggttgcagcatttgaaaaggcttctggcaagaaaattccagtaaaattatgtccaagaagaccgggagatgcgactgaggtttatgcatctacagagagagctgagaaagaacttggttggaaggcaaactatggtgtggaggagatgtgcagggaccaatggaattgggcaaagaacaatccctggggttacgcggggaagccttgaattagcttgagaaatatactgctcatctacgaatgcttttcacataaataggcatctcttatatagaatactttcatgttggatgatttgtttaggcagttcgttgtataatcttgacaataaaaatttggcagcatttcaagaagttaaagctatgtatttaaacaatatctttaaattagactggccattgatttgatattgagaaaagtttatccagtcggccatcatttttaaaactaagttaaggttcaaattgaatcttaaatgttaataaatatggaaattggct

SEQ ID NO: 36585 - DNA, 622 bp, Glycine max
  Clone ID: PAT_MRT3847_133038C.1
ctcgagccgcggctcgagggaagacttattatcccatgcaggcttggttctcattgcattctttgtcacctgctgaactagtccctgccctggttgacaattcctacttccactttgtccttgcctcagacaatgtgctggctgcatctgtggttgcaacatcgcttgttcgcagcagtttgcgacctcagagggttgttctgcacataattacagatagaaagacatactatcccatgcaggcttggttctccttgcaccctttgtcacctgccataattgaggtcaaggcattgcaccactttgattggtttacaaagggaaaagtgcctgtgctggaagcaatggaaaaggatcaaaatgttcgatcacagtttagagggggatcatcagctattgtagcaaatactactgagaagccaaaagtaattgctgcaaagctgcaagcacttagtcctaagtataactcagtaatgaatcacattcggatacatcttccagagttgttctcaagtcttaacaagggggtcttccttgatgaagaccatgggggaccaacctaacctttaacttttgtgggacattgacttgaatggaaaagtcaatggagcagtaaaaacat

SEQ ID NO: 36586 - DNA, 214 bp, Glycine max
  Clone ID: PAT_MRT3847_133039C.1
ggatatattgctctacatctagatctagttccatcgagtacactacaaaggcaaacgatgtagctttcatcgacagtgactccagaaggtcatctacttattaaactttgcctgagtgagccttatgcgtaatttctgcacgatccagcctcaaaacggacaacgaccttgactgcagcggttgctaggatacaaatgatgacatggagcacat

SEQ ID NO: 36587 - DNA, 316 bp, Glycine max
  Clone ID: PAT_MRT3847_13303C.1
ctctatgctcgtatgtttcgtccttcgagagagcgctctgagacggaagcgcgtgtgtgaatggcacagggtcttggctaccaacaccgcctatctccgtggtgtgtgtgttggactagaagcaatggtcaatgattctgcaagactgtattgcgctgacgccgatggaaccggatggcgaatcttgctagatgctgcactcttactggaacctcatatgatacgctggagttcttgcacgctaggaaccgcggctacctgaattggtgaaaggggagagagatttgcatgcactgagggtagcaatgagtatgct

SEQ ID NO: 36588 - DNA, 2429 bp, Glycine max
  Clone ID: PAT_MRT3847_133040C.1
cggaattcccggcctcgatctcctcgtcctccactggagagagagacatcccctccgacattttctctattcttcaagcaaactcttcgtctcagatctctctttctctctctctagggtttccgtttctctctctgctatttatgatcactctctgacgcgcttctgtcaccaaatcaagtgcttccgtctcttccccttcttctctgattggaaggattcgtgtggtcggagatggtggtttcggggccaatcacgccggggcaggtgtctttcttgctgggggttattccagtttttgtttcatggatatattcagagtacttagagtacaagaaactctcatctcctcccaaagttcattcagatgctagtcttgaagagttggggaaggatgcaattaaggaagatgatcgggccattttgctggaatcagggcttacaagatcagcatcagcaaaattccatccaccatctgtcaaattgaatttgattcggtttttgaccatggatgattctttcttgttagaaaatcgagcaactttgagagcaatggccgaatttggcctgattctgttttatttctacatatgtgatcgaaccaacatacttggagattccaccaagggttataggcgggatcttttcatcttttgcaacgttcttctgattatagtttcagctttgtcatctttgaagaaacataatgactaaacagaattttctgttaaaatcaaacttgacctttctgagcgggaagcagactagtagaattggtgtaaacttttcctttttttaattttggattccacttatgaaacgtgtatatacaatggtagacgtttgtatcctgcgtcatggcttcgaataaatggatttggaaacttctcctattattatgttagaaaagattttagccttccacgttttgctcagatgatgtggcggcttaatttttttgtggccttctgttgtattgtgcttaacaatgactatatgctctactatatatgcccaatgcacacgcttttcactttgatggtgtatggagcattgggtatatataacaagtataatgaaattccctctgtaatggctgcaaagattttggcatgctttcttgtggtgatcttggtttgggaaatccctggattctttgacatattttggagcccatttgctttatttttgggttatactgatcctgcaaagcctgatctccctcgaatgcatgagtggcatttcagatctgggcttgatcgctacatctggataattggaatgatttatgcctattttcatccaaatgttgagaaatggatggaaaaattggaagagagtgataccaagaggagagttaccatcaaaactggcatcgtttctgttgcattatttgttgggtacttgtggtatgaatacatatacaagctggacaaggtctcatacaacaagctccacccctacacctcttggattccaattactgtatacatttgcttgagaaatttcagtcagcggcttcggaatttctctttaaccctctttgcgtggcttggcaagattactttggagacatacatttcccagtttcatatttggttaaggtctaacatgccaaacggacagcccaagtggcttctttctcttatcccggagtatcctatgctcaacttcatgctaacaactgctatatacgtctttgtatctcatcgactttttgaattaacaaatacacttaagacagtgttcatacctacaaaagacaatcggaggctgctgcataattttattactggtgttaccctttgcatttctctgtattgcattgcacttattctgcttctgattcctcattcaacggtttgaaattcaagataccaaagagagattacagagacagtaccctttgaatttgctgtgctgaaaggagactaggagatttggattaaaataagggtacatggaaatgtgggatctcttttggagcagtgtttctatagttgtgggaaatagtatcctcgatggcggcatcaaatataaacgttgagtgttggtttgcatcggaggttggcagatgaaaagggggattaaccccgaaggaatttgaaccaattttctataaattcattttgctcacacttaaaaggaggaaaaggtaggatcgtcatacaaatccgtcgtcttggcttcgaagaaattcaagattcatttcattacctctgttcttgttcaattttcgttgtattttttgactttttcttctgtgaaggataaggaaatatatgtatattcatttttacaatcttaccagaaacgccttgtcatacccttgtaacactagttttgtttaatggctataagtgcaagtagtgttactttttcctttgtttttttgggaggggttgaataaatccccaatttagtcctct

SEQ ID NO: 36589 - DNA, 1495 bp, Glycine max
  Clone ID: PAT_MRT3847_133041C.1
aaaaattggaagagagtgataccaagaggagagttaccatcaaaactggcatcgtttctgttgcattatttgttgggtacttgtggtatgaatacatatacaagctggacaaggtctcatacaacaagctccacccctacacctcttggattccaattacgtgagtgttatccatttattttattccttttgctgttctttatgttttctttgtttccttcctttaagcttgaaagatagcaatcctagactaatatatggaatgcatttatatttttcttttcagctccttctattgattcttttgcctattatttttcagtgtatacatttgcttgagaaatttcagtcagcggcttcggaatttctctttaaccctctttgcgtggcttggcaagattactttggagacatacatttcccagtttcatatttggttaaggtctaacatgccaaacggacagcccaagtggcttctttctcttatcccggagtatcctatgctcaacttcatgctaacaactgctatatacgtctttgtatctcatcgactttttgaattaacaaatacacttaagacagtgttcatacctacaaaagacaatcggaggctgctgcataattttattactggtgttaccctttgcatttctctgtattgcattgcacttattctgcttctgattcctcattcaacggtttgaaattcaagataccaaagagagattacagagacagtaccctttgaatttgctgtgctgaaaggagactaggagatttggattaaaataagggtacatggaaatgtgggatctcttttggagcagtgtttctatagttgtgggaaatagtatcctcgatggcggcatcaaatataaacgttgagtgttggtttgcatcggaggttggcagatgaaaagggggattaaccccgaaggaatttgaaccaattttctataaattcattttgctcacacttaaaaggaggaaaaggtaggatcgtcatacaaatccgtcgtcttggcttcgaagaaattcaagattcatttcattacctctgttcttgttcaattttcgttgtattttttgactttttcttctgtgaaggataaggaaatatatgtatattcatttttacaatcttaaaaaaaaaaaaaaaaaaaaaaaaaaaaaaaaaaaaaaaaaaaaaaaaaaaaaaaaaaaaaaaaaaaaaaaaaaaaaaaaaaaaaaaaaaaaaaaaaaaaaaaaaaaaaaaaaaaaaaaaaaaaaaaaaaaaaaaaaaaaaaaaaaaaaaaaaaaaaaaaaaaaaaaaaaaaaggggggccccttttaaaagaccaaaattttaagcccgggggagggaaagttaattttttttttttggggccccaaaaaaaaattccggggcccggttttaaaaacgcggggaggggaaaaacccgggggtaccccaaaataatgccggggaaaacaacccccttttcccccggggggg

SEQ ID NO: 36590 - DNA, 312 bp, Glycine max
  unsure (1)..(312): unsure at all n locations
  Clone ID: PAT_MRT3847_133043C.1
gatataacatggttgaatcnagtacacaactcacagcaaaaaggtttataagctgtaaaggtacatgtaaccataaacctttttgctgtgagntgtgtacttgatataacatggttgaatctcggcaatcaatgaaaaaacccattaaaaatgtgtggaaattgaaaaaacccgttaaatgatctgtgggaggaatatagcggcatgatccattgcactatttgctggttgaatttggtattgctgagaagctcttccaagacaattgtatgtcgtcgttatttatttgttatgacaatcactggtacatat

SEQ ID NO: 36591 - DNA, 625 bp, Glycine max
  Clone ID: PAT_MRT3847_133044C.1
ttgtgtggaagtgattcggttggtgatactgagatatcttgcattgctgcaaagtgtgtggctttgaagaaactgtgtattaagagttgtcctgtttcggatcaagggatggaggcattggcaaatgggtgtccgaatttggtgaaagttaaggttaagaagtgtaagggggttacccctgagggtggtgattggttgaggaggactagagggtcagttgctgttaatttagatactggtgaggcagagcttcaggaagcgagtgctagtgatggaggggcacaggacaatgttgtagagtttcctcagatgcctgcccaaatcgtggccgcagcagcatttgcatcaagcagcaccactcggtctagttcgttcaagttgagattagggcttttgtctgggaggagtttagtggctagcacttttaagagatggtcaggtggtagcactagtgcacgccatggttagggatagcagggccaaagcaaacctgagtctttggccatttttcattgttttgggttgttgtatcatttgatttttatatttcttgtacttaaatttgaaatttatgccgtgtgatttttattgcctttggaaaaaaaacttcacggttgcaagtgac

SEQ ID NO: 36592 - DNA, 1253 bp, Glycine max
  Clone ID: PAT_MRT3847_133045C.1
gatgacatgggattgattgagattgccagagggtgttcgagactggttaggtttgagcttcagggttgcaggcttgtgacggagcgtggactgaggaccatggcttgtttgctcgccaggactctgattgatgtcaaggtttcttgctgcgtcaaccttgacaccgcagcgactctccgagccttggagccaattagggagcggattgagcggctccatgtggattgtgtgtggaatgggttgaaggagagtgatggcctgggacatgggtttcttaattttgatttgaatggtttggatgaaccgggtgatggtggtgaattgatggattactttgggggtggagaatgtgagaacgcaaccaaaaggaagaggcagagatgtgagtatgaaatgggggttcatgattcctttttgcaaagcaatggcaatggtttctgtggcaagagctgggacaagctgcagtatctttctctttggataaaagtcggtgatctgttgactccattgccagtggcagggttggaggattgtcccgtcttggaagagattcgaataaaggttgaaggagatagcagggggcagccaaaacccgcagagagcgaatttggtctgagcattctggcttgttatcctcagctattgaagatgcagctggattgtggtgatactaaaggttatgctctcacggcgccatcggggcaaatggatttgagcctgtgggagaggtttcttctgaatggcattggcagtttgagtctcggtgagcttcattactggccaccacaggatgaggatgtgaaccagaggagtgtgtcacttccagctgctggcttgctacaagaatgttacactttgaggaagctcttcattcacgggacagctcacgaacatttcatgaatttttttctcaagataccaaacctaagggatgtacagctgagggaggattattatccagctcctgaaaatgacatgagtacagagatgagggtaggttcgtgcagccgctttgaagatgcactgaataggcgtcgaatctgtgattgacttgtaatgttatagaccctgacaatggaaattgctttgatgtagaaaaagtttacgttttggagtttctgccgattattaacatcttgcttgtcttttagtttatttatttctgtttcctttccctctttttacactgtaaccacgagactcgtgtccaatgttttagtcaagaaataaataattctatacagatttagaaa

SEQ ID NO: 36593 - DNA, 722 bp, Glycine max
  unsure (1)..(722): unsure at all n locations
  Clone ID: PAT_MRT3847_133046C.1
cccccaaattgccgtcaagaaattggaaaattggcggaatcaagattttttgccaatggtaaagaatttgatagtggtgtttcccccaacctaaatgtagctgctgaggctaccaatttagctttgcccaggaggatccaaataacaacccagttatacccagctcctccagacagggtgaatgatgttttttgggaacagtttttttccgaaaggccaggctgttttgacaatgaaaaggcaatgtccaacttccgagcaaacccgcatgatgaacaagacgaagggcggtcagctcatggaatctctagaaacattaagaacatggatccactccccctttgagttgggcatgctgtcttagagaacagttaaactatttttatatgaatttttcatgactaatatacaatatgatctgaaacttcccagttgacagttggcaccaaattgtgtcgcaagggcctgaaactattctggcttactacctaatttatcttgggaaaaatccgaaatccttaccagctttgggggactgatggatacaatgttaattaactggttgacagtgttgtaaatattcaagttctgtttggctttcaaacgtattactataaacttaaaaagtcttgattatggagtttttcttaaaaaaaaaaaaaaaagaacgaaagggcgntagtgagctagtcgagctggcaattaatccggaattgcggacg

SEQ ID NO: 36594 - DNA, 219 bp, Glycine max
  Clone ID: PAT_MRT3847_133047C.1
aaattttgtgagggtcattatgaagaaaagggacaaacttaagtgtcaaggtggaatcaacccatactccattgaatggaccggtttggcccattaatttctgagttaaggccatggttttctggggtgcgaatattcctagtttgatgggttgattacccaaccaggttttaaccaaattggcgaaattattaaccagctttgggggggggataaaaa

SEQ ID NO: 36595 - DNA, 270 bp, Glycine max
  Clone ID: PAT_MRT3847_133048C.1
tttttgtaaaaaaactcgcaagtgctttaagcaagagggcagaattggccttaaaacatcgaatatactaacggaactcccggccctaaaatactatgacaaaagccggcacttcattagtttcgcataacaattacaaaattctctgtttatgggccaacagatattagcagacatcttggaagcacacaacctaaagtcacctactggtgttccaacaagttttcttagacaaagctaataaaatgtttttcttgaagacatgtacaa

SEQ ID NO: 36596 - DNA, 397 bp, Glycine max
  Clone ID: PAT_MRT3847_133049C.1
gtgccagttgaaggaaggtgatgttgtggccaagatgccaaaggaagcttgcctcaccacaaagaccagtggggcacgtaagatcattgaagaggctggtttggatggtcatttggggcttgcatttgctatcatgtatgagagaagcttggatggggactctccttttgctggctaccttcaactcttgcctcaccaagagtgtgtgccaattgtttggaccctcgatgaagtaaacgagcttttgtgtggtactgagcttcatcagacagtgcaagaagacaaggctctgatttatgatgactggaaagagaatattctacccctattggatttagcacctttaaaactaaattcaaagttctttggcgtaaaacaatactttgcagcaaaaagt

SEQ ID NO: 36597 - DNA, 478 bp, Glycine max
  Clone ID: PAT_MRT3847_13304C.1
ggataatacaagtattgcggattaccgtgcctggagactatagcttatcgggagtgcagcttctatccggttggacaaagatcgaatctcggtgggaagaaagcacatctcgctggcgctgaagacattgtgcgatgtcaagattggtagctttgctgtgttctcggtcatagaggacctctgcgatgaaagcctttacttgcctgctctataagggatcaggagcatttttccctggctcgtgaggattattaaagaacttcaggaggacatattttcttgattgatcctcccgcgacaattaactaagagataatatggtggtttagggtcgaacaatctggaagacagacgatcgctggtgtttacccttgatgcttccaaatggccacagaatggccattgataaggaaacttgattccggagacatggtcctgcagaatcaggcttcaataccgataatgattggggggaaaa

SEQ ID NO: 36598 - DNA, 360 bp, Glycine max
  unsure (1)..(360): unsure at all n locations
  Clone ID: PAT_MRT3847_133050C.1
tgcatcgagcattggtgaattgtgagaaggagagaatgtccattccaacattttactgtccttcaccagatgcattgataaaacccgcacccaaacccggagacaatgaacatcctgcgcagtacacaaacttcacatacagagaatactatgacaagttctggaacagagggctttcaaaagaaacctgcgtcgacatgttcaaggctcaagactaaatttgctcaaccatattgctgacaaaaatgcgcacacactagttgaagaacttagtttatctcattntgaataaaacaccaatgagctttaattttaatttaggtgatcaggtctttagagtttttgaaatttttatgtaga

SEQ ID NO: 36599 - DNA, 1639 bp, Glycine max
  Clone ID: PAT_MRT3847_133051C.1
tttacgcgtgggcggacgcgtgggcggacgcgtgggcttcaaccccaaatccaagtctttcatgagtgactcagtgggaagagccagtgcagaaacaacttcagagttctactttgccataatctcaaatgctgcaactgtcacaagccatgctgcttctaagttaatgggaaccacagataccacattagaaacttggtcaaatttcattaccttaagcccttataggccctttggcacttactatttctgcactggaaatggaaagtcagggaagaaaattgtgataacaaactcaaatgcagttctacaggtcctgtttttctctgctcaattaagcactgaagcagaagctgctcaagttccctataggagcttacgagatcatacaatttatggcaccgaactgcaacaaatggggcctcagaatgttgtgcacttggatcaacatcagctccagaatcttcctttgtctgaagatggtgctggtggctcaaatgcaaccattaacacggccttaaatgaccttggcctgattccaagagcaagactgtgcctccgggcagcagcagagtgggaggcaagaagaactgacaacgagaataagatcaaagagaagaaagattttgttgcgaaaaaattggacgttcttcgggaatacagaaaaatgtataaggataaaagggtgggtttttacgatggcttcagggagcataagcaaggtgaggatgacttcaaagcaaacgtgacgaggctagagctggcaggcgtgtgggaacagatgggggaaaaggtaagaagttatgaactcccagatgaatttgaaggcaacaaagattacattgaccttggaactgagcttcggaaacttatggaacctctggatattgccaattattaccgacatgggaggaattatgaggacagttcttcttcctacatggttaagggaagaccaaaacgatatagatatcctcaaagatggttggaacatgctgagagaaagtcacatgaatctctctcagcatcttgcttctgggccgaggtggaagaacttcactacaaaacaagtaggagtagtaacattgtctcattggatcaacaatttaaggaaaggattgagaaattagagattcaaataaaagcatggagtgacagaaaggaactagatgaggatgtcttcttggagggttctaccttggtgaagtggtggaaagcacttcctcaacaacacaagcaacattcatgcattaaaactcttattagagagtgacacgagacaaacatgcattgtaataagtccattcagcgagtgttaattggctgagtgagcttttttttgtttctcttgtttactttgtttcttatgtagtttttcttggttccttctcgtgtgcggtttgtgattctatacgttttcctttaataaatgccacaaccaaggttgcggctatgtacaactagacgatttttttattttttttttcattttcaatacatagttttaccatgaaaaacatatataatactcccttggttccattacaagtgtaggataagagggctagggttcggaaacgaaggtggggtctgttttcgtttcgcgatgagggccaagtggttttataaaaaaaaaaaa

SEQ ID NO: 36600 - DNA, 461 bp, Glycine max
  Clone ID: PAT_MRT3847_133052C.1
gacttatatggagcacggcatttgcacttaatagagataagctgtttggagcatagggtggttactgctgacaagagcaaagagagatgatgcggcactaggcaggcgagcttgtgccctatggggactgctgtccctaacgaactgcagcgaggcactaaattatgatggctggcatagatcccaaactaaaccgcattcctgcgaatattatttatgaacagaggctaattggcctagtaaaattatcgaaactggctcaagttactgggcacataaaatttgatgaaccttaaggctgcttaatcaccatacgaaacattgtacaatttgtgatatcacatacattatctctcaacatatagatgaggctggtgatctttgtatgccaactttatctgatgcatacgctacattcgcatctttttgaggtgcggaatcctctgcatgatctggaattt

SEQ ID NO: 36601 - DNA, 310 bp, Glycine max
  Clone ID: PAT_MRT3847_133053C.1
taggtgacttcatctagggggggttgggggaatatcaagttcgaaatacaaaattcaaatcaaacacaaaacaaagacaaacatgaaataacaaaaaaaattttttaggttcattcggctttcaataattaagtgcatcgatgctttttaattttgatgacctggttgaacatcttagcacttgcaggatgtaatttatcttcaatttcttcaattgaggccctttaagctagggtgtattccgccaaatgtttgatcaaatcaattttgttggcgaggtctgcaaaagcttaatcattactcccacaaa

SEQ ID NO: 36602 - DNA, 334 bp, Glycine max
  Clone ID: PAT_MRT3847_133054C.1
atctagtggaagagagggggaaaggatataatatggagggagttgtatatgttagagagggaacaacccccacaataaactagaatccgtgcgatcaaccaagcatttgccataacgacttagtacagaaacgatggaccaaacttaaagatgaaggtcaggtatgtgggaacaaacgagaatagacaaagagagaagtgagaatggcatcccatattccattacgattttatggctgttgttgttggtataaaaaagaaaagaaaagcggcgcacgggtgattagggaatagaagcataataataaccctgtttgttgcctacgttcccgtta

SEQ ID NO: 36603 - DNA, 175 bp, Glycine max
  Clone ID: PAT_MRT3847_133055C.1
agcaaaccttcccggtgccggcatggttgctctattaattggtcttaagggcttggctggcttctccaccagaaagaccagcaatgacatttcctccgttgctaacaccggtggaagattgcaatgcttgcatgggtggccaccagtttccaggaagaagtgtgatacatatttg

SEQ ID NO: 36604 - DNA, 337 bp, Glycine max
  Clone ID: PAT_MRT3847_133056C.1
cgtgaaccttgtgtgaatcgaatgcttattgatcgagtgctgtgactaaggtactacaacatttactactcatactcataggatctcaacgtatggtgtagcatatgatggagcataatggtcacacatgctgacagttgagtgcaccagctgtggttacaggcatccaattagacaaacctttgtctacaagattctatttgtatcaacaattacatctgcaagaagtgtgttgaacggattaagcttgacatctaacaagctggtgagatccaatttttcaagtcaaatgattcagcttgtgattaacactatcacgtgaatggatctctaactg

SEQ ID NO: 36605 - DNA, 634 bp, Glycine max
  Clone ID: PAT_MRT3847_133057C.1
agcgaccatgtaaaaccaccatggaatttgcaagcatggactgatagcttttgtccaattcctattcttctccgtgaaggaagaattttatctggtcaagactggatcattggatgcacatgatcgggattctccattctgttactcacatgacactcgctaagaggacgcaagcacgacatggggtccagatcagggcctcggaaagagggacagtcatactgattgtgagtaccaaactggggcaattctttttcactatgcgcacgacagaagatctctaacgagacataaagaggccgaaatcattgcctcatgccaggaaaatgacctccccaatccacgtatgttgtcctaataatggtttcaaaatgcgagggtcctcagtggctagatgaacctctatcgcctttgattattcttatacagaaaactttagaggctacaactttggatatagtgtggaggatctctccatggggtgaaattggtgataaacgtctcatgccagcactcgttgttccaccacataaccgcacagcttatgatccggctgcataagctgcataacctggggtgcctatatttttacacctcttacattccttcaattaagtcagactggttggttatg

SEQ ID NO: 36606 - DNA, 146 bp, Glycine max
  Clone ID: PAT_MRT3847_133058C.1
ctcgagccgaatcggctcgaggggctgcgtcatgcagtttgatacttattcattgaaacaccgacgttttgcattgggcacaaaccggaaaaatacagcaggggtcaagaaaatcctaatcctcttgggctctttgtgtctaaagc

SEQ ID NO: 36607 - DNA, 396 bp, Glycine max
  Clone ID: PAT_MRT3847_133059C.1
ctcactagccggccgtcgtcctttcactattcccctttttatttttttttttttttttttttttatactaaggtaatggggttattttttttttttttttcttccttttttttttttaaaaagaaagggccccaactaaatataaggggacccctgaaacaaaaaatttctcgggtcaaactcccttaataaaaaaatttaagagaaactcctaaatttcaggttttctttttgcccctaaaaattggacaattctaataatgtcccccccaatgaccatacaaatttctaaccatgggattacgcccaaaccttttaaaaaccaaaattttcaccggccaaaggtgtttcccccccaaattaaagatggaaaaaatgtccccctaaaagacctct

SEQ ID NO: 36608 - DNA, 271 bp, Glycine max
  Clone ID: PAT_MRT3847_13305C.1
agcagagctcgattgcatggattgaggcatgaatggcagtgatgcattacgtgattgagaggtatgaggactcaaggaactggtctgacagtgctgtgggagactatgactagtgtagagaggaagagagccttctttggagttgttttgaaccacataggattggcgagtgctcaaatgtgcaagatcgacgaggctgctgagttgctggaagaagctaggtgaattcttgagcacgagtgtgtgccttgtaatcagaatactcttgggg

SEQ ID NO: 36609 - DNA, 197 bp, Glycine max
  unsure (1)..(197): unsure at all n locations
  Clone ID: PAT_MRT3847_133060C.1
acggggtgatgaatcttaaaagtagataaactcatgtgctaatttctggagttatgggtgagaattacanaaaataaatgtaaaggacttactctaggagacaggccaaattttaaaagaaaggaagaaggatgacacattagcttttggccggggggggggcaagcctggtgagaactgcacacaacaattatggg

SEQ ID NO: 36610 - DNA, 1213 bp, Glycine max
  Clone ID: PAT_MRT3847_133061C.1
ccacgcgtccggaggttgtctacagcaatcctgcatcattgggtagaaacttttggaagcatttgtcagtcactttctcttctcgaaccagtaaagaaattgtcagctactattttaatgtttttattctgcggaggagggctgctcagaacagatccagatttttggatattgatagtgatgatgatgaatgtcaaacaagaaactctaggatttttggttttgaaaattctgatgattctgccattgagtctcttggtgatgaagatgtccgtgtggaaaaccatgataattattctgatgaagatgatgatgacggtaacactgatgatggaactgaagataatgttcatggagtaactggatgtgatattggaaacaccactgagatagagggtgagattgatcaaaacccatcaaattcgaaggtgaactcacagattgagccttggagtaatcctgatgagcatgtcaatgggactcctggaatcctgaactacaatatttctgtcggggatgactcctgtatgtccttcgaatgtgatgccaatatgcatgtgtcttgccattctcatggtttacgaggtgctagttccgctttgcaagctaggggatataattgtaatcagagtccacatacgcaaggaaaacttgatttgtccagcaatgagatggatcatgtttatttgatggagccctgtgtttctaaagattggtatcctgggtactcaacatgtccaacgccaagtacagatttagacttcttacctacctccaatttgattgaagagttttttggctatggtactctggataaaaaagacctgaagtgactgaggtattaactcagtttttttggcatcagcttgacagatttaagctacttgagggtgccaatccaggtcttagaaagttccagtcatggacgtgttatttgagtaccaggaagggagcgacttaatagtggtggaaagccttctattctttatttctttctttttttttcttttttgccagaaaggagagggtgagggtagaggtacatttgatgttaatttgtatatacttcgtgttgacctcaccgtttccaaaataaaaataaaaatgggttctccccgttactgttgttcattttactacctcacaatttgtatgatataattgtaaaaagccagtttgaatttgaataaaaaaaaaaaaaaaaaaactcgac

SEQ ID NO: 36611 - DNA, 324 bp, Glycine max
  Clone ID: PAT_MRT3847_133062C.1
cactgagcatgcgtctagctatctcgatcgaactgtccaaggtcctgtcactgtaatggtgtgaataagcctggtaggggtgtgtggtggtggtggttgtggtattataggctgatgagtgggggtggtgctgaatctctcatgtattggccagggtgataagcgatatcgcggttatacgggtagcttacagtaggagccatatacgaattactactacagtcttacttttataatcgtcgttcctatttggccattggggctgatataatctttgttgttcaatgagctcatcttgatagttgttgtgttgctatcgttggt

SEQ ID NO: 36612 - DNA, 1483 bp, Glycine max
  unsure (1)..(1483): unsure at all n locations
  Clone ID: PAT_MRT3847_133063C.1
ctccagccgcttctcaccctatcttaaaatcttctgtgcaattcccaaaaaacggaccttgccctcagtctcttttttccatcatcacttcattaaacattattcactctctttctctgtctctagtttttacaacatggctactgcggtaactgctgcagtgtcctttccagccaccaagtccacttctctttcaagcagaacctctatcactgccccagatagaattgtcttcaagaaggtttcgttgcaatacagagatgtttcaaccagtggaagggtagtttcaatcagagcacaagtgaccacagaggcacctgctaaggttgaaaaggaatcaaagaaacaggaggaaggtgtgatcgtgaacaagttcaaacccaagaacccatatattggtaggtgtcttctcaacacaaagatcactggggatgatgcacctggagaaacttggcacatggtcttcagcactgagggagaagttccttacagagaaggacaatcaatcggggtaattcctgatggggttgacaagaatggcaagcctcacaagctgagattgtattcaattgctagcagtgcccttggtgattntggagattccaaaactgtttctttatgcgtgaaacgtcttgtgtacacaaatgaaaacggagaacttgtcaaaggagtttgctcanatttcttgtgcgacttgaaagccagagccgaagtaaagattactggacctgttggtaaagaaatgcttatgccaaaagatcctaaatgcaccatcatcatgtttggcaactgggacaggaaatgccccatttcgctcatttttatggaaaatgtctttgagaagcacgaagatnacaagttcaatggtttggcatggctcttcttgggtgtccctacaagcagctcattgctttacaaggaggagtttgagaagatgcaagagaaaagtcctgaaaacttcaggcttgacttcgctgtgagtcgagagcaaacaaacgagaaaggggagaagatgtacatccaaacccgaatggctcaatacgcagaagagctttgggaattactgaagaaggataacacttttgtgtacatgtgtggactaaaaggaatggaaaagggaattgatgacattatggtgtcattggctgccaaagatggcattgattggactgagtacaagaggcaattgaagaaagcagagcaatggaatgtcgaagtctattaatttctgttcacttgcacaaatatcatctcctactttatgctgcagcaagtctatcaaccctcctgcgttgtgtagatatatgacgaccctgtaatttttctttgacgatttttatactgttcatgaacaacttcattgccagttttactagtactatttttgagggatgatgcaatatagatgaatccaacttcactgtgtcaattgtcatttctaaataaaaaaaaaaaaaaaaaagtacttaggtattgttggtac

SEQ ID NO: 36613 - DNA, 434 bp, Glycine max
  Clone ID: PAT_MRT3847_133064C.1
tcctctagagcggccgcttttttttttttttttttttttttttttttgcaccaaatgggtttctaaatattaaaacaaaactgaaatttaatttttgcaagagaagctggaattctaaaagaacaaaaacgccttctggagcctgatcaagccccaactacttcggggggttactcatccactgtttaatgggccggactgaccaccttggcaccaacatttttagagtaatccccttgaacctccatcagttttccaagatcaaactttggagctttaaggatcttaactttaccaatgaacacattctgtccaggatatacgctacatgttgacttctcaatctcctttccaatcatttcggggatgaacttgctcaccaattctttcaaaaacatgctggtggttggtggaccattatctatatgatcttc

SEQ ID NO: 36614 - DNA, 625 bp, Glycine max
  Clone ID: PAT_MRT3847_133065C.1
ggctcgagggaatttgagaagttgcctgagaaatatcctgacaacttcaggcttgacttcgctgtgagccgagagcaaacaaacgagaacggagagaagatgtacatccaaacccgaatggctcaatatgcagaagagctgtgggaattactgaagaaggataacacttttgtgtacatgtgtggactaaaaggaatggaaaagggtattgatgacattatggtgtcattggctgccaaagatggtaagacattttccttttttcttcacacttgaggggaaacctttttgtcttggtacatcatttggagagtaacttcactaactatatcttgtgtttcattgtgtactataggcattgattggactgagtacaagaggcaattgaagaaatcagagcaatggaatgtcgaagtctattaatttctgttcacttgcacaaatatcatctcctactttgtgctgcaacaagtctatcaaccctcctgcgttgtgtagatatatgacgtccctgtaatttttctttgacgatttttatactgttcatgaacaacttcaatgtcagttttacaagtactatttttgagggatgatgcaatatagatgaatccaagttcactatgtc

SEQ ID NO: 36615 - DNA, 2956 bp, Glycine max
  Clone ID: PAT_MRT3847_133066C.1
gaatgctcccgggatcttatactcctctcttgtctgtgcaatcaaaacaacaacattcattcatactgatcacttccttgcctattgcacattcttcatcacttcattcaacatttctctctcccttagctagtttttaccaatggcctgctgggttgtgctgcgtctctttcattacttcattcaacatttctccccttagcttgtttcaccaatggctgctgcggttagtgctgcagtctcttttccatccaccaagtctacctctcttccaagcaggacctccctcattgccccagagagagttgtgttcaagaaggcttcattgcaaaacagagatgtttctagcagtggacgggtagtttccatcagagctcaagtcaccactgaggcaccagccaaggttgaaaaagagtccaagaaacaggatgaaggtgtggttgtgaacaagtttaaacccaagaccccttacattggtagatgcctgctcaacacaaagatcactggggatgatgctccaggagaaacttggcacatggtcttcagcaccgagggagagattccttacagagaaggacaatcaattggggtaattccagatggtattgacaagaatggcaaacctcataaactgagattgtattctattgctagcagtgccattggtgattttggagattccaaaactgtttctctatgcgtgaaacggctggtgtacacaaatgaaaatggagaaattgtcaagggagtctgctcaaatttcttgtgtgacctgaagccaggagctgaagtaacaataactggacctgttgggaaagaaatgcttatgccaaaagatccaaatgccaccatcatcatgttgggaactggaaccgggattgccccatttcgctcatttttatggaaaatgttctttgagaagcacgaagattacaagttcaatggtttggcatggctcttcttgggtgtccctacaagcagctcattgctttacaaggaggaatttgagaagatgcaagagaaaagtcctgacaacttcaggcttgacttcgctgtgagtcgagagcaaacaaacgagaaaggggagaagatgtacatccaaacccgaatggctcaatacgcagaagagctttgggaattactgaagaaggataacacttttgtgtacatgtgtggactaaaaggaatggaaaagggaattgatgacattatggtgtcattggctgccaaagatggcattgattggactgagtacaagaggcaattgaagaaagcagagcaatggaatgtcgaagtctattaatttctgttcacttgcacaaatatcatctcctactttatgctgcagcaagtctatcaaccctcctgcgttgtgtagatatatgacgaccctgtaatttttctttgacgatttttatactgttcatgaacaacttcattgccagttttactagtactatttttgagggatgatgcaatatagatgaatccaacttcactgtgtcatttccaaaaaaaaaaaaaaatttctgtagttcactgcttgaaaaattgatgagacacaagcatggttgggtgtttaattctcctgttgatgttgagactcttggtttgcatgattattttactatcatcactcatccaatggacttgggaactgtgaagacaaggctgaacaagaattggtacaaatcaccaaaggagtttgcggaggatgtgagactcacttttcgtaatgccatgacatataatccacagggacaagatgttcatattatggcagagcttttatcaaagatattcgaggacagatgggctataatcgagtcagattacaatcgggagatgagatatggctttgattatagggcagctccccctgcaccctcaccttgtctagaagtctgcatttatgatatgaaattttggatagatcattctgaacagactccaagactcatgagcatcactccatccagtagaactccagctccaaaaaagccaaaggcaaaagatcctcataaaagagacatgacatttgaggaaaaacaaaaactaagcactaaccttcaaagtttgccttcagagaagcttgatgctattgtacaaatcattaagaagagaaattcagcacttaatcaacatgacgatgaaattgaagtggacattgatagtgtggatgctgagactctctgggagcttgatagatttgttaccaactataagaaaagtttgagcaaaaacaaaaggaaggctgaacttgctcgagctagagcagaagctttgcagcagaatgccatccagaagagtcaggcaccagctatggcagagattccaaaagaaacacaaacagatgaaaggagtcttccccaacccttgcctgtgcaagggagaaatcaagcggataatgggagtaggtcaagcagttccagtagctccagcagtgattctggttcttcttcaagtgattctgatagtgacagttcctcagcatctggatctgatgcagggtcgcaagggacctgactatgctctgtcagatctcagatttttagagtagatagtgtcttgatgccagcctattttggttttttgaagcttccagattatggattttagtgtaacagtcgggttataaaggaagcgttctgaaggccgtgggtgatcctcctgatgcagcctgggattttttcttcccatttgtttgaactgctactccaatgctaatcgtggccttgttggaattcttgacacaaattcttgtataatatttggtaggatgtgatgatagttaggtagctagatttccgtagcatatgtacattgctaactactgctgcgcattgagttccatttataacttattttttacttttgtgctagcagattcaagatcttggtatcatacgaagataatatgtaattcattcgtgaaatctcattccgtgtagtttac

SEQ ID NO: 36616 - DNA, 604 bp, Glycine max
  Clone ID: PAT_MRT3847_133067C.1
gttgcttctttccgctgtaaagcaaacactccccatatttctgcgtgccaatttttttggaataggtaccaataccataccctcctaattttattttatttttgtatagaaaaaaatttaaaaagttgagtagcacttgttttagttccttagcgcagattggagtattcaactatttctccaagctaactgtgaatcctgttctcacattaatacaccaagaacccataaagtttgtgaagcaaggtagatattttgacttgggtggaactctagctagattctgtttcttttgttcactcaattcaaaaattgaagagaaaagagacagagttgtatacgcggcgagagggagttggttttgattgcttcctagaaaatgattgtacaagataaggaaaaattgttatggaagatttataaggtatccacaattgatggatcagataagttgccaattcaaaaggaacaaaatggtgaaccagatgcacttacctttctatttcgacccattttgaaaggttctccgcttactaagaaaaaaaaaaggtttgattggaatacatagcttgcaatcaatgacagctgaacttatagatagcta

SEQ ID NO: 36617 - DNA, 529 bp, Glycine max
  Clone ID: PAT_MRT3847_133068C.1
agaacactaccgatatcttctgtgttcatctatcataaagagaacttcaatgtaactacatagtgtcacatgccacagctgaattgtttataaatcataaccctacctaccatccagttactgagctgaatgctcacttattccacttatacatccaattgcttggtattagcagagcatttcatcccgctgaaccttgttctgaccttcattgtgagtcctaatcgctctggctgtttgcaggggcttggacctttcccattatgatcgtcttacagtgacaaggttagcatggtatctatgattggaccggattgctgccatgtaatctccaaagcaccttacatcgatcaggacccctatcgatgagtgcaccccctaatgcctaatggatttcatgttgtccaaatggaattgcgctctccgaccaggactctctatgtgatcagcacctgaaacaaactatgcaatcagtcctgctatgagggaaggctcatgaactgtgccttaactacctgcatgctcagag

SEQ ID NO: 36618 - DNA, 202 bp, Glycine max
  Clone ID: PAT_MRT3847_133069C.1
gccggctggtcatggattgagatcccgcaccagagattccttctctcgtactttcaggaagaagggtaccatctccctcgccacatacctgaaaacctactacgtcggcgactatgttgacgtgaaggttagcggtgccgttcacaatggaatgccgggcaaattctaccatggccgtaccggacgcttttggtatgtcacc

SEQ ID NO: 36619 - DNA, 681 bp, Glycine max
  Clone ID: PAT_MRT3847_13306C.1
ggatcgatgtgttgtgcatctttcacgtatataaatttttttgtacaaattatgctaacaattcctgacatttaatacaattatacacaataattcacctttttttctgatataaaattatcctctcacttcatggaataactagcatgagaaattacttcacatttgtggaggtgaaggtaatgctccatcacaactcacaaggtgttattgatcagaataacgaagcgcataaacaatattgactatctgaaactacaaggctagtcaacacaaaggtacactgacgatcagctatgacaagttccttggtaaacaattccaccatggcatcactgaccttgacgtgttgtagcagacagtggttgaacagctgccagaggatttacttggtaggaaaacgcaagctgccacaaatctaccaaagccctctttacggccattgcctgtcttctgacaatcctttctaaagtagcttgcttctttctgaaaacataatagatgaacaatattaaacaaccaagcatgatcttcccactagttatgacaaacttacaagtgccaatcttcaaattgataccacggaagcaccagaaacatgcttctattcgttcagacaattttgtaacagcttctttggacctatacttttcattacttttcaggctttttggtaatcct

SEQ ID NO: 36620 - DNA, 419 bp, Glycine max
  Clone ID: PAT_MRT3847_133070C.1
tgcaactgctgtcacactttgtttagtccttcctgagaggggaagcattgacgcattggatggtggcatgatagaaatggttttggatcctgatttgaacaaaactggggacatttggcacatatgtattgaggatcttccacgaagcaatgttctgtatggatatcgcatagatggacctcgagactggggtaaggggcatcgatttgatagcagcattgtgcttgtcgatccttatgcgaaactagttgaaggtcgaagatatttcggggatattagcatgaagttgtctaagtttcttggcacatatgattttgacagcttgccttttgactggggagaaaattacaagcttccaaatatttctgagaaagatcttgttatatatgagatgaatgtccgtgcatttacaagtgatg

SEQ ID NO: 36621 - DNA, 215 bp, Glycine max
  Clone ID: PAT_MRT3847_133071C.1
gacgaccgtaaccagacgcctacgcaaaaacagactgcattcagtggacagaattcagagtatggagctgcaagccaaggagcagaaattgactagtatatatgagtgcttctatgttagaactgacgcgacaactcattaaagcagctacccatacaggcatattgatactgtgcctgtccctgttattcgcccagactgcaatgcagatgatt

SEQ ID NO: 36622 - DNA, 496 bp, Glycine max
  Clone ID: PAT_MRT3847_133072C.1
tccaagtgaaggtttcccgatgcatcagctgctatggacgatccgtcctgtgcttatggcggggtgcgggtggtggtggagtgggtgtggtggtggtggtgtgtggtggtgtggagacaccacgacaatatcctaatattattatggcgaggggtagagtctaacaagagaatatggaggggcccagaggggcgaggccttaagatatagccgtaaggataggggtagatagaggttggaagccttatccccgtaagttcgctaacgctacggacgcttatatggctatggtttagtacgtgtaatggtgccaatagttaggataatacgtgccacggaatgtggtgtacgtgggataagaatattagaatgcgggtttgccccgtaatgacgtggcgtaacctaagtgtacgggttttagcggcggtatagcggccagggcgccgaaaaacctaaaatataaccaacgaatggaaagggggcaaggtaacctggg

SEQ ID NO: 36623 - DNA, 257 bp, Glycine max
  Clone ID: PAT_MRT3847_133073C.1
gggtcgccccacgcttcttttggcggggttgttgcttgttggggggccctggtccccgggccggcgtctgcatgatcgtggctggaacttgcaagttgttgccttttccgggccagagcgtgtgtaccactaaacacgatgccttcgtcgtccgtggctgcgagcttctcgttattcgttgcaccctcacttggtgagaggcgtcgttttcccgtctcgtaacgttaattgttgtgtggtctgataaacgacctgtt

SEQ ID NO: 36624 - DNA, 482 bp, Glycine max
  Clone ID: PAT_MRT3847_133074C.1
ggagaagaggatatactcgagaggcgtatttggatcttgtccaaaaaatacggagtattattccagacgtggctttgagcagtgatttcatttgtggattttgtggagaaacagaggaggagcattctgagacgttaactctagtaaaagctgttggttatgatatggcattcatgtttgcgtatagcatgagggagaaaactcatgcccacagaaattatgttgatgatgttcctgaggaaataaagcagaggaggctagctgaacttattgagactttccgtgggagcacaggacagtgttttgactctcagattggaactacacagcttgtattagttgaaggacccaataaaagagctccggatactgagcttatgggcaagagcgataagggccatcgagtgttgtttgtcaatatgccaatcccagacagggaagacattaatacgaagcgaaatcctgtggttggtgattatgtt

SEQ ID NO: 36625 - DNA, 288 bp, Glycine max
  unsure (1)..(288): unsure at all n locations
  Clone ID: PAT_MRT3847_133075C.1
ggaacaaaaaaaggcaagtatctttttccggaaaaccgggtgtggattggatatttccaatttcaatgcaaaaatccggttatgggtccaacggaatatacaggtaactcagcctttcatcgttttccaaaaactcaaactctactcgttccatctttcacagagcgagcttcataaacagcttatgtcaacttcaaacattttccgactaatgtacttngcgtacgctctcgtcgatacaaaacactgtcttctcgtccacacatcgtcatgctgttccgcgcgctt

SEQ ID NO: 36626 - DNA, 852 bp, Glycine max
  Clone ID: PAT_MRT3847_133076C.1
tgactgctgcgagaagacgacagaagggtacgggtgctaaccgcggacgcgtgggggggcgttacaccgaggagacacaccttcagcagcagcagccatggttctcaaaaccgaactatgccgattcagcggtgccaagatctacccagggaaaggcatcagatttgttcgtggtgattctcaggttttcctgtttgctaactcgaaatgtaagaggtatttccacaacaggttgaagccatcaaagctcacctggactgcaatgtacagaaagcaacacaagaaggacattgctcaagaagctgtgaagaaaagaagacgtgctgccaaaaagccttactccaggtccattgtcggtgccactttggaagttatccagaaaaagagagctgagaagccagaagttcgagatgcaaatagggaagctgcccttcgtgaaattaaggagaggaacaagaaaacaaaggatgagaagaaggctaagaaagcagagtttgccaagtcccaaaaatcacaagggaaaggaaatgtttcgaagggtgccatgcccaaaggtcccaaacttggtggtggaggcgggaaacgctgagcctttactttggttcccatttttggctacatttaaaatagtgttgttttgaatctgtactattttactgttttattaaacctttgtttggagcttgtgaaggtaccttgttattgaatggatttagccatcagttttatattcttaagctaatcatcttttgcattgtctttgtgagatggtttgtgtttggttgtgagtttgtcttgtctaactgaggagatggagtgcatttgctcatattttgcaattgtatatcgctc

SEQ ID NO: 36627 - DNA, 147 bp, Glycine max
  Clone ID: PAT_MRT3847_133077C.1
agactttcagactttgattatgtttctgatgcatgcaaaaaggattcccaggggttctgttgctcttgccatcctgtgaggacacatattagagaaatatttactttgttgatggcaaatcttgtcttaaattttataaaatcaaat

SEQ ID NO: 36628 - DNA, 304 bp, Glycine max
  Clone ID: PAT_MRT3847_133078C.1
ctttcgctttcggtccttgtttggctgatttaaagcatttgaattacttggacttgagcggcaattatttccttggagaaggtatgtcaattccttctttccttgggacaatgacttccttgactcacctcaacctctcttatactggattctatgggaagatccctcctcagattgggaacctctctaagcttcgatatcttgacttgagcggcaattatttacttggaggaggcatgtcaattccttgtttcctcgggacactgacttccttgactcacctcgacctctctggtacttggat

SEQ ID NO: 36629 - DNA, 1112 bp, Glycine max
  Clone ID: PAT_MRT3847_133079C.1
gtaagtgtttaacaagtgtttcctgagtctgaacggaatcccacttaaaagtcgttctccttcctcttcgcagctgttatatagtactattttcatttcatatgtttatgcacctctatatatacatagacacatgtaaatggttgcaaaggaagataagataggtaccagctatcacatagtttatttaatccgttatatgccacctgatatataggcatattagctagttaggtaggtatagtagtttaagttaattcaaccatggaagacagggatcactgttgttccaacaattcaacgatgatcacaacaacaaagaaaagaacgggtagaagaagtccaacatcggataagctcaagaatcaacaccgcgagaagcagtcgatgaaaccttaccgtggaataaggatgcggaagtgggggaagtgggtggcggagatcagagaacccaacaaaaggtcgaggatatggttgggttcttacacgacacccgtggccgccgcacgtgcctacgacaccgctgtcttttacctccggggtcccaccgcgcgccttaacttccccgaactcttgttccaggacgacgaccaggagggcagtgattcggtgcagcacggcgcagcagggaacatgtccgctgattccattcgccgaaaagccacgcaagtcggcgccagagtcgacgctctccaaaccgcgcttcaccaccacgcgccaagtaccaactctctcaatctcaagcccgacttgaacgagtttccaaaactcgaagagcttcaagattgatataaatcaaatatcaatatcaatcaatatatttaatttcctaagttctttattaatatatagttttatgtgtgtatatatagatgatgatgcctcggagttggggcttgaaactaattaaccccttcccttccccttaatttagatatatcccttttcttgtttttccgtatcttcaatcataatatcaaatcaaagaagtattattattttctagggtttttgctaattgatatattattatcatatggttttgatacggtgtaacgtaacaattactaacatattaagtggccagtattcgtggtgagatagaaaaaaga

SEQ ID NO: 36630 - DNA, 318 bp, Glycine max
  Clone ID: PAT_MRT3847_13307C.1
cccccccccccggcagaaagaccggggatctactacatgaataggcagaaataaacaggccacatgcacatgataagcataagccgcatggggtggcaaatgataaacgaaacttaaggcccccaaaccatccacaggaaggcaacgaaacaaagccgccagaacgggaagaaaagccccagtcagaacacccaaaagggaaagtcagagcctcttgcggagcagccgggtccaggaacaagaaatcactgcaatttgtccggtgagaagcgaggatccatcatgcgaggcacccaaagaagcatcggaggatgctac

SEQ ID NO: 36631 - DNA, 272 bp, Glycine max
  Clone ID: PAT_MRT3847_133080C.1
cctcgaccgctcgagcggctcgagggactcgagtgtgcctccaaccttgtacaagagtgactgcctaaactaattggagagactttgcccacgagagacttcaccaggatccacattcccttccttcaaacggaaccatgtttcagcatgtgtgttcttgaatatgtaaccaaaatctggagcaacagccatgaatttgaaacaattgctcacaaatagtttcagaatctgagttccagcgtcagagtcaagggactttgacactatgacca

SEQ ID NO: 36632 - DNA, 278 bp, Glycine max
  Clone ID: PAT_MRT3847_133081C.1
caagacactgtcagcgcgcacgcatacatggccatcacaggcaacctcaacctgaacctaggactccccgtggcacgccctatggcgtgccccccacgcgcacgaacgtacctacttgctcgacgccgtggcgcgtactctaccaccttcgctcctggtaacgcgcgccatcgacttaaaccagttgactgcagacttcgtggcgcccaacaccttttcaacagagctttgaaggtcctctgatcagaaaaggctgtgatacatgctcacctagcaca

SEQ ID NO: 36633 - DNA, 431 bp, Glycine max
  Clone ID: PAT_MRT3847_133082C.1
gcacgagggttttttttttttttttttttttttttagaggaatcataaatgtaattaagccaaaaaaatctacttacaaaagtgatacaaattgattttattttttctagacatttaggcaaccatagacatgctaggattcatattgttttgacaaaatactataattacctagttgtcccaactaagacaggataaccttgtctaaacataacttcaacttctcgacgaactagctcccatttcccacgacttctgttttggcagtcccagttctccatctcctcccccaccataccattacacatcaccacctcctccttccccagctcctgctcccaagtacatttacaaatcacctccacctccggtttatatctatgcttccccacctccacctatctacaagtaagctcaaattgtgaaagcac

SEQ ID NO: 36634 - DNA, 632 bp, Glycine max
  Clone ID: PAT_MRT3847_133083C.1
ccccccccccccccccccccccccccccccccccccccccccccccccccctctttggggaaacataacaaagcatgaattctttccctttacaaggaataatctttctcgcaaccaaccaaggaatgattattatcgcccttcactaaacaagacataggaaggttacatgatttttgcctgccaataaagggaatgaaccaaaacaccaccaaaatgagcctccctttgaagtataaacaaaaatgaatcaccccttatgactagcttaactggatactaagcagtaagtaagcatactcttttgtctttgaaaattacaagcttaacagtagcatttaataaaaaaaaaaaaagttggggacagggggttttttttatctggcaactttctcccgttttctcaattaaaatgggtttaatgatgacccacgttttggaaacaaattattggtctcacataaattttggatccattcgcttaatcaacaacatcatcgctaaaaagcttaaattggggggcatcaaaaaccaatttccttataaaaaaaaatgcgcccattattccaacacccgggaagaccccataattggaggggttaatccaataagtgaaggatgattttggaggc

SEQ ID NO: 36635 - DNA, 238 bp, Glycine max
  Clone ID: PAT_MRT3847_133084C.1
cccaatctaccctggaggcagcttagacccattgggccttgctgatgacccaaaggcttttgctgagctcaaggtgaaggaactcaagaacgggagattggccatgttctcaatgattgggttctttgatcaagccattgtcaccggtaagggtccattggagaaccttgctgatcaccttgcggacccattcttttttaatgactgggcctacaccaccaacttcttccccggcaag

SEQ ID NO: 36636 - DNA, 682 bp, Glycine max
  unsure (1)..(682): unsure at all n locations
  Clone ID: PAT_MRT3847_133085C.1
gaataaacccccagaataaagccctttactttccaaaaaaaaccccaccccaaccttaaaaaaaagggtttaaccccaaagaggccctcccttcaccttaaagttttaccctttggcctaaccaaaaaccgtttttttccgtccggccnaaaaagacattaagcccctttaagccccaccaggtggaagaatagcctttcattcctttccggggtttcccacaagaatagcccctccaccctttgttatattggccaacctcttttagaagagcccctcattttgaccttggtggggccttttggagcccccgaccggcccaaaaacccacgaaacttgaaaggcctctcttggggggagaagggaaccaccaagggtgggtgggatcctttcactttcaaaaatccgatggccttgtggggaatcttttggcttttagctttcaccctcaaaatgccaaggaaattagaatgaaccgaaccaagaaggaagttcattcaccttaatatcaaaccaagaaaatggcggaaccaagaagatgaatagcaagaaaatttttaacaagacctgtttcacttgctatattgctaagtccaatcttataaattgtagtgtaataacctgtcaagtatacatctttntagcttgttgatgactagtatgtgtggnatactctatcaac

SEQ ID NO: 36637 - DNA, 365 bp, Glycine max
  Clone ID: PAT_MRT3847_133086C.1
ggcaatgaaaacagaatatttcaggcagcggccaggacaacagggaaaacggggcaaacccgggaaaaattggaccggacagctaagaaccgagggccgtacaccaaagggaagaggggacgaaagacgggaaaaacccaaaccgcggggcctggagcaaacgaacacaaccgactccccagcgaatcatgaaaagaataaggagcgtcctagtgcgcaaaggtaagacaccatgagcatcaaaccacgggccagaagcagcaacaaggccaggcccagaacgaataccaggaacaggacctacaggacggcccaaatgaccgatgaactcgtagccccccgctccaagaacaggaggatggaca

SEQ ID NO: 36638 - DNA, 256 bp, Glycine max
  Clone ID: PAT_MRT3847_133087C.1
ctttataatccatttacgccgcccccgaattacaactcctttgaggccgactgtggcggcgactctacagcgcatctgacggcttcatcatcacctacggcaggctaggtgactgacttacaccgtctacgggggagaccaccatactgagcactatatctaccattgtatggaggaataactctggcgccaacactgacatcctgccggactgctgagcacatggcatatacaaggcatggaccgccccctacag

SEQ ID NO: 36639 - DNA, 1051 bp, Glycine max
  Clone ID: PAT_MRT3847_133088C.1
atttctactttctttagctgccaaacgaaacttcccttgttcctgttcctgtgttctccttgcagctccaaaattctatgtggtggtggagatggtgatgattactgcttggatcactgaccttttcgcttgtatgggtggttgttttggatgctgtgtgaaacccacaccaattattgccgtggatgagccagcaaagggactaagaattcaggggcagacagtaagaaaaccacacatatcagatggtttctggagttcaagcacttgtgatctggataacagcaacattcaatctcagagaagtatctcgtctgtcagtacatcaaatcaaattctctatcatagcggtggaacttctaccccaggggccaatcctgaatttgtaaacccaggccttcttctctggaatgagagcaggcttcagtgggttggaagtggcaaatctaggaagcatggccaacaaaaaagagaacccagactaaattggaatgcaacttatgaaagtttgcttggaactagacaacctttccccaagcccatacctttatctgaaatggttgaattcctggtggatgtttgggagcgtgaagggatgtatggttgaaacttgataggttaaaatgctgagtgccttcaagtttgtttatactttcaatgatgtatttgactcctgaaaggttttcatgtatagttgtgcagagaagattaaaagatcaaacacaagtttgttctccctttgtaatttcaaacactaaaggcaatccttttgtttttgccctcctgtaaatgactgtatatcattttcaaactataatctgaattgcttaatgcagaagttgttactttttcaaaaacaagtttgttctccctttgtaattaaaggcaatattggtttttgctattcttcctattaatatattgaatgtatacttttagcaaaacataaagctagggtgtgttgcaatttctttactgggtaatataacaatgcccccaaagggagcttgatagggaaaggaaagttgacacgtgggggattaaactccat

SEQ ID NO: 36640 - DNA, 112 bp, Glycine max
  Clone ID: PAT_MRT3847_133089C.1
acactcatgcctgttatacacacagacacaccagccaggaggtgttttataaaatgtgggggagcactacctctaacactcctctacactatcatttcccccaccactttta

SEQ ID NO: 36641 - DNA, 227 bp, Glycine max
  Clone ID: PAT_MRT3847_13308C.1
actgatggaaactcagcctctcgtcaacatcctgtaccccacctatgccacgggtgcaaaggtacagttcaacgctgcgctgcagtgcttgcaaaggaatgtaccaatcctatcggcatgaattcactctccgattaagcttgctacaattagcacacggtatacgaccagtctaaccatattgcgaactacacatggcatgaccgatatgtcattacgagattgca

SEQ ID NO: 36642 - DNA, 485 bp, Glycine max
  Clone ID: PAT_MRT3847_133090C.1
agggaagggtaaaaccaatggaccaggaaaaaattgggggggaaaaaaaaataccaaacctgaaacaaaaagggaaaaaaaaccccccaaaattttttccaaaaattaaattgggcccggccaatttaaaaaaaggggttttaaaaaaaaaaaaaaaaaattggccccgggtcgaccccggccaaagggacaagttttttttaggtggcaaaaaaaattggggggaaacccttttagagcccccttttaggaaacatttcccccaacagggcccaaaaaaaaaaaaaacggggggaaaattcaggggcgggaaaccaaacccctggattcacctaaaaaaaccccaaaagggggcccaaagggatttttcccaaaaatttccacggggattgaaaaaattttccccatttttttccagggaaagcctaataaactttttttgggaaaaacaaccccattttggaaaaatgggacccccacccccc

SEQ ID NO: 36643 - DNA, 351 bp, Glycine max
  Clone ID: PAT_MRT3847_133091C.1
attgctttttattaaaaaaaaaaaaaaaaaaaaaaaaaaaaaaaaaaaaaaagaaaaaaaaaaaaaaaaaaaaaaaaataaaaaaaaaaaaaaaaaaaaaaaaaaaaaaaaaaaaaaaaaaaaaaaaaaaataaaataaactggaacaaaaaaaaacaaaaaaaaaaattgagaaaaaccctgaagtggccccccttaataaaattgaaaaatatccccctttgggcagaaggcataattttttaataggcccccaccaaatgacattccccccgttggcacaaaactgaatggcgaaggaaaaaccccctgtacccccacattaaccgcggtggaaaaaatgcttttttt

SEQ ID NO: 36644 - DNA, 487 bp, Glycine max
  unsure (1)..(487): unsure at all n locations
  Clone ID: PAT_MRT3847_133092C.1
tttttcaagaacaataaacttgtgtctatcaatatatatgntggatatatcacttcaattaatttatgtggctagaaatataaaaaatgccatcacagattacgaactccaaggttcacaatgatacagtaacgcaacacgaggaaaacaaaatttgactgaatccaaaccgaactaagttaagttgcaaggagcaaaactttgtttgattattggaggatcatactgaccagagtccagaactattgccaatacaccaaaaatcgttcatattacccaatttcacttgaactcaagcagtatgcagtcaaactcgtttgtgtggtgtgcaataacattaaaacaaatcagtgagggagtaaatatgcccaacttaatgaaaatttgcttttttgtttatcaatggttagtccaatcgagggcgagccctggtgcgagggcaagccctggtgcagcggtaaagttgtgccttggtgacttgttgctg

SEQ ID NO: 36645 - DNA, 435 bp, Glycine max
  Clone ID: PAT_MRT3847_133093C.1
cccacgctgtgccagtttttccaacacacgttgcccatgaaagtctcaaggagcaaactaaagatgaagacatggggaatgctactaaggataacaatgcgggcacagatgtgaacaccaatacgaagtgccgttggggatctgaaacgactgactcagggaaagatctttgaggcggagcttatgcgtgtatccagcattacagctaatgagaagcatgtgttgacaaaacccctacggacggggggaaatactgtcttctaacgcacgtgatttcagaactgcaacggcgagtaaaaataggaagcctcaagctactgcaatgcatgtgggagctctacaaatgatcaatgatagtgtcgccagatctgactgcaacatacattgttgcagtgctccgtggttgatactatatcataccaatcctgaaaatgc

SEQ ID NO: 36646 - DNA, 749 bp, Glycine max
  Clone ID: PAT_MRT3847_133094C.1
cctcaagtcaaccttggttctggaccacacatcgtaacatcatcgagtgtctgatctcgttcgcaccctgcttcttagtcctctctctcaccatttaacaattacactggaagaaaaatgggaggttgtctatcatcgaagcctaaggcagtagataatggctcagcttccggcaataccaactgtttcatgctgtatgcaagagcactctcaatcacatggggagaaactccagaatattggatatgggttcagcagaaagaagcaagtggcacaataatagagttggctaaactaaaaaaagtttgctggctagaagtgcgtgggaaatttgacattagaaagcttttaccaggaattctatatcaagtgtcatttctaataatgttggaagattcatctgaaggttgggaagttccaataaatgttagacttgtccttcctggaggaaagagacaacagcacaaggtaaatttaaacgagaagttaagggagaattggatggagattctagtaggtgagtttgtggcatctgaaaaagatggtggtgagatggatatctctatgtatgaatatgaaggtggcatgtggaagagtgggctagtcatccaaggtgttgtcatcaaaccaaagaactaagtattaaaatagatgtattatgaagtcgatgccataaatgataatttgtattactagtaataaagcttttggattgatgaagtgtgctaatatcattacttaaataggat

SEQ ID NO: 36647 - DNA, 241 bp, Glycine max
  Clone ID: PAT_MRT3847_133095C.1
attcttattaaaaaaacgcaaggggggcgcctaattatcctgtcaaaccataatattgatgttttttcaagtgggtacttcgcaacaagcattcatagccaatggcttaccagaaaatcctgggtggccgaagctctaatgcggaaggcaacaataaagggggggggacacgtgctcattgcaacaaccttaaagcattcccttttaggacttccttatcactggaaaaaaacgggtccca

SEQ ID NO: 36648 - DNA, 359 bp, Glycine max
  Clone ID: PAT_MRT3847_133096C.1
tgcttgctcctcttactatcctttcctttcattctataaattccataaatgcaaatgcatctggaaccttttaaaccctaatcggcctacacacacacacgaataacaagataattgtctacgtctccttctactaacaccataacaatccactatacatacacatcttcacagattccgattatgctctcaaactccaccacatcttccattactctctctattttctctaccatcgatttaacaatcctaaaaagtcttttccaatacttaatcatacatttttttgactgctttatcctattgaaaactacaaaatatattcatatcttactaataccaacgttaaatctatcttc

SEQ ID NO: 36649 - DNA, 376 bp, Glycine max
  Clone ID: PAT_MRT3847_133097C.1
aagaaaaaccgggtttaaaaaaatccacttcccccaaaaaatccccccttttgaaacccaaaacccgtggggggggggccctaatggcccaagaaaaattttttctcccaaatacccatggaaagagccgggttgggtttttaatcttaaaaaacaaaccgggggtggctggaacacatgatttttgctccccctgggactagaaaaaaagcccaaccccccccccaaaagggaataaatggggtttgaatgaaatcgaccgggcaattttaaaacactgggggcgttgcaaccctgggagggtaaagcggggtttacaatggggaaaaacccaatttttgggcgaacccccaaatctttaaaaaaaaaacatcgg

SEQ ID NO: 36650 - DNA, 806 bp, Glycine max
  unsure (1)..(806): unsure at all n locations
  Clone ID: PAT_MRT3847_133098C.1
cttgcatgcctgcagtaccggtagtagcaaaatttattttgcttgactatgaaaaataacagtgaacctagtgatttaccttgaaggcaaaagtttctaccgcttgagtattttgttatgactgtgtcttatgacttctgaattgattgtaatttaggtatcattacaatgtagcggatgcaagattagcgcaacatgtggagagagggattgcagatggccttctaattagttgtgtggcttcttgttccaatctctgggcccttattatggatgctggaactggcttttcaagtcaagtttataagttgtcaccatttttcttacacaaggtgaaattatatgatttatataaatcagtacttgtcatataattagctatctgttttcatatgatgaatcttgcccatgtgattctgtttcttttcaggaatggatcatggaacagtgggaaaagaactattacattacttctattgcaggggctaataatgggagctctcttgtggtgatgtcaaaaggtttgttttttaaaaatgaactagttttggactttggtctttattgctgagattttgctttttatactttaggtgttttggtcatgttttgggtttatctacatcaataaatttcgagtttatttagtgtcaggctccctcaatataaaccccagcaatctgtgataagggcatgtctttactcttaacaggtcccatacccnccaaaaataacgtaacctttgtgggttaatgcacctcctgttgttgattctatgggtttccaccacataaactgggaaaagg

SEQ ID NO: 36651 - DNA, 1343 bp, Glycine max
  Clone ID: PAT_MRT3847_133099C.1
gattgtgcagtggtgtactgcacatggagttcctcttgagccaccagaggtcacggatgcgatgggtgaagctttcccatcggcctgtccctccaaagctgcccttgaagccaacagagccacagcaacacttctcattcaacagctcgctggtgggtctcaagctgggaagactgtggctgctagggagatctcgagccgcgcaaaaactggaaaggaaaatcgtgccttcattgcagaagctggggcgattccgtatcttcggaatttactttcatcacccaatgcggttgctcaggagaattctgtgactgcgctgctcaatttgtccatttttgacaagaacaaaagtaggattatggacgaggaagggtgtcttggatcaattgttgacgtgttgagatttggacacaccacagaggcaaaggaaaatgctgctgcaacgttgttcagtctatcggccgtccatgactataagaaaataattgcagatgagatacgagcagtcgaggccctcgcaggactgttgcaagaggggactccaagaggaaagaaggatgctgtgacagctttgttcaatctttccacacacactgagaattgtgttagaatgatcgaggccggggcagtgacagctcttgttagtgctttggggaatgaaggagtttcagaagaagcagctggtgcactggccttgatcgtccggcagccaattggggccaaagcagtggtgaatgaggaatcagcagtggctggattaattggaatgatgcgttgtggaacaccgagaggtaaagagaatgcggttgcagcgatgctcgagttgtgccggagtggaggtgcagctgcaacagaaagggttgtgaaggcaccagctttggccggattacttcaaacccttctttttacggggacaaaacgcgcaagaagaaaagcagcttcacttgcaagagtttttcagagatgtgagcatgcatctttacattatggtggattaggtgttggctatgcgtttgctagcaattcaactacaactagggataccagctttgccggtgatgtttcagtaccaatgtccatttctgtgttatagtggtaatactcctgtgtttacttaagttcccaatttttgttgtaacttgtaagtctttacagattctttcattgaaatttaaagccataagaaattatagcaaaatcatcatgtattctaagagatccacgagtgttgttgagcatttagcctcaacacatatgtaatgagtcaaatgatgtaagaatagagattgctcatgaaaaagagagccatttctggaaaaaatataaaatatattaaaatattg

SEQ ID NO: 36652 - DNA, 682 bp, Glycine max
  Clone ID: PAT_MRT3847_13309C.1
tataaccaattaacatttacacaattatatagatgtgcaggtaaaccataaaaaactcatgaactagcttgacttgtcaaaaatcctaggcttggatgttggtgtcagtaaatattagtttctcaattttcatggtaataaaaattgcttatattacaggttgaccttgcccatctactagcagctcgtgatcaagagttacggacactgtctgcagagatgaaccaagtgcaatctgagttgaggcttgcccggtctttgattgctgaaagggactcagagatccaacatgttcgcatgaccaacaatcagtatgtagaagagaatgaaagactaagagctatcttaggggaatggagtacccgggctgccaagcttgagcgagcactggaggctgagcggatgtcaactcttgaattacaaaggaaactttcaacgccaagaagtcaaccatatacatcaacagaagcaaaccaacatggagcttaatttacttgcaggaaaatatggtacatgcccagttcgtgttgagcatttaaccttgttctcacatgttaaaagaacatgtaaccgtcattattgtagagagatccaatgtacatatattagcttcaaatagggttttatttttttgttcaagagaaatgcaaaatgatttaatttaattgagttattgtgtgcc

SEQ ID NO: 36653 - DNA, 528 bp, Glycine max
  Clone ID: PAT_MRT3847_1330C.1
aattgatcaatatctaattcttttttttctttccaaattcttgattttatttttactcaaaaaaaaaaaaaaacggggtttttaaaaaaaaaaaaaaaaaaaaaccaggccccccacaaaagcaaccaaagggacccaaaagggaaaagggggggggaacccctctgaaagccattccctacaaaccaaaaggaaacaaaaaaacccaaggggttccaaaaaaaaaaaacgggggggaaaacgcccaaaaaaaagcccccccccccaaaaaaaaggaaaaaaaaggggagggggtttccaaacccccaaaaggccgttaaaggaccggcatcagaaggccagtaaaaaccaccatttctctgcccaagggagaactcaccaaacccctaccaggcccaaaagggcaccccggaaaaggcaaagagggccccccccctgccggggccagggggaaaaaactccgggggggggggctaaaaaaatgcataaaatggaggagacccgggggcccccctgaacccccggaaa

SEQ ID NO: 36654 - DNA, 340 bp, Glycine max
  Clone ID: PAT_MRT3847_133100C.1
ctaagacagagatttgcattattatttttttgctgagcaagagagagatttaaatttgtaataaaccttataatgtcgggaaaaaaacaatgaattgattaaaaaaagggaataaagtgtaatttaaggagataattttataattaggaaacaaattgtaatcagaattgtctaaagaaaactacattcataacacttgttataaataattaaaatgggtggtattatttaaatcctaacatatagacaataatatatagttatatacttcaataatatttataacacctttttctgcctctttcccactatcagcactccactagcgcgtacgcgtggt

SEQ ID NO: 36655 - DNA, 376 bp, Glycine max
  Clone ID: PAT_MRT3847_133101C.1
atagctcttaagggggatctacaggtatcaactatatataacccgctattcctgaaaacccctaaacaccactgaaagaactacctggacactccgcaaaacatcttgcaaccttgaaccaccccttgtatccagtttgaaccgtgaaaaagaacagactcgcatcttttacaattgctctaaatatggggggcttgacaccttcatctacatcacctgtccttgtggacacagacagaaaatctttcgggctttcatcaattacagggggtgccaaatctaaaaaattcgtcgggttcaccgcagttggatcaaaaccaccctaagggtgcaattctcccaaaaaggccagctttcataataaataatccacctt

SEQ ID NO: 36656 - DNA, 341 bp, Glycine max
  Clone ID: PAT_MRT3847_133102C.1
ccacgcgtccgcgctcgtttagtgctgatagagggaaagagacagagaaaggtgttataaatattatatgaagtatataacctatatattattgtctatatggtaggatctaaataataacacccattttaattatttataacaagagttatgaatgtatttttctttatacaattctgattacaatttgttgcctaattataaaattatctccttaaattacactttattccctttttttaatcaatacattgtttttttccctacattataagggttattacaaatttaaatctctctcttactcaccaaaaaaataataatacaaatctctggcttag

SEQ ID NO: 36657 - DNA, 111 bp, Glycine max
  Clone ID: PAT_MRT3847_133103C.1
ttttagcgatggactgaatacgcgtatgactccatgatcaaagcatcagaacgtgaagagcaaatccaacgatatttgcaaaggccaagatttaaactcttaaacattaca

SEQ ID NO: 36658 - DNA, 422 bp, Glycine max
  Clone ID: PAT_MRT3847_133104C.1
ccacgcgtccgctgaccggctctgatagctcttagtggcagaacgcggtgcatgaatagacatacaatagcacttgcgagcctcatagctcagtaaatccaccacatgtctcggcatcacaacagaacatacgtacgagccatggcgaagctgaggctcttgttccagctgacgttccttgtgcagcatcatttgccactatagacgccttcgatctgtctgactgtagatccgaccgcaccgaaggggacgcattgaaccatgcctacatccgagcgcactcgtacctgcacgggctttgatcgtcatggacaccaacctgagcatgactgctactgacaacttacttggatctaagcttagatggaactgtcaacgaaagggcatggagcaagaaaaaactatgagcatattgcctatct

SEQ ID NO: 36659 - DNA, 450 bp, Glycine max
  unsure (1)..(450): unsure at all n locations
  Clone ID: PAT_MRT3847_133105C.1
attgnngngcntagtaaatcgnantncngctcgagnagaatctnataancagaccctntnaaacnggaaccggcnaatnaagcaccaagannnttcgcatgncgtangcttanccanngnatnctncntcgatgcattcgctgtttgttctngttacagccttnttgngtgncngactgtactcaaagtatncganangtatgnnatntcgagagtgtgtnccatagatcagagcaatgattagnccncatcggntnggntatctatnatgtctagtcgcnanaatcatagtttcccntngtctcaganngngnnatanattnatctngcgtgatcccnagaancgatagatngatnggangtggaactagcganagncnctctatngtnagntgtnccccaatcactgncccaanagtggttggaganagngggctcttaggtccgttc

SEQ ID NO: 36660 - DNA, 479 bp, Glycine max
  Clone ID: PAT_MRT3847_133106C.1
aaaaaaaaaaatggggggggggaccccccaaacataaaagatcccaagcccctctatttttggccccccccaaaggaaaagggtaaaaaaaaacccctccttggggttttggggtcccaaaaaacccccccaaaaaataaaaaaaaaccccccctttttttttttgcctttttaattccaaaaacaaatccaaaacaaaattcaggggctttttttaaaaaagccccataaaaccccaaccccccaaaggccgggtctcccattgaatgtgctcaaaaacataatttctcttttaaatacaggggggcccaaacccacccaatttgggggctttgaaagaaaaaaacattcaaagggggcctttgctttccaggttttaaaaaatggtccattcttttccaaacccctccccccaaggggttcaaaaccccctcaaaaaataatcccttggtcttttttaaaaaacccttgaccccccc

SEQ ID NO: 36661 - DNA, 311 bp, Glycine max
  Clone ID: PAT_MRT3847_133107C.1
ggatcgacccacgcgtacgctttttatggctcctctctcacgtatgcgttcattctggattcgaaactggtgatggcggtaccgagccattgtccaacgatcggaggaccacaatgaacagactgcgtgagaggctacattaaacaactacttggctcaggagagaaatctcgtcccttcagttaacgtactgaacacaaggctagggcatactgcagcaccaccaagtcattgctgagtttgaggaaatacctgtcgaaaatcaacagaacctcactgatagtgcccttggagaagccttgagatctaca

SEQ ID NO: 36662 - DNA, 255 bp, Glycine max
  Clone ID: PAT_MRT3847_133108C.1
ggctcgagcgcacatgatggtatgcataggactactcgtaggatcccatataatgaggtcttactcagcgtctctatatgacggatctgaccttatcacaaccgtgtctggtgtagttcttgaaggtgttactgctgactaagttatgctcgtaatctatcaagtagtctacagatctgtcattaatatagctgtctgctgacgactttgcgttatcagatgcttacggcaatactacagctatactgatgacta

SEQ ID NO: 36663 - DNA, 399 bp, Glycine max
  Clone ID: PAT_MRT3847_133109C.1
cccttccgcggacccttggggtctcattagtaaaagataccagaatctttcaggaaggacggattgcattagaaatagacagtatatttatagccacaagagcccagcaaggcctcaaagttggggcaggctggctggcccgtcatgttcctcaaaagcacccttgacgtcaagtctccttcccctttccccactccctggctctcagaaggtattccttttgtgtacagtgtgtaaagtgtaaatcctttttctttataaactttagagtagcatgagagaattgtatcatttgaacaactaggcttcagcatatttatagcaatccatgttagcttttactttatgatgccacaaccctgttttatactgtccttaataaatgcacatatatttttc

SEQ ID NO: 36664 - DNA, 310 bp, Glycine max
  Clone ID: PAT_MRT3847_13310C.1
atgtgacatactgagcatcgtctagctatctcgatcgaactgtccaaggtcctgtcacactacaactactaagcaacaacaacacagcctaactatccttagtgtttgtcgtggtcttctctgtggttgtggtgttgttcgttatgtgggtgattgtttgccgcgtctgttgtctcagggttaaaggccgcatttttgtgggcgtaaacgcaataacggagtagtgattaacatgtaatggttagagcatgatgatggtggcaacgaggctaaatttaaaatcagaggcaataagctacaaaaggcccac

SEQ ID NO: 36665 - DNA, 554 bp, Glycine max
  unsure (1)..(554): unsure at all n locations
  Clone ID: PAT_MRT3847_133110C.1
gcaatgaagcaccttcttttccgttctttggattctccgaggaaggagcctttgactttttcgccacttgcaacatcacgcacgtgcttttcacctggatcctcaaagggggatccacaagaggctagagaggtaattaccagtgagtggtaataactgctgagtgacttggtcggtgaataactgaatttgcattggcaatgacaaaggcagagttaggtttaatttatttatcttggtttagttatgtttaatttgtatttctcagtgaccttgttgtttaggttggttaattggcttgttttgtttctattttgtgactttttcgactgaacggatgatttggttggagtattccttccttgatttcagtctaaaaatgtcatggaatttcccttctttacctctatgttgacccaattcagactatgcctgacattttttctctgtttaaataagttgcacaatcatgtgtatgtgtaatgtgtgtgtgtgtgtttaatgagagacacattatattccctttttacttttaaaaaaaacttaacaangaa

SEQ ID NO: 36666 - DNA, 250 bp, Glycine max
  unsure (1)..(250): unsure at all n locations
  Clone ID: PAT_MRT3847_133111C.1
ctcttcttctcttgcngttnnggatgtagcgcanttctnctaganntaaggnagattngtaaggaaaangntcacatcagtactgtggtcantngccatgtcgactctgggaaatccactaccactggncactgattacaagcttcgangcattgacaagcgcgntntngagaggnntgacnaagaagctgcggagatgnccanaggtctttcaagnatncttggtgcnggacnaactanggctnanctg

SEQ ID NO: 36667 - DNA, 359 bp, Glycine max
  Clone ID: PAT_MRT3847_133112C.1
caggtttctccgcctgagccattaagagtggacgtagagactacacctggatgggagacgtctgtagctcacggccaaatatcagagaacgttacagcaagggatccaaacgagcacacgcctccgtccgaaacacctgttgagcggcacagtcctcagcttccggattcaagcacagcacaaggtacgacatttacgtctcccgttgagtcccttacaactacaagagcgcgatcgtcccagttgttccagtcctcaccatcggcagggtctgtcctcgatactccactgaagcaggccgatacgcctaccggacctcagagcctcgcatcatcgcccccaacagccccgcgatcagt

SEQ ID NO: 36668 - DNA, 206 bp, Glycine max
  Clone ID: PAT_MRT3847_133113C.1
agagacaagaagagaatataggtgtgtcagttaaatgtaataattggttacaatatgcataatttctgacaggtacctcaagatctcacttagaggttggcttattcatataggtagatccaaagcacttggttttattatttccccctgcttcttaaagggatcttgggaggtttttaacccggtgctgcttaaggggggggatt

SEQ ID NO: 36669 - DNA, 249 bp, Glycine max
  Clone ID: PAT_MRT3847_133114C.1
gggggaaaaggagagcttttactttaaataaaagaaaagggaaaacaacttgaaaaagaacaaatcaccttcctgaaaaacatggcttgaatttgaaccaaaagggaaaaaatccttgctatcctcactcaatttgaaaaggtgttttttttaacataaggatgcccccctccctaaggattggactcagcaatatgccaaaacctaaaaaaacatacctggaccaatcggacccgtgggcggaccccg

SEQ ID NO: 36670 - DNA, 166 bp, Glycine max
  Clone ID: PAT_MRT3847_133115C.1
ggtgtggtcctaaaaaattcttttcttattaaagtggaggaggagtcctcccactccaaccaatgagaggcgtttctttgggcatgagaaaggagtcattctcttggcccttactatgacaaagcaaaatggggacccttaacctctttttagccgttttttttag

SEQ ID NO: 36671 - DNA, 696 bp, Glycine max
  Clone ID: PAT_MRT3847_133116C.1
ggtccggattcccgggtcgacccacgcgtccggtttctattactcctccgtcccgcggtccgaacggaccaactccaccgccatcttcggcgtcattgtaactgtacttcaccagcaccactaaccggaaatctggcccttgccagaaaatttatccgccagtgctggcggaggtcttctctttccacttggaaccgctaactgcattcgaagtttgttgatcattacgcatttttgcagtacaggttacaatacaaccatttgctctgatggatcctcatactgaagagttgcctcagtacatacatataaatcagaatgagttttgcatacgaaggcataagaagcagaaggaggaggatattgctatatgtgaatgcaaatatgatgctgatgaccctgacaatgcatgtggggatagctgcctgaatgtattaaccagcactgaatgcacccctggttattgtcattgtgatatattatgcaaaaatcagaaatttcagaagtgtgaatatgcaaaaacaaagttgtttaaaactgaaggccgtggatggggtcttttggctgatgaggatattaaggcaggacaatttgtcattgaatactgtggacaagggatatgatggaaagaagccaaacgtggatgccaggcttatgaaaatgagggtcttaaagatgcatttatcattttcctta

SEQ ID NO: 36672 - DNA, 337 bp, Glycine max
  Clone ID: PAT_MRT3847_133117C.1
ccggtctcatcaatttcaatgaaggtgccagcaagccgccgggatgatgcacggccatctgcaaacgtcatatgggccctaagccgtagtccaaaatcttcttccagctccagtagcctttacatatatgctgttcgcaagagcacggtactggctccacgtttaacacccccgataggtgcatgcaccgccagggtgtttgaacccaacagccccaattatgcaagagctgaacaacactttaaaactaggtccagagccgttctaatatccatgcgaaggacgaatgttgctagctccagccattaaagaagccaccttgttttgtcttccaccc

SEQ ID NO: 36673 - DNA, 389 bp, Glycine max
  Clone ID: PAT_MRT3847_133118C.1
aacctttggtctgatttatgtgcctgtagatgtgcgggtgagaagatgatatacccccactaagttacggaaagtacgaagacgagagcgatccccataaagaacaggaggaattctacgtcgactatttcttatagtgattaactaggtttaaatactaagaattatgctcaagatgacgctagatcagaaacggggccgaggaaaacacccgtattacgaagtcctatgagaataccgtctggttcctatacatcgatcaccataatctaaaagtcggctgtacaagcctttccgatagctcgatttctttagcttcgtaataacccggatctatcgtttaacacgccgattcgcataggaacggaactcatctcatataccgcaat

SEQ ID NO: 36674 - DNA, 557 bp, Glycine max
  Clone ID: PAT_MRT3847_133119C.1
ttgcatttcttcattacattggtcactactaatcacttgctgcattttctttcctactcttcacccttgagaatttgtcatttggacatggaacttagttttaagcaccaacttggccttgcttgtgttgtacttcttttacctgcattgtgtagctcacaggactcttttactgactccagagcaacatattatggtagccctgattgctatgggaatccaagtatgagcctttttctaactaactatggaatgtgctagtacatataaattgtttgtaccaaacacatttgattgctgactaggcatttaggatatacacccatgtttgcatgtctcaataatgatcttgatattttttaaccaaaaataaatttagaaaatttactctgttgatgcatggtacttcctgggcatgctttttagaagcaaaaaatgtgcactatatggtagtgtgacattataccaccttttgcgactatgccccattatctcaacattaaataattgacaatatatttaacatttatagttctttttaaaatctttcccgttta

SEQ ID NO: 36675 - DNA, 162 bp, Glycine max
  Clone ID: PAT_MRT3847_13311C.1
ttttttgattgacaaactgcacaattaacattaactcaacataaccctgacagggagagtcattgaacaaacataatagtgttactttaaacccaaagtatcttctagacgctactgcctaccatcagaaaaacatactatgttaatcactgtgaatgggcc

SEQ ID NO: 36676 - DNA, 342 bp, Glycine max
  Clone ID: PAT_MRT3847_133120C.1
agacactggacgtagcttacaccactatcagagtgtgagctctacaaacaggaattaatgctaaccacacaggcaacacggagacccgccctgctgttggagaaacagctagagattatgggaaaacgaaccctatggcacgagtgcagaccacaatccagaggctcagtgtactgtcacccagttaaaagacaagggcaactcattggatcacagtggagaaaatctattcctaggtcccattgatgtagctaatggaggcttgtgaacaggtctcagccaggggtatatactgtctaacgctaattgcttggccagggcgatggcagcatgcctttgctg

SEQ ID NO: 36677 - DNA, 502 bp, Glycine max
  Clone ID: PAT_MRT3847_133121C.1
ggatacactacaggtatgggcagaagctgtgcatataaagccagcagatatttttgctctgccatttgtcattccatactgactgattgtttaggtggcacatgatacttcaaaaatacctgatctgctcaaggaaccctctatttgagaggaactacagcatctggagccatgaattgattcttattttctgatgcattcttttgttagttgcacactagcaacaaataatgtttgtcttgattttgagttggttggatggaagcatctgtcataagtgtttacatgtttggtgtattggcggaggcttgattggggcagtagttctcacttcacgcgacgacatagtaattcgtttacagattagacttcataaagaaaggcagccgcaggttgtggggaagagacgtgcaagctcgtgcaacttttttttttttttaaataatttttgcctagatcttttcctgggcagctagctagttctttctagttgagaatgaga

SEQ ID NO: 36678 - DNA, 2163 bp, Glycine max
  Clone ID: PAT_MRT3847_133122C.1
ggctcgaggaaaatgtaattgagtcactgtttgcagaaaaaggatggtttatttaacatatgcacattcatagtcatttcattcttgagtgatgacaagataaaaatatagatgacgtccaagggtgccaccggtgcagaaaacagccaaagcattaaatacggtgtaatttacatcacattttgtcaaaatcttttttctacatttgttgagcaaatggttggtaggacttgttgtatatataaatttagagcatttgtatataagaatgactcgagccgcttaaaaacattcattctcctttgaaagttgagaaaggagaattgaggaaatggcaggagggtctttcacaacaggcactgtgagcaaggagagggcagagcagtacaaggggagagtcactgcttatgtcatcatctcttgcattgttgctgccacaggaggggctctctttggctatgatattggaatttcaggtggggttacatccatggatgactttcttatagagttcttcccctcagtatacagacagaaaaagcatgcccatgaaaacaactactgcaagtatgacaatcagggcctagcagcatttacctcttctctgtacattgctggtttagttgcatccctgatggcatcccctgtgacaagaaagtatggacgtcgagtaagtatcataggtggtggtatcagctttcttattggatcagctctgaatgcttcagctgttaacctgataatgttgatcttaggccgggttatgcttggtgttggcattggatttggaaatcaggctattcaattcggctcgtcagagatggcaccaacacaccttcgaggaggcctgaacatgatgtttcaagttgcaaccacttttgggattttcacagctaacatgatcaattttggaacacaaaagatcaagccttggggttggaggctgtccctaggcttggctgcagtaccagctcttttgatgactgtgggagggatatttcttcctgacactccaaatagcttaattgaacgaggattggcggaaaaaggaaggaagctgctggagaaaatccgaggaaccaaggaagttgatgcagagttccaagatatggttgatgcaagcgagttggcaaagtccataaagcacccatttcgtaacatccttgaaagaaggtacaggccagagttggtgatggcaatcttcatgcctacctttcagatcctgactggcataaattccattctcttctatgctccagtgctgtttcaaagcatgggatttggaggagatgcatcactcatctcttcagctttaaccggtggagttcttgctagttcaacgttcatttccatagcaacagtagataggttgggcaggagagttcttcttgtcagtggtggactacaaatgatcacatgccaaatcatagtggccattattctaggggtcaagtttggagcagaccaagaattgtcaaaagggttttcaattttggtggttgtggtgatttgcctatttgttgttgcttttgggtggtcatggggtccacttgggtggacagtccctagtgagatatttccattggaaatccggtcagcagggcagggcatcacagttgctgtaaaccttctcttcactttcataattgctcaggcctttcttgctcttctctgctcattcaagtttgggatctttctcttctttgctggctggatcaccatcatgaccatatttgtttacctgttcttacctgaaaccaaagggattcccattgaggagatgtcatttatgtggaggaggcactggttctggaaaaggatttgcctcccaacagatggtagtatctgaattacccatgctaatgatgtcatgaagtaaagtccaaaatttataacttatgcatccaactcaaccagttgaacttagttaagttttgtgtatctgttaagttgagaataatggataaataattacataattattagatcatgaaggtaaaacgatcaaacggttataaagacaacctgcttatgtattcactaattatacaccaaattggagaaaaccattgaagaaaaagaaaacagatactaagactgccttcaatgacacatcaggacagtggctacaaactacgatcttcatgctagtgtaatagcgtc

SEQ ID NO: 36679 - DNA, 268 bp, Glycine max
  Clone ID: PAT_MRT3847_133123C.1
ggccgattcatacgccaagcccactcatgtgctaccaaatgtaagttagagagatgggggagaaaatgagttgtttttggagtcatgagctaaggagtgagaaagattatggaactgttgatgttgctcgcatcccttattgtgaaaagcttattttgagttttctatggtgtgcagacaaggaagggaggctggaagagatggccaagagaaatagtatattgagaagaatgggcagttttgagtgggacaggtgtgaggatccaac

SEQ ID NO: 36680 - DNA, 746 bp, Glycine max
  Clone ID: PAT_MRT3847_133124C.1
caattttgccagacatttgataagaaagcaagattggaaggctttgcaagagtttgaccagctccagaaagaactagaagaaggtggagtattcgagggttggaaagagggtgacatagaattcgctccaacatataaatactcatcctccactaccaatagatactgtggtagcctccctagtagatccggagaaaaacaaagaactccagcatggtgtgatagaattttatggtatggtaaaggagtggagcaacttcactattttcggagtgaaagcaagttctctgatcatcgccccgtttcagcacttttctctacacaaattgaaattaaatcatctaatagaggactgatggggttacataatatccccccaacaatgttgaatcccaagaatgggatgaacagaggagatgaagacggaaaatcttccttattatcgtcgttaaccaagaatgtacaaggctgctaacactagcaaataaaactttcgtttaaaggggtgacacaaattttcagccaggtcatggtcatcacaaaaatgacacataattgcttttcctaaaaccccacatttttttggatagcaggatttggaaggttattgttagatgacaaggcatggtaaatacaattggtgttgataatcaaggtggatgttaggtctattgttgaaaggtctaagtccaactaagaaaaaatttacaatataaattttgtgaattatacaaatatcattgatc

SEQ ID NO: 36681 - DNA, 2895 bp, Glycine max
  unsure (1)..(2895): unsure at all n locations
  Clone ID: PAT_MRT3847_133125C.1
gatgggttgcgcgctcggaaagccggcggacgccggtgaccgtcgccggcatagcactgcgactaccagcggcggccataatcccgctaaggttcgggagaagcagaagcctctacacgccggcgaactttccggcgttataccggcaccagagcgccggagacctcgacttgactcattcactgcgagccaccaagggtggcctccgtggctaatggccgtcgccggcgacgccatccgagattggactcctcgtcgtgccaacacgttcgagaaacttgctaagattgggcaagggacttatagcaatgtgtacaaagcaaaagaccttgtgagtgggaagatagtggctttgaagaaggttagatttgataatgtggaggcagagagtgtgaagttcatggctagagagattcttgttttgaggaggcttgataccctaatgttgtgaagctgagggggttggttacttccagaatatcatcgagtctttacttggatnttgagtacatggagcatgatcggtctggtctttccgctcgacccacgcgtccggttaagttctctgaacctcagtatattctttatgacaggttaaatgctttatgaagcaattactatctggtcttgagcattgccacagtcgaggggtgttgcaccgtgatatcaagggttccaatctgcttattgacaatgaagggatccttaaaattgcagattttggactggcaactttttatgatcctaagataaaacaggcaatgacaagcagagttgtgaccctttggtatcgccctcctgagctgcttcttggggctactgtttatggtgttggtattgacctttggagtgctggttgcatcttggcagagctgcttgctggaaagccaataatgcctggccgaacagaggttgaacaactgcacaaaatattaagttgtgcggctctccatctgaggaatactggaggaagtatagattgccaaatgctactatctttaagccccagcagccatataaacgttgcatcttagaaacatacaaggactttcctccatcttcactacctctaattgaaacccttctcgcaatagatcccgaggatcgtggcactgcctcagcaacactaaatagtgaattctttaccacagagccttatgcttgtgaaccatcaagtttgccgctcgagcggctcgagtacggagtggacgacagaaggggagatgaagaagcaagaaggcaaaaggctctaaatgggaaagctagtgcagttgatggtgcaaaaaaagtcagagtacgtgagcgtgaacgtggtcgggctgttccagcccctgaagccaacgcagagatccaaacaaacttagataggtggagagttgtgacccatgcaaatgcaaaaagcaagagtgagaaatttccacctcctcatcaagatggagctgttggatacccacaagatgcatcaaataaaggacctgtttcatttggcgccccagacacttccttctcttcagggatatttaattcaaaaccttctggacatgttaggaatcatgctgctgcagggcttaacagagggaggaaaactaagaaagatgagtcccagatggcatcatcatggaaattcatgcgtccattcaaaccatcaacagctggactttccatggatttattatttaggagcaaataatcaatcagtttcttttgattttggcttcctagaatatgagggtagtgatgatttaggcctttatacatcttnttttgctttatggtgttggtattgacctttggagtgctggttgcatcttggcagagctgcttgctggaaagccaataatgcctggccgaacagaggatgatacatgactaactttcgggttgcttggggccaggttgaacaactgcacaaaatatttaagttgtgcggctctccatctgaggaatactggaggaagtatagattgccaaatgctactatctttaagccccagcagccatataaacgttgcatcttagaaacatacaaggactttcctccatcttcactacctctaattgaaacccttctcgcaatagatcctgaggatcgtggcactgcctcagcaacactaaatagtgaattctttaccacagagccttatgcttgtgaaccatcaagtttgccaaagtatcctcccagcaaagaattggatgtaaaactgagagatgaagaagcaagaaggcaaaaggctctaaatgggaaagctagtgcagttgatggtgcaaaaaaagtcagagtacgtgagcgtgaacgtggtcgggctgttccagcccctgaagccaatgcagagatccaaacaaacttagataggtggagagttgtgacccatgcaaatgcaaaaagcaagagtgagaaatttccacctcctcatcaagatggagctgttggatacccgcaagatgcatcaaataaaggacctgtttcatttggcgcccctgacacttccttctcttcagggatatttaattcaaaaccttctggacatgttaggaatcatgctgctgcagggcttcacagagggaggaaaactaagaaagatgagtcccagatggcatcatcatggaaattcatgcgtccattcaaaccatcaacagctggactttccatggatttattatttaggagcaaatgatcaatcagtttcttttgattttggcttcctagaatatgagggtagtgatgatttaggccttgatacatctttttttgcatttcgcaatggttttcattttttttgtgtcgctcctaattttttgtatttcatttggcataaagttgttgtataatctacaacggggatccttacatttgtatatttagaggaataaattctctgctgtacagtttctggg

SEQ ID NO: 36682 - DNA, 2255 bp, Glycine max
  unsure (1)..(2255): unsure at all n locations
  Clone ID: PAT_MRT3847_133126C.1
attcctctgattgctgggttccccgctcggcaagccggcggacgcggtgcaccgtcgccggcatagcactgcgactaccagcggcggccataatcccgctaaggttcgggagaagcagaagcctctacccgccggcgacctcgccggcgttataccggctccagagcgccgcagacctcgactgggctcattcactgcgacccccccagggggaactccgtggatacgggcgatcgcaggtgcgctcgtgagaccttcgggtgccggtcatgcgccccctcgtcggcggcataactgccgggtggattttgctacctggggcttcaataacgcccttacagttgagattgatcgaaagccaaaagtacccggcgaaattacggggactcttccggcggcagagcgccggaaacctagactcgatccgtgcgccgtcacgcaacagggatggccttcgtggctgatggccgtcgccggcgaagccatcggagactggactcctcgtcgcgccaacaccttcgagaagctcgctaagattgggcaagggacgtatagtaatgtgtataaggcaagggaccttgtgacggggaagatagtggcattgaagaaagtgagatttgataatttggagccagagagtgtgaagttcatggcaagagagatacttgttttgaggaggcttgatcaccccaatgttgtgaagcttgagggtttggttacttctagaatgtcgtgtagtctctatttggtgtttgagtatatggagcatgatcttgcagggcttgctgctggtcaaggtgtcaagttcactgaacctcaggttaaatgctttatgaagcaattactctctggtcttgagcattgtcacagccggggggtgttgcaccgtgatatcaagggctccaatctgcttattgacaatgaaggaatccttaaaattgcagattttggactggcaactttttatgatcctaagataaaacaggcaatgacaagcagagttgtgaccctttggtatcgtccccctgagctgcttctaggggctacagtttatggtgttggtattgatctttggagtgctggttgcattttggcagagctgcttgctggaaagccaataatgcctggccgaacagaggttgaacaactgcacaaaatatttaagttgtgcggctctccatctgaggaatactggaggaagtatagattgccaaatgctactatctttaagccacagcagccatataaacgttgcatcttagaaacatacaaggattttcctccatcttcactacctctaattgaaacccttcttgcaatagatcctgatgatcgttgcactgcctcagcagcactaaatagtgaattctttaccacagagccctatgcttgtgaaccatcaagtttgccaaagtatcctcccagcaaagaattggatgtaaaactgagagatgaggaagcaagaaggcaaaaagctttaaatgggaaagctagtgcagttgatggtgccaaaaaagtcagagtacgtgagcgtggcagggctgttccagcccctgaagccaatgcagagatccaaacaaacttagataggtggagagttgtgacccatgcaaatgcaaaaagcaagagtgagaaatttccacctcctcatcaagatggagctgttggatacccacaagatgcatcaaataaaggacctgtttcatttggcgcccctgacacttccttttcttcagggatatttaattcgaaaccttctggaacggttaggaatcatggtgctgcagggcttcacagagggaggaaaactaagaaagatgagtcccagatggcgtcatcatggaaattcatgcgtccattcaagccatcaacagttggactttccatggatttattatttaggagcaaataatcaatcagtttcttttgattttggcatcctagaatgaggatagtgatgatttaggccttgatacatcttttttgcatttcgaaatggttttcatttattttttttcgtgtcagttcctattttttgtatttcatttggcataaagttgttgtataatctacaacggggatccttacatttgtatatttagaggattaaattctctgctgtacagtttctgggaggacttagttcttaaggaccttggaaatgttttaatttagctagtaaattattttttaaaaaaaaaaaggaacccacagggcggccgctctaccgaaaacacaagcnttacgtacgcgtg

SEQ ID NO: 36683 - DNA, 128 bp, Glycine max
  unsure (1)..(128): unsure at all n locations
  Clone ID: PAT_MRT3847_133127C.1
gctttcganaccagtttgcntcactcngcntntcntttcccttacatagcnacanaccctaaacgccgttggtgtattcccgcnggcaacnatttnagtggcttcttcngncgtcgccgctcattgct

SEQ ID NO: 36684 - DNA, 242 bp, Glycine max
  Clone ID: PAT_MRT3847_133128C.1
atttaatttagtagaactttttatccttgtaaaacttttggtccctccaacgtaaaactctttgatataccaaacatggatcagtcatgacagtttttgtggtaaaacttttggtccttgcagctttattctatttggtatattatgtgtggggtcacttttgatttttgttgacctttcaataatgatattgacaggttttattggaatttaaggagtatgctactgaagttgttcacacg

SEQ ID NO: 36685 - DNA, 178 bp, Glycine max
  Clone ID: PAT_MRT3847_133129C.1
ggtataataagggctgttcttcttgataagagcaggcaagaaccaactgattacaacgtacgacgacggctgctaacggcggaacagaagaacaacatgacacatggcaccgaagaaaaacagccgggggccaatacacaagaggagcggggaagcgccggccctaaacaacagcgac

SEQ ID NO: 36686 - DNA, 937 bp, Glycine max
  Clone ID: PAT_MRT3847_13312C.1
agtgtagctgttggaactctggcgtttcttggagcctttttcccttattacactgtcaacgaggagggagtttcaataatcttgaaggttattgcttccttactttcacctacagcctttgctttgggttcgatcaactttgctgattatgagcgtgctcatgttggactccgttggagcaacatatggcgggaatcatctggagtgaactttttggcatgtcttctgatgatgatacttgatacactgctatattgtgcgactggactttattttgacaaggttcttccaagggagtatggactgagatacccatggagctttattttccaaaaggacttctggaggaagaaaaaaattctaaaacattgttcctccggttttaaagttgaaatatctgataaaaattctgagtcagaagggaatctttcaggggaatatacttccaaatctggcatagaagcaataagcttagagatgaaacaacaggagcttgatggcaggtgcattcaaatcaggaatttgcataaagtttatgctacgaagaaaggagattgctgtgctgttaactcattacagctgacactgtatgaaaaccagattcttgcccttctaggatgagatacggaaggttttgggtgtctgcccacaacatgatatactctttcctgaattaacaagagcatttagaactatttgcgacattaaagggtgtggaggaacactcattggacaatgctgttattaatatggcggatgaggtgagtttggtgggcctggcagataaaatcaacagtattgtgagaactctttctggtggcatgaagaggaaattgtctcttggaattgcgttgattggaagcagtaaggttatagtccttgatgaacctactagtggaatggatccatactcgatgcgcttgacttggcaattaat

SEQ ID NO: 36687 - DNA, 264 bp, Glycine max
  Clone ID: PAT_MRT3847_133130C.1
gtggaatctgagaagaagcgatgtcccggcgatcgtacaagacggagtggggttgcatagcatgcgacgaactgggcgagctgggagcggggaagccccactggctggtggagacccctcagctcctctgcgccatcgacacgcactctctcctcctcgccaaccgctccaccatcctcctcctctcctggtcctccgactccagcgccgctgcaccgtcgcccctcaagatccgacccgacttctcccccatcgatgccgagt

SEQ ID NO: 36688 - DNA, 574 bp, Glycine max
  unsure (1)..(574): unsure at all n locations
  Clone ID: PAT_MRT3847_133131C.1
aattcccggngtcgacccacgcgtccgcgaaatctctgcatcttctttactctacgttcaaaaaatgggtaggagtctcagccctttggtgaggcaagagctggcaaatcttgagaaagatgaagatagccgcaaatccgccatgaaggcgttgaaatcctatgtgaaagatttggattataaggccattcctttctttcttgcaaaggtttctgagagcaaggaaaattgttcaggggagttcacaatttcaatctatgaagttcttgcacgggttcacggtgtcaaaattgttcccttgatagacagcatcatgagaactatagtcaagactttggcttcaagtgcagggtccttccctctccaacaggcttgctcaaaggtggttcctgcaattgcaagatatggaattgacccctcaaccccagaagataaaaagaggcacattattcagtccctttgcacgcctctttctgattccctttcgagttctcaggagagtcttacttcgggtgctgctctttgcttgaagctcttgtggattctgaaaattggaaggttgcttcagaagagt

SEQ ID NO: 36689 - DNA, 350 bp, Glycine max
  Clone ID: PAT_MRT3847_133132C.1
tacggctgcgagaagacgacagaagggggcatcaacatgtaccaaatgaataaatcatctgcggagcctatctctctatctgattcagatgataatgctcaggtgaaatacacaccaaaggaatagcagaagaaagcggatatagacgatgacttagtttgacccataaaaagtgacaacctcactcaggatgatggaattcaggcattattgctcctgttgagctatccgatcccactgtcatcattcttgacactggggaaagcctgttatcatgaactgctgtcataaaaagagagcactagttcattaaaggttgcatccttgaggctcctaatgtctagaggaaa

SEQ ID NO: 36690 - DNA, 346 bp, Glycine max
  unsure (1)..(346): unsure at all n locations
  Clone ID: PAT_MRT3847_133133C.1
ctttnttttcttttttttttttttttttttttttttttttttttttttttttttttttttttttttttttctaaccccaaactttatttttatataacaaaaacccggccttcccggggaaaaaccagagaaaaaaaaagagaagagaaaaaagcccctcctaggggattataaacaattttaggggggagaaattaaagaagaaaaccccacccacaatttaaaaaaccagggggggcaaaattaaaggcagggcccgcgggaaagggggcaccccaaaaaaatttgacgggcgcccgggggagaaaaaaaactccccttgaaaccaagggaaccgggaggtcgc

SEQ ID NO: 36691 - DNA, 177 bp, Glycine max
  Clone ID: PAT_MRT3847_133134C.1
aaacattatctttttgtaattaattgatcaattaaacatataccgttgatatgtgaggggcaactacacaagaattctgggataaaatacaaaaagtttgtacgtaatgattcccattcccaggagcaatatttcgcatggtaaagtcaaagtattaactacggaaaacctagatcc

SEQ ID NO: 36692 - DNA, 407 bp, Glycine max
  Clone ID: PAT_MRT3847_133135C.1
ttggtttacaactttttttttttattttaagattaaatcatggggaaatttttcatttttttttttgagaaaacccaaaaaaaagggaaacgaccatagttgggtcggtgaacacaagcgttattcagatagattcttcggcctctttttttaggaacgataatctgtgtattgctctcggtgtcaaaaaaaaaccaaagaccctctctgtgtctctctcagggctgttatctgctacttttttttttcttctctcccccatagggtctgaaaagaaaaaatgcgaaacccgtgacctgaacccgatcgcgcgaaaggcccaccgtgatcgacgtctttttgagattccgcccacacggggtttttcctgggggggtgagccttatcagactttgacgaggttcggg

SEQ ID NO: 36693 - DNA, 1082 bp, Glycine max
  Clone ID: PAT_MRT3847_133136C.1
cccacgcgtccgcccacgcgtccgaagaaattcaactttatccgatactaccgctttcaatctcatccttcgaaacccaaacttgagcttcttcttgtttcttgctcgtggaagcaaatgacaaccgcgccctctctaactggtcccttgtcaaacgcggtcggattcagtgactggaaaaaacatgcccctttgtcagcttctctctgtaaactaagctccagttcaaatatagttgacatgaagatatctcgatgtggttgtcggaaagttggacatggccaaagatgtttccgattatatgccctatttggaggaaaaaaggacaataatgggaaaagtgatgatgttccttctaaggccggaattctaggaaacatgcaaaatctttatgagactgtgaagaaggcacaaatggttgtccaagttgaagctgtgcgtgtgcagaaagaactcgcagcagcagagtttgatggttattgtgagggtgagttagttaaggtaacgctgtctgggaaccagcaacctgtaaggacggaaattactgaggcagctatggaattgggatctgaaaaactttctcttttaatcactgaggcatacaaggatgcacaccaaaagagcgtccaggccatgaaggaaaggatgaatgatcttgcacagagcttaggaatgccaccggggcttagtgaaggattgaagtgatgaatacttttattatagacttacgaaattgggcctcaattttgcacaaacatggcaggatgagcttatttgtttcttcatttactatgtctgttaatttgcaatcttggttattaagaaagaaatggtggtggagttttaattgttgtttgttttgttttcttcttttactatggctgttgatgggcaatctttggtatcaagaaagtaatgtaatcctggatcgatagggaatggccggtgccgcgtcatgtggttgtcgtttcacccgcggtatctgtggtttgtgaaaaaccttaggcgaggcattagagtctctgtataaatttgttgccttacctttggtatgcgagattagaatccactgtattgtacaa

SEQ ID NO: 36694 - DNA, 277 bp, Glycine max
  Clone ID: PAT_MRT3847_133137C.1
tctctgaacgtcgccctccctcgaatcccctccctcctcctcttcctcaatctcaagcccaaggcccggtccactctcaagctccccgtcttctggactatcggctggcagtcccggaccgcctcctccgtctctccgattataaacatttccttgtctgtggtaccatacgcgaacggggacgtgtacgagggagagttgaatggagggaagtgttgtgggagaaggtgggcatattacagtatgaggtgggaagaatggaaggggaattggtgat

SEQ ID NO: 36695 - DNA, 174 bp, Glycine max
  Clone ID: PAT_MRT3847_133138C.1
aaaattgaacttttgataagttgcaatgaacaatcgtataaggaaatttgacaacacactttaacttaaaatctcaaatcttagatttatggatcttctcctcacttatatgatgctcaacttttttcacttttactcgatttgagactttacttcccacttgtactctaaatt

SEQ ID NO: 36696 - DNA, 475 bp, Glycine max
  Clone ID: PAT_MRT3847_133139C.1
aattcggcctcgagtacggctgcgagaagacgacagaagggcaccatattcttttgagtacttatcaaacaacacacaacataatttttgtgttgtgctccatgactagcaaaaagtgaatagaacaaaaaactgaaccatgactcatttacttgtctgtgttatatcacttgtactatcgttccatgcgcaccgaacccaccgtacatttttattcacgaatttaacaaatctcaaatgggccattgatgttaattacgttttgcttttatgaacaaagatcctgagatacattctgatcttctatttatttatttaagatgcgtgtttacataattgatatggtacgaattataattaattttattttatagcactgtcactatacggtgtgacctcgtacctaagtcccttacgaaagtccatactcacaggagcataagactcatacgaggactatgattttttttttttt

SEQ ID NO: 36697 - DNA, 607 bp, Glycine max
  Clone ID: PAT_MRT3847_13313C.1
attaattgccaagtcaagcgcatcgagtatggatccattccactagtaggttcatcaaggactataaccttactgcttccaatcaacgcaattccaagagacaatttcctcttcatgccaccaaaaagagttctcacaatactggtgattttatctgccaggcccacctcatccgccatattaataacagcattgtccaatgagtgttcctccacaccctttaatggcgcaaataggtctaaatgctctctaactggtaattcaggaaagagtatatcatggtgtgggcagacacccaaaaccttccggatctcatcaatatctgatacaaaggtctttccaaacaccaaagcatccccagaagttggaggaagcagaccaacaagcattgagattggcgtgcttttcccagctccattatgtcctataagggcaagaatctggttttcatacagagtcagctgtaatgagttaacagcacagcaatctcctttcttcgtagcataaactttatgcaaattcctgatttgaatgcacctgccatcaagctccctgttggttcatctctaagcttattgcttctatgccagatttggaagtattattc

SEQ ID NO: 36698 - DNA, 544 bp, Glycine max
  unsure (1)..(544): unsure at all n locations
  Clone ID: PAT_MRT3847_133140C.1
gttggaccttcccttatgccaaggtccccttttgaaaaaggttttggattcgtccaaggaccttgtaaacaacccaaactactactgttcttccaccggtttttccctcaaggccttgaattccaccctctgcgccctagttcccctcctcctccggcccgagggctttaacccttaccgttggaaccccataacttcctggggtttaaccttaaacacttgggccagaatcttgaggtcccccggtaagaacaacttcttaccctataaggccgtcaccggtgccaaccccttactttcatggttcaaaggccttccccatatcagaattcctgatttgagaataaacctaatggcctttaccgggaaccacctgggaattccaaaggagaattttatgcctttggttanaatgccatcctctctttttgtaaggactcggaggtgtctaatcgtatttgtcgctcttgtggtaatttcattacctagggaagtgcttaggtgttcccccacataggacattggaactgccacttatttttgt

SEQ ID NO: 36699 - DNA, 437 bp, Glycine max
  Clone ID: PAT_MRT3847_133141C.1
atgccgagggacgagacgcgagctcgcctagctcacgtggcgcggcggccgccctttttttttttttttttttttttttttttttttttttttttttttttttttgtttttttgcgcttttttgtttttttttttttttttttttgtgtttcctttataaaaaaaacaggccgaagtagaaaaatgttttgcccgggaaaaaccctgccgtagcccggccaaatcgaaagggggtcgttcccctaaagccacctggggaaaaaccaagaggcccgcagggggcgcccccccaaaaaaacgggcaaccagagcggcttctgggaaacccccctggtcgggcgttttaaaccccgcggccgggggggtttctcgcagcgggacgggcacaaaagaaaggggcaaagcgcggggaacaaacaaatttttgccttccccct

SEQ ID NO: 36700 - DNA, 389 bp, Glycine max
  Clone ID: PAT_MRT3847_133142C.1
ggggaatagtgatttgtctttgaggttgggtatatgtttaaagaggaacatagcaagttcagcatatggatcagaagatattgggttaagagtgtctgaagagggcaggaaatttggccattcgtctcgacagaaaaaagaagggtactgtttttaccctagaggaacaggttatggttccatttagtgcatgtttgggaaccagatgtttttgggaagtgatcgttttttaagttctcaataaaaataatacaaataaatgattatttcttcaaaataagctgaacctaacatgcaattattccatgatgttgaagatgatcaaaatgctggcaacttttcagaagtacagtgtgcttctaggtagctaggtggatgggcaattttga

SEQ ID NO: 36701 - DNA, 417 bp, Glycine max
  Clone ID: PAT_MRT3847_133143C.1
gcgataaccctcttagggtgattcttaaccgtgtattttaggcgtttaatccatgcattgaaggcttcaaatattgcaagccacttgtgcaagtagatgggacatttttaactggcaaatacaatgatactttgttgactgccatcggacaagatggtagtagggacaattttccacttgcttttgcaattgttgagagcgagactaaagaagcttggatatggttcttgcattatttgtgaagatatgttactccgcaaccaaatttgtgtattatatcagacaggggaactggtttgctagcaactttacaatccaaacacgttggttggaatggaccagatgtttcgtctgtgtattgcattcgtcacattgcatcaaatttcaacaaatagtttaaaaatgttaacttaaaaa

SEQ ID NO: 36702 - DNA, 403 bp, Glycine max
  Clone ID: PAT_MRT3847_133144C.1
aattcggctcgagctgcgagaagacgacagaaggggccatcacaaagtcacagtcataatgaacaactggaaaaagaaaagtgtgtacaaatccatgttcttccgctcctgctgctttatcaagtaattaccatgatgaacaaacaattaattggacgatgaaggtggattatatagttacgtttgtttgttgcatcagcaaattttaactaagtagttttagttgaaatttcataagctttgttggtctatctgttacacaggaagccagaaattgaagcgtttggagaagtgcatttgtatgcatcatgtattgcgttacacattttctaaaagtaacatgctcaaagtatgttaaaggagaaaatgatccttataaacctgcaattacatcaccaccaca

SEQ ID NO: 36703 - DNA, 1590 bp, Glycine max
  Clone ID: PAT_MRT3847_133145C.1
ctgcactctgatctgaaactatgtggtttcaaaaaggcccatgaaaggacatggaagggaaatgattcagttgggtgttcccattgctgatgcaccaccagatgtggacaatgtaacaggaatctccaaagataagaaagtagaatctatcccttctttgttccaagatatcattgagcgcctggctgcctcacaagtgatgactgtgaagcctgatgcttgcattgtggatttctttaatgagggtgagcactcacatcccaacaattggcctccttggtttggaaggcctgtttatacacttttcctgactgaatgtgacatgacttttgggagaataattgtctcagatcatcctggggagtttagaggtgctgtcagactttctattgtccccgccttcctattctgtgatgcaaggtaaatcaagctgatttcgtcaagccccgctcttccatcctcatccaccaaataagcatcatcataaactagaccacgtcccaaccaacatgttccatgccacatgattcttagcgactcggtccaccggccgggtgtcattggggcccaccccagagccggtcgcccaaccaatgtcatttcccactccggtccagcaccaacctggtttcccaggatgtatcttacctcctccgcgatcccctcctcctcgaatccctgttcctggcacaggagttttcctccctccacctggctcaggtaccatacatgaagtgaacccaagtgtggaaacttggactgtgtcgggaaaggaaaatgggaaatctaatcacagcacgaatccttgtgaagctgaagagactgttgcagagaaagaacacgaaagctacgacatgacgacagctacccattcattgagctaaagcgaaggaaatagaggaaaggctcatcaaagcaatggagtaggatacggaactcaagcgtaacaagcaattgtaaagaaagggcaaaatggataggacactacaaggggggcaagaaagcaatggaaatgcagatggaactcaagctgaacaagctgtagtagagaaagaacaggaaagcaatgattaaacggctgcaaaccattgagctatgccggattagagagagggagagagatgaaaagcttatcaaaggaaagaggtagctacggatttaacgagtttggagcaaatgtaaagagcggcaacatttgacacgacaagatacaattctgcaaatgagagaacaatggaaggaggcagaactttttggttcacttttgatcctttgtttgctccattccttttttgttgtcttattatatttaatttttacagcaaggttaaccccattcttagttcagattttgatttttcctatctttgaattattttacgtgtttagcggttggtttttgttgtggtaatgctttcttctaccatttgttaaacaattatgatgcctgcatggtgagatagaatctgaggactcttgaattaaagtagaagcaggcaaaataatccattgaaaatgtttaaatatttaaaaagtagtcgtattgctgaatcgaatatattatatattgtatttgtgcatcataaatga

SEQ ID NO: 36704 - DNA, 191 bp, Glycine max
  Clone ID: PAT_MRT3847_133146C.1
aatcaagatgatgaaaggaaatgaaacgagtttttaattaaaaggtccttgtaaagaccaactgatgaagcactttttttaattaccccgatgaacatatctgaaactaattttgggtgcccaaccacaagtggggttaaaaaagagacacattaaacattaacaataaccatgtaccttcattatccggc

SEQ ID NO: 36705 - DNA, 924 bp, Glycine max
  Clone ID: PAT_MRT3847_133147C.1
caaatatacctttcctttcataattttgcatacatatataataaaaatctcatttttattggtgggctatctttgatctgagcattttacacttattggtggctttagtttctctacgtggtcctcgatagatttttagttgtgcctttatgtgtcgattatagccccaagcggcatatgaggtggatatcctttggtatatagttgaggttaatttcattgccactgcctacaaatcgaccaaatagcattgaccctgcattgaaaaggtctggtagatttgatagtgaaattgatattggtgttcctgatgaagttggaagacttgagtccttcggtacataccaaaaacatgaagctttcagatgcttgatctactcttcaatgcatcagggagaagatggatgtcattgatttggaagatgagagtattgatgctgaagtgctgaattctatggcagtttcaaatgagcatttccatactgctctgggaacaagcaatccatttgctttacgagaaactgttgttgaggtgcctaaggtcagcggggaggatattggaggccttgagaatgtcaagcgtgagctgcaagaggatgtggaaaaactttgttggccaaagcaattgctaatgaatgtcaagctaatttcatcagtgaggggcccagaattgctcactatgtggtttggtgaaagtgaagccaatgttcgagaaatttttgacaaggccagacaatcagctccatgtgtcctctttgatgagcttgattccattgctactcaggtctatttttgtacttcgcatccatgcaggccaggttgaattaaattatgaggctgggttgaaaggaattgtatgattttgttgccaaatctgtagatgatttaaggagataatgttacacgatgtttttcctagtgtca

SEQ ID NO: 36706 - DNA, 144 bp, Glycine max
  unsure (1)..(144): unsure at all n locations
  Clone ID: PAT_MRT3847_133148C.1
agcagctaggcggcggncggtgtttttttctgtttttatttttttagagatacactgacagtngtttaacagacgataaatctaaatgggantgtgtgtggaaaggacctttgcctatatatgctagccaaagcaatattaatt

SEQ ID NO: 36707 - DNA, 1232 bp, Glycine max
  Clone ID: PAT_MRT3847_133149C.1
agatgatcaaaggaacttgcaggtttcaccaccaagatgcaaaggcgaggaaagagtactacactcgcaaagtaagccgaaaagttgcttatctttccaattatactcttttttaagacccttctgctgattggagggatacacttgcattttccttggcacctcatccacccgaagctgaagaatttcctacagtttgtagatttatatagccccaagcggcatatgaggtggatatcctttggtatatagttgaggttaatttcactgccactgcctacaaatcgaccaaatagcattgaccctgcattgaaaaggtctggtagatttgatagtgaaattgatattggtgttcctgatgaagttggaagacttgaagtccttcgcgtacataccaaaaacatgaagctttcagatgctgtaaattcagcatgcttaacttccatttctgttgctactcttcaatgcatcagggagaagatggatgtcattgatttggaagatgagagtattgatgctgaagtactgaattctatggcagtttcaaatgagcatttccatactgctctgggaacaagcaatccatctgctttacgagaaattgttgttgaggtgcctaatgtcagctgggaggatattggaggccttgagaatgtcaagcgtgagctgcaagagactgttcaatatcctgtggagcacctagaaaaatttgagaagtttggtatgtcaccattaaaaggggttctcttctatggtcctccaggatgtggaaaaactttgttggccaaagcaattgctaatgaatgtcaagctaacttcatcagtgtaaggggcccagaattgctcactatgtggtttggtgaaagtgaagccaatgttcgagaaatttttgacaaggccaaacaatcagctccacgtgtcctcttctttgatgagcttgattccattgctactcaggtctatttttgtacttcgcatccatgcaggccaggttgaattaaattatgtggctgggttgaaaggaattgtatgattttgttgccaaatctgtagatgatttaaggagataatgttacacggtgtttttcctatgtctaagttggttttttctagaaatattctaaagtatcatcaacgcatgttgcgcgcacctgggaggctgagacaaactcatcaaaacattgtatctcaagagaatagtgcaccaccatttccttctcagtaggatttgg

SEQ ID NO: 36708 - DNA, 328 bp, Glycine max
  Clone ID: PAT_MRT3847_13314C.1
gagtttgagaaatcgaaagagagcaccatctgattgaaagaattcttctacaacgacatggactggtttggcctctaaagattgggcttcccctgacttgtgctatgattttacatcaccttatgatgtgtcaaaagattgatagtcgtgctactgcctctagaagaaaaacaatagggcttgagagacaatcatcttcatgtttggatgaaattgatggtgaagctactgatacattgacaacttatgctagagtcgtgaacataccatggaatgcagtagacgaggtcgctctaacggacgactttaacggagaaatctatgtgac

SEQ ID NO: 36709 - DNA, 289 bp, Glycine max
  Clone ID: PAT_MRT3847_133150C.1
aaacagcaaaatacaaaactgggatcaaaattcacattcttcataggagactctcgattaactcaaaaattaattgatcaaaggtgaaattaccgaggaacacttatgatacaaagtcctacaagaactgatttatataacccaccattacattaaaaaaaaaaaaaaaccttgctgtcctattgatgaacaaaacccaaacaatggccttgggcaggtaaaaattatgtatgacttgaaagacaaaaagagtctacttgacaaccataacctggattctttaacgtat

SEQ ID NO: 36710 - DNA, 179 bp, Glycine max
  Clone ID: PAT_MRT3847_133151C.1
ctcaaaaaaaaaaaaaattacgaaaacctaatacaacagaacctttttgatcacaaaacataactctatccgacgaagttcaatctccattcactgtgtgcaaatcaatacactaacaatttattagattaaacactaaaaacacttttccatcaaacctcaaattaaagcaccaaaaa

SEQ ID NO: 36711 - DNA, 300 bp, Glycine max
  unsure (1)..(300): unsure at all n locations
  Clone ID: PAT_MRT3847_133152C.1
cgctctgtttctgnctctgtgtttgcngctgaggattccgaacgancnaccttcttcgttttctcgcaaagttgaagtcatcatgggtaacgnaaagactcacatcaanattgtcgtcattgggacatttcgacnctggggaagtcaaanaancantggnncatttgatctaacnaannttgggagganttgaacaaagcgtgtgatttnanaggttcnanaaggangctgctgagatgatcaagaggtcattcaagtatgcctgggtgcttgacaagctcaaggctgagcggaaanagg

SEQ ID NO: 36712 - DNA, 617 bp, Glycine max
  Clone ID: PAT_MRT3847_133153C.1
aaaaagcgaagggtgggtcgagcaaaaattgttaggctctatgcagccaacaacgacattaactctgcccaccatctgttcgacaaaactcccaaccgaagtgtctacctttggaattccatgattcgagctttcgcgcagtcccaaagatttttcaatgcaatctctctgtttagaaccatgcttggggctgacataagtcctgatggtcacacctatgcttgtgttatacgtgcctgtgctaacaactttgatttcggcatgctaagacgtgttcatggaggtgctgtggctgcagggttaggaagggaccctgtttgttgcagtgcacttgtggctgcttattcaaaactaggccttgttcatgaagcgcgtagagtattcgatgggatcgctgaaccggacttagttttgtggaattcgttgatttctggatatgggggctttggtctgtgggatgtggggatgcagatgtttagcatgatgagactttttgggatgaagcctgatggatatacactggctgggttgcttgtgggtattgcggattctggaatgctgagcattggccaaggattgcattgcttgagccagaagagtgggcttgattctgattc

SEQ ID NO: 36713 - DNA, 474 bp, Glycine max
  unsure (1)..(474): unsure at all n locations
  Clone ID: PAT_MRT3847_133154C.1
ttgaaactgaattcacttcttcatcccgtttatggcctgtttgttttgcttgtgattatagtttagatgatttgacctcaaaaattggtaaaataacttcacctgttgcattgaagcagtgacctcgtgttgagcctaactactatatggttaaaaaataaaaaacacttctgggcttgattgggtctattttcgggctttaatcccaatattggaaaaattatgattcttggaagtaaccagtatgtgaaactagattatatattgtcatgacattggttctaaaaacnaacaacttggttgatattttatgatgctgtgtggggaatcaggtggcgataacatcttatagtgataggtctataactatttggatggatggatggatggatggatggatggatggatggatggatggatgtatgtatgtattttttttttcattcagaagtcaattntacacctgaaaaatgg

SEQ ID NO: 36714 - DNA, 556 bp, Glycine max
  Clone ID: PAT_MRT3847_133155C.1
acgagcctgggtcagccattctcttgggtgttgaagtactggttacagtttcaagaaaacatactctattcccaatggatgtgtggcatgtgggtcacttgttacatatccctgcagcactctttcagaacttctatcagcttagagttactaaagcttctggtccatcagagacattgatgatttcagatgagcatatttgtgatcaagtaaagagagtggatttctgtcacgtagatcaccagttcttagttaacctatttgaagtgtgttgtgaactattgtataccactattatgcatcgtccaagtgagtgcaaacagtgtgttgctcatcttgaagcttctgttgctgttcttcttaattgcttggagaaagttttagatgatgaatcaatgatgaataaagttttcttttcttcagaagatggagttgcatgtgcttcttctcttcgaagaatttatgaagagataaacaagcaaaaacatatctttggtcggcaatgttctctgtttttatccaattacatatgggtttattcaggatatggtgatcc

SEQ ID NO: 36715 - DNA, 385 bp, Glycine max
  Clone ID: PAT_MRT3847_133156C.1
gaaggtttcccgtcatcactgtatgacgtcctccttctttgggggggggggggggccggcaggtgacgccacttgaaaatgaggacgcctagcaacgatcggtacggggcgatcttacaatagtctagttggctgcggcaaaatatactgcgcacagtgagtagcagtacaaacaccaagaagtggtgccttagacgttgggtgttatggtatctccagatactaggctaggtggtattggaaaattaaccatggtgcgtgttgcggtgcgcggattagttgttagcgtatttaggtataggggttaatatacgtgtcgcatagcgacaaggttagaggggtgctggcaaggtggtaaaggtcacgatattagggttagtaatag

SEQ ID NO: 36716 - DNA, 117 bp, Glycine max
  Clone ID: PAT_MRT3847_133157C.1
gacgcgccctgtacagtaacaaaaagcccaacgcgcgtggagaggacgctcacgtataccgctccactgggcagttccttagcaccagttacatgggcaatatttcattgctcttta

SEQ ID NO: 36717 - DNA, 412 bp, Glycine max
  Clone ID: PAT_MRT3847_133158C.1
gacaacggcagcatcgtggaggaagcggtagaagacgaatttgccgccggttcactgggaagtaacagatcttggggtgcgaggagcagtcgaagaggatcgggaggggagatgggaagccatagagctaggtttggagagatcgagtctagaggtgctgccttgacaagaaagggccacgagctctacctctccctgctcgctcaagtcccttctatcccgaacgagaccaatgagtcccatcagtccgctctcaaagccgtattccaccaattcccagacgactggccgacaatccgagaacaaggcctcgcatactttcgctactttgtcaagattgatatggaagcttctgtcaccacaatcaagcctggtcaagctaccatgactacggctgatgtaagcgaattga

SEQ ID NO: 36718 - DNA, 432 bp, Glycine max
  Clone ID: PAT_MRT3847_133159C.1
tccaaggaaggtttcccgtcatcactgtatgacgtcctccttctttgggggggggggggggggggggggggggggggggggggggggggggggggggggggggggggggggccctttagaaagaggtgcccttgggaggaattagggtataaggctgaataaggattaggaaggtaatacggaccccctggtaataatttagttcccaatagggaaaaaacaaaccaaaaaacattggggcaaggcccccaataaaaagcccgggagagtataagtcccccgggccaagtgccttatttaaactgggaatgaatgaggccgcccaagttaaagaaatccatgaaccgttggataaaccgaagatttaggggggcctggtgtgattcccaaccgaggacgccgaaaggccaaaataggattggggtaaaaatg

SEQ ID NO: 36719 - DNA, 368 bp, Glycine max
  Clone ID: PAT_MRT3847_13315C.1
tccgtcccataacttccttgctttacctacccacgcgttttttttagccgcagacgcaggcggcgacaaggaaggttctatatcaagcgtccagtgtgattccaaggatgacccggtgtctgtgccactaatggtcgtggagaatggttgtggcagtacatgcattgacttaccggctggttcgctcggagcttgcagctgctgccaaggacgctgatctgttgatcttacagggcaatggggtggacactgcataccaacctgaatgcccgattaagtggacgctatgaatcttgaatgggtaagaatcagaggttggcagaaaatctatcaacggaaacatatacgactgcattttgcaaatattg

SEQ ID NO: 36720 - DNA, 165 bp, Glycine max
  Clone ID: PAT_MRT3847_133160C.1
agaaaaaaaatcaagaaaaaaaaaaaaaccgtcaaaactctcatctcaaaacgtcgatatatcaaaacgtatacctactgacatcctttcgccgcttgtcctcaggttcttgtcgaacttgtcttaaatgcaatataatggttctgcatttagataacacacatt

SEQ ID NO: 36721 - DNA, 1661 bp, Glycine max
  Clone ID: PAT_MRT3847_133161C.1
ctcagcaaattaaactaaaaggtgatccttcatcttcagctgccttatctgaaagtgaagagtcaggggtggctgatgttaaaccaaaagaaaagggtaggaaagcagaagagatagaccagaaatctggacaaaatgttcaaaaggtgtctaatatggtattgccaacaagaaagaataagcttgtttctggggaagaacatggagatggtgttcggaggcaagggaggacaggacgcaatcttgctgccacaaggtcaatgattccaatgacatctgagaagcttgggaatataggaactgcaaaacaacttagaagtgcaagactaggatctgataagaatgaaagcaaggcaggtcgtccaccatccaggaaactttctgatcgcaaggcctatgcacgtcaaaagcctgctattaatgcagcggcagatttttttgttgagtcagaagatggacatgaagagctgctggctgctgtaaagggtgttatcaactctgctcatgcattctccagccccttctggaggcagatggagcctttcttcagtttgataactgaggaggatattgcttattggaaacaaaaggtaaatcttgaatcaagcactctgacaccaactcccgttccttcaaatattgatggcgttgaaaccattgttaatggatatgggttaatgggatgtgaaagagatgctggatttgatgctcaatggaatgctggaattgttgcagaacagttacaactatctaagggagatcataatggaattcctttctgtcaaaggcttatatctgctttgatttcagaggagtgtagcagtgaaagtgaacatatcaagtttgatgcatgtgatactgaatctgagcctgaccgggaaccagaattgaatggtttggatcaccactcaggaacagattttcagtttgcttgtcattctgcttataatggtttcaggattttggacaagccagaacaggatgaaactgaaagggatatagttggtattcctccaactgggttgaattcaagctttgataaatccgtaaatggttttcttcatgataaagcaatgtctagcttcacctgttcagagttacaatatgatagcttggatataaatgataagcttctcttggagcttaaaagtattggaatttccccagcaccagtgcctgatatgttgcaaacagatgatgaaggaatatcagaggatattattaggttggaggagctttacctaggacagatttccaagaagaaaaacttgctatatggattgttcgaatctgcctcagtggataaagaacttcaagaaaaggattttgagcaacgtgctctagataaacttgttgtgatggcttatgagaaatacatggcttgttggggtcctagtccttctggtgggaaaaatacaagcaacaaaatggccaagcaagctgcactgggatttgtcaaacggacattggagcgatgccatcaatttaaagatactggcaagagctgcttcagtgatcccttattcaaggatatgttccttggctgatccctccaaccttatgcctcttccctttgtgtggaagcaagaacagcttccatgggttcactgcagagcccatcacagtttagtcagaatatggataatcatgatctcaattca

SEQ ID NO: 36722 - DNA, 428 bp, Glycine max
  Clone ID: PAT_MRT3847_133162C.1
acgagcaaaaccgggaaaatgcaaaatgggtggaaagaatcgatacatatgactgttaacaaaagggttttaaggaggcacggggaaaacccctccaaaaggaagctctaaaaattcaaaaagaaattgggggaaaaatagatcagaactatccctccattattgcctcgcttcccactgagaagaccttttaaaccgcggacggtcaaacccttaaaaagcctgtctataactggctgccccacactcctactgtgatccctcaatgctaaacaaagcatacctcttctctttatgataacctccaccacctcttattcctggcaccatttgttacttgacgtgaggcacaccctaacaacaagtggtgggaaacccttttgaccatttgaccctattttgcaccttgaaaacccaagcacttggtg

SEQ ID NO: 36723 - DNA, 233 bp, Glycine max
  unsure (1)..(233): unsure at all n locations
  Clone ID: PAT_MRT3847_133163C.1
tgcagcatcagcttgcattgcaatctatccttntctacatnagttgtcattagctttagctgcatantccatcattttcttcattagcatctggctttggcatgttggtgtnncttgctctttttggggaacaaggctttttccaggtttgggtggnctntatatnnngttcttttttctnggggggcgataagatggnnnccatcattcattcttgaatggcgttctatatc

SEQ ID NO: 36724 - DNA, 213 bp, Glycine max
  Clone ID: PAT_MRT3847_133164C.1
aaaaaccgaattttaattttatactagttgaaactaataggggggaggcatgggtgcaggggggggagaccattcaaacaaaaaaaaggaggtggtgatttacctcaagcgcaagacgactggaaagctttacggatacaacgaaatcaatcatagtgacaattacaagtgcaagtcaagggacctaacaaatcagtacaaaatgaagaaaaa

SEQ ID NO: 36725 - DNA, 213 bp, Glycine max
  Clone ID: PAT_MRT3847_133165C.1
cgttcgcatcaaagtgcctaagttcaacctggatttcaggatgtaaccttttaagcttattacgggcttggacccttcaccattccaaaagaaatggatgagggttgggcctgggttacatcaaaattgggccttgaggggaaccttgcttagttaggaaggcaaatgggaaaaataattcttttcggttttggtcccttggaattttatggt

SEQ ID NO: 36726 - DNA, 405 bp, Glycine max
  Clone ID: PAT_MRT3847_133166C.1
tttaaaagcgatggagtagcaattaaatattatttcaattttaaagagattgaatgttagtactgcatttatattgagagtgaggcttcatggaaaacaagaggagagcatgcttacacatacacagagcctgcctaactgatctactaccttgtaatcatcattcattgacaagaaaattaaaaatttctacagcaaaaaatataataaaaaatctaacttgccttttcaggttgtttcccactacattaacaagagaaatgaagagaaaggtacagggttcctttcaatactaaattccttcaacgccatgattctccatccttagcagaaactgatatatcttcaccttatccccatccctttccctccataccatttgttgccttgaagctcatttcctga

SEQ ID NO: 36727 - DNA, 376 bp, Glycine max
  Clone ID: PAT_MRT3847_133167C.1
ctttcttttattaccattactgatggtattgacaagacgtggtgcaactttgcaattgagaaagttagcagattgcgattttctcaagagaaactgtaagcagatgtctaatgctttggggggggctcctgaggacaaggcgactttatggtcacatcttcattatggttcacgtcataatctggaaatgcaggaagctcatgtgggcaatctcggcaatgtgcttcctgaatggcattcgctcagtccagatgcagctcgccaattgagaaggaaagccttctctcgaattgaatggcttcaaaaagctgaggtgcctaccataccacatattgaagagttccactcgacgcagaggatgatgaatgctcctgat

SEQ ID NO: 36728 - DNA, 807 bp, Glycine max
  Clone ID: PAT_MRT3847_133168C.1
aagacgacagaagggggttgataaattaagcaagtaaggttgggatggagggaactaatagtagcggtgataacgtgagtgcgggtgtggtgcagagtaggatgaggatgaaggtgatggtggctatagacgagagtgaaggaagcttctatgctcttaagtgggcccttgataacctcttcaccaccatggccactgtgggagaagcatcatcacctgaaaatgatggcatggtgttcttggttcatgttgagcccaaagttcacaactatgtgtatcccatcggacccggtggagcagccttttatcctgcaactgtagtagtggattcggtgaagaaagcacaacaagaacgatcagcagctattctctcacgggcattgaaaatgtgccatgataagctggtgaaaggagagagtattattcttcatggagacgcaagggaaatgatttgtgaagccgcagagcaaatgcaaattaatctcctagtcttgggtagccgtggccttggcacgctcaaaaggacatttcttggaagtgtaagcgactattgcgcacatcatgcaaaaacaccgatccttattgtgaaaccaccatcagagcatagcaaaatgcagtagcctcagtttttctgcttatgttttaagtacgcatcatctataataaagtgctggatttatgtagtttaacgtcttttatctctaaggaagactttttttagaagctcaacagagattagtttgatgcttatttgcactttttgtaatgatcaattataatatttataattttaaaagtttgaattta

SEQ ID NO: 36729 - DNA, 767 bp, Glycine max
  Clone ID: PAT_MRT3847_133169C.1
ttacgaattcgagctctgtacccggggatcctctagagtcgacctgcagtgagttggagaacctgtacttgcatcagaactctatctcaggctcaataccaagccaaattggagaactcggcaagcttaagagtctacttttgtggcagaacaatatcgtaggaacaatcccagaagagcttggaagctgcacagagatcgaagtcatagatttgtcagaaaatcttctcacaggtagcataccaaggagctttggcaacctttcaaatctccaagagcttcaactaagtgtcaatcagctctcaggtataatccctcctgagatttcaaattgtacttctctgaatcaactggaacttgacaacaatgctctctctggtgagattcctgatcttattggcaacttgaaagacttgactcttttctttgcatggaagaacaaattaacaggaaacatcccagatagtctttctgagtgccaagaacttgaggcaattgatctctcttacaacaacttgattggtccaattcccaaacaactatttgggttgaggaacctcaccaagcttctgcttctttttaatgatttatcaggctttataccacctgatataggaaactgcactagcctctacaggctgaggttgaatcacaatagactagcaggtagcattccaccagaaattggcaacttgaagagtttgaactttatggacatgagcagcaatcatctttcaggggagattcctccacgctatatggatgcc

SEQ ID NO: 36730 - DNA, 446 bp, Glycine max
  Clone ID: PAT_MRT3847_13316C.1
ccaaaagaaaaaaaacttttttttctgttttcagccggttttagggataataacctggaaatattggtttttttttttataaaaaccatccaccaaaggattccagggtcctggtaaaaaaaaaaaggaaaaaaaggccaaaaaggtaaaaaaaggcccctaaaccctaggccggatccccaactgggaaaaaaaacgggccccactaaacccgaagggctttaaatctctcagcccccaagggcctaggaccgtaaaaaacccctccccaatttttttaaaaagttcttaaaaggaggggggccatccagggcatcacataatacccgccctcagaagtcccttttggtttataaccctggacgacaatccacctagtgggaccctttgattaaggcgggggagcatcatcaaaaccctggatggcccttttaaaaaccccctta

SEQ ID NO: 36731 - DNA, 1610 bp, Glycine max
  Clone ID: PAT_MRT3847_133170C.1
cgaagctctaatgcggctcgagagaaaacccttccgacagactctttactctcgttcacagcatataaacagcaccgctttacaaatgacaccactattattgtgagatatgcttttctcacccttcctcactctcactttcttcctcctcttctcttcttccgttgctgagataccgcagcgacagaatctccataacggacttcggtggtgtcggcgaacggccattattcttcttccgaccatccccaagaatgcttttctcacccttcctcactctcactttcttcctcctcttctcttcttccgttgctgcgatttactcagcggcaacatgttctaacatagtgccgctgagataccgcagcgacagaatctccataacggacttcggtggtgtcggcgacggccgcacgctgaacacgaaagcgttcagagcggccgtgtaccgcattcagcacctgagaaggcgcggcggcacggtgctttagatggacttagtgatgtagtaattacaggtgagaatgggacaattgatgggcaaggagatgtgtggtggaacatgtggaggcagagaacacttcaatttacaagaccaaaccttgtagaatttgtgaattcgcaagatattattatttcaaatgtgattttcaagaattctcccttctggaatatacacccagtttattgtagcaatgttgtggttcgatatgtcacaattttggctcctcgtgactctcctaatactgatggaattgatccagattcaagttcaaatgtctgcatagaggactcatacatatctaccggagatgatcttgtggctgtaaagagtgggtgggatgagtatggtattgcgtacggtcgccctagctacggtatcaccatccggcgtgtaacagggtcatctccatttgccggtattgcaattggcagtgaaacctctggaggggtggagaatgtgctagcagaacacatcaacctcttcaacatgggagttggtatccacatcaagaccaacagtggcaggggagggcttatcaagaacataacagtggctcatgtgtatgtggagaatgcaaggcagggaataaaaattgcaggtgatgtaggggggcacccagatgaaaaatttaacccgaatgctctccctgttgtgaagggcatcacaattaagaatgtttggggagtgaaggttaaccaggcaggtttgatacatggattgagaaattcccccttcactgatgtttgtctgtctgatatcaattttcatggcatggaaggaccaagatctccctcttggaagtgttctgatgtgtttggatttgctcatcaggttagcccttggccatgttctcagctgagcagccaagagcctggatcatgtgctatttagatattttcactctcttcaagtattgtagtaattgagtgcttctttcattgatttcttatacttaaagccattgaatcaccactttagaattgtatgatatcatgtgaaattaaatttagtcaaacatgttgaggatcatgtgtcaaacatacattgtgagagccaatttatataaacaatttaattaagtacttatttaataagttctcttgtc

SEQ ID NO: 36732 - DNA, 691 bp, Glycine max
  Clone ID: PAT_MRT3847_133171C.1
gccaaacatgcttctcccacccttcctcactctcactttcctcctccttttcttcaatgcttccgtcgctgcgatttactcaacgacaacatgttccaacatagtgtcgctgagatatcgcagcgacagaatttccgtaacggactttggaggtgtcggcgacggccgcacgctgaacacgaaagcgttcagggcggccgtataccgcattcagcaccttagaaggcgcggtggcacggtgctttacgtgcctcccggggtgtacttaacggagagcttcaacctcactagccatatgaccctttatcttgctgctggtgccgttatcaaagccacgcaggagttggggaattggcctttaattgcacccttaccatcttatggaagaggatgggagctccctggaggccgagatatgagttctatccatgtagtggtatgtttggatttgctcatcaggttagcgcttggccatgttctcagctgagcagccaagagcctggatcatgtgccatttagagactttcactctcttcaagtgttgtagtaattgagtgcttctttcattgaattgtatgatatcgtatgaaagtaaatttagtcaaacatgttgaggatcatgtgccaaacacatgcattaattgtgagcgccaatatatatataagcaatttaattaagtacttatttatt

SEQ ID NO: 36733 - DNA, 507 bp, Glycine max
  Clone ID: PAT_MRT3847_133172C.1
ggccttcaaaacccaagctatacataacgggaaaacaggcgtggattacaaaccccggtttttttttactaattcaaaacaaacattcagtaaacagataccgaataagcaaaagggctccaaataaataaataaaacccccagatccccaaagctttaatatagccccccttcactaccaaagtttcatcttgcccccaaattttccaggctatggttttaagacttttttgcatttgctttcccaaaggatcaaatcagccagcagtctttgggggggtcatgcaacacctgaaccgagccttccaaacggggggaaagaacccattctttggattctcaagcattcccacaatttaaacaaaggggggcctgacatcaggggggggaccccagccttttggcatgatggcccggaaaaccgctaggcaatcgttagggatgattgggcaaacatttttggtgacaactgcaaatgcggcctgtactggtggcatgttctgaaag

SEQ ID NO: 36734 - DNA, 391 bp, Glycine max
  unsure (1)..(391): unsure at all n locations
  Clone ID: PAT_MRT3847_133173C.1
ggtcggccgacgcgtacacttattctttctttcaangatttcattataatttcacaaaataacaataacaactgtaacttgttcaactataaaattacgtgtcctacctttataaattacacactacaactattaaatcttaactttcatattctaaaccccacctgctcttaaaaaacttctaaaagcctcatctctttaaaatacttcaaaatacctcaaaccaataatattttcaatcctcactattaatcatattcttacaaatactcattataatctaccccactcttatttctcttttattcaattatttataacaattatatcctatcacttatgacatacattatttatttgtacttgatccttttatatccctgatcttatc

SEQ ID NO: 36735 - DNA, 250 bp, Glycine max
  Clone ID: PAT_MRT3847_133174C.1
aggaactatagagtgttgcacacacaaacaactcttcgacacaggctctgaggttatgaaagttgacatatacatggccctgtagcacgatatgttaataaatacactaattcttttaatatggaaggtggagacgagcactatatttttctaaataagtcgattggcagacacactaatggtgtagaattggataactatctataatgaaccaaaagtaagatgccatgatgctgtgtctcatgtgatg

SEQ ID NO: 36736 - DNA, 247 bp, Glycine max
  Clone ID: PAT_MRT3847_133175C.1
cgcatgcatgcatgtttttattttattgtatttttaatttctcacttcccagctatattctgtgatttattgttgattaagttgctcgcaaatggcgtgatcactatggttgaggcatttttcctttttaatgggttttgcgttggttttgttattagcatagcgtttttgtgttgctggcaatatgtgaagtggacggttgttttgatttttactgtttgtgtgtctggcagtttggtttgtctgt

SEQ ID NO: 36737 - DNA, 116 bp, Glycine max
  unsure (1)..(116): unsure at all n locations
  Clone ID: PAT_MRT3847_133176C.1
tcgttggtttcnancntgtttcgggtgtggagtnggtgatgggcggcgttcgcaagcaatcgggaattngnaggngaancnatggtgncatctgaacgatagtgtgttcgtctang

SEQ ID NO: 36738 - DNA, 277 bp, Glycine max
  unsure (1)..(277): unsure at all n locations
  Clone ID: PAT_MRT3847_133177C.1
attctagtattctactaatctaccatgagaacaatggagagttttncttttttgntagcatccnctagtactcatgctgtctgttttgcaggcaaattcacaaaattatccccaagaaaccaaactattcatctcttgcttttcagattattctcgatactcaaacttttcagtctcagaaatcatatacaccccacaaaaccccaaatcattcaactccatcttgaacttacacattcacaacaaaaggttcaaaacacaagccacatcgaagcct

SEQ ID NO: 36739 - DNA, 236 bp, Glycine max
  unsure (1)..(236): unsure at all n locations
  Clone ID: PAT_MRT3847_133178C.1
catgcgctgcgtggaggctactggnagctactgattgacatatccatctccgtattgggtgcgtactgtcgcagtgaggacctctgataatgcaaatgggtcctataagaatgtgatggtgggctcggtcaaagggatgatctgtggacaggagacccaatcggtgtcatgccaccaaagctagttgccttacatgctagactatatgcacatccggcccaaggatcgggtctacc

SEQ ID NO: 36740 - DNA, 802 bp, Glycine max
  Clone ID: PAT_MRT3847_133179C.1
aaaagttggaataaattactaacttgggggcaaaccctggcccaggggaaaagttgggccttggtgacttgttggtaatgggttctaatccggaaatagcctttttgtatatgcaagggtaagggtgcgtacaaaatccttccccaatacctttggataaagaaaaacctttgggcaaaggggtacaaagttttttaataaattataaacttggttttaactataaaaactggctatttggacaacttttggactatagaaacttgcctgaaataaaaaataaattgtcccctggagacagcataactgatggtaagtttggagtcccaacaacacaacaataaagccgtttgaaaatttcaagccatctaactattggccaaagagtatggactccttaaattaataaatgaccttttgccctacctaccacggttgtccacaaatttggatacaggttaatgaatagccttttttgtagaacatcaaatcctatttgccaactctagtgcaacttaatttttgagagcaaactaagttttagtgcaaaatgctgaaaaaagttagcagttgatttctaagcatttgccttatcagccttaacaaattaatgacagagagtgtcattcaactgcaatcaagcgctccctacattccctgcaaagtatatttagaaacaactagccagtgcacaaactaaaaatcctcaccatgcacatataaactatattgaaatattgaagatacctaaactgtacagctattgatatgatggattcatcaataggcacctctagaacag

SEQ ID NO: 36741 - DNA, 119 bp, Glycine max
  unsure (1)..(119): unsure at all n locations
  Clone ID: PAT_MRT3847_13317C.1
gttttgtttttntgctctaattcacaattcccttcatgcttaatggcgtaattatgggtactagaatgacttgcgagattcactttattaataaacatgcttaacatagtatgtttata

SEQ ID NO: 36742 - DNA, 500 bp, Glycine max
  Clone ID: PAT_MRT3847_133180C.1
cgagttttttttttttttttttatttaaagatatcaaatctaataccacttaaataaataaattacatgttaatataacacgtattaatttgtgatgagatcataatataaataaagcaagcatatgccttgtaagttgggaattcttcttagtttctgaaagttaaggaattaaaatgtaccaaaagacagcttctctgcaagatccattcgactaactacgtgtaatggtactgcaaaagcaggcttaatgcatttaatggcttttactctactagcattttcctccaaggtgtcatcccgctagaattcaagagcgtgcaaccccaaaaaaaagaagaaaaagggccgttagtcagaacacgatgtttactctacaaaaggatgtaggtgtagttaaataaaaatatcatatgagaacaagaattatgcatattgattaagcaaactattaacaaaattctacaaaacaaaagcatactgataggttgctattaagt

SEQ ID NO: 36743 - DNA, 768 bp, Glycine max
  unsure (1)..(768): unsure at all n locations
  Clone ID: PAT_MRT3847_133181C.1
ggaattttagggtggggagaggaaaagaggcgcacgtttatgctgcgtttgcaagaaatcaagagcttcggtgaagaggccgaaaaccctagagcagatatgcagggagtgcttctacgatgcttttgagtctgagatccatcaggtaattcttgagaatcagctcttcagccctggtgaacgcgtcgcaatcggcgcttctggcggaaaggattccaccgtccttgcctacgtcctctccaagctcaaccgcctccacaattacggcctccatctcttcctcctctccgtcgacgagggcatcaccggctaccgcgacgactctctggaaactgttcaccggaaccagattcagtacgggctccctctcaaagttgtatcttacaaggacctctacggatggactatggacgagatcgtgcgagtgattggtttgaaaaacaattgcactttctgcggcgtcttccgtcgacaggcccttgaccgaggtgcttctctcttgaaagtggacaaagtcgttactgggcacaatgccgatgatattgccgagaccgtcctcctcaacctcctccgaggagatgttgcccgattgagtagatgcacctctataaccaccggcatttactctcctaatgcatatcgaggttttgctcgcgagttcatcanagatttggagagaatcagacctagggccattctggacatcatcaaatcaggggagaatttcaggatttctactagtaccaagatgccagagcagggaacatg

SEQ ID NO: 36744 - DNA, 1738 bp, Glycine max
  Clone ID: PAT_MRT3847_133182C.1
gagaagtttcattagtgcttgatcgtatttaagatattaatctttcgcttacattaccaagcgatttaagttagttttcccaagtaatttttagtttcagttaaatgtaaatatttataatttcatatgagaaaaaatgatttcaattgaatatgtgaaactgtgattaggataatttgttttgaactatgaactaaaattaatatatttttttttctgataaaatacagaaggggtggagaggagaagtaaaccctagagtagagaatggaaggtgagggtggggagaggaaaagaggcgcacgtttatgctgcgtgtgcaagaaatcaagagcttcggtgaagaggccgaaaaccctagagcagatatgcagggagtgcttctacgatgcttttgagtctgagatccatcaggtaattcttgagaatcagctcttcagccctggtgaacgcgtcgcaatcggcgcttctggcggaaaggattccaccgtccttgcctacgtcctctccaagctcaaccgcctccacaattacggcctccatctcttcctcctctccgtcgacgagggcatcaccggctaccgcgacgactctctggaaactgttcaccggaaccagattcagtacgggctccctctcaaagttgtatcttacaaggacctctacggatggactatggacgagatcgtgcgagtgattggtttgaaaaacaattgcactttctgcggcgtcttccgtcgacaggcccttgaccgaggtgcttctctcttgaaagtggacaaagtcgttactgggcacaatgccgatgatattgccgagaccgtcctcctcaacctcctccgaggagatgttgccagattgagtagatgcacctctataaccaccggtgaggatggccccattccccgatgcaaacctttcaagtatacttacgagaaggagattgtcatgtatgcttatttcaagaagctcgattacttttccaccgaatgcatttactctcctaatgcatatcgaggttttgctcgcgagttcatcaaagatttggagagaatcagacctagggccattctggacatcatcaaatcaggggagaatttcaggatttctactagtaccaagatgccagagcagggaacatgcgaacgctgcggttatatttctagtcagaaatggtgtaaagcttgtgttctgcttgatggactgaatagaggtttgcctaaactggggattggacgaagtcgtggcagtgttgcttctgataatggaaatgaaagtaaagtagaaaagagcatccagggcaaacaatgtacaactctagacttctgatttcccacatcacacctatcagcgagacgaggcttcctgttcctgaaattcagggtttaaagaaaagttgcactgtttccagattattactagtcaatttaatcatatatctttagctttatttctgtgggcaacggtcatgttgtcatttgtacaccaagtcggcttctcataatcaatggatactaatgctctggtggagagaaagtgagcgaagaaaaaaaaaaatagaaggaaataaatatttgaaattttgtggttgaaagttaacctttcttttctcactttttttctaatcaaacaaaagaaaatattgtcatccatattttcctttgtctacttgtttcagtaacacccgaattctaagtattaggagaagactgctttttaacaccatgttatttatatt

SEQ ID NO: 36745 - DNA, 349 bp, Glycine max
  Clone ID: PAT_MRT3847_133183C.1
gcggcccgcctggaaactttcactaggtttttggttgaaaaccaaatttggggctttgcatcgcaagatttaccctttccaatcaaaattcttctgccttcccctaccaattctttctctcaaccgattaggaagtttctctctcaaatttcttatttcgttatcaatccatgttaattaattaccctatcacctccttaatattcctgagaccagatctgcatatggacctgttcttctttagataaaatatttaaatgtctgcatccgctttctagttccactaattgctacaaacaatccctacatgcatacgtcgataatccgattgctgttaaaacactccggt

SEQ ID NO: 36746 - DNA, 478 bp, Glycine max
  Clone ID: PAT_MRT3847_133184C.1
taaacaattaattttaattaaaaaatggtccaacaatacaaattgtattattttgacctgcgtggtttgggtgaacccatccgccttttgcttcactatgttggccaaccatttgaggacatccggtttaaagacatggaagaatgggagaaaacgtacaaacccaaatttttctacggaaaggccccagttttggaggttgacggaaagccattggcacaaagttcggcaattttgcgctaccttgccgaaaaatttgacttggccggcaaagatgaatgggaaaaggcgaaggctaacgaaatcattgactttctgaaggatgctaccactgatttgctcccgtatttgatggtcaaaatgggacgccaagaaggcgatttggacaaattgcgtggcgaagtgttcgagccgggagtcaagcgcatttttccactatttgagaaacttttgaaggagtaccggtcagggtacatgc

SEQ ID NO: 36747 - DNA, 353 bp, Glycine max
  Clone ID: PAT_MRT3847_133185C.1
aattattaaaataatactgggtgcatttgaaagagctagacaatgttgccaaaaaagaattaaaatgagcaaacgcactaaatcaagagatcatcctgaaacgacaacacaaataattgttattgtcttatgtagtattttctattaattttaggtaagaagagggagttaatatttgaggatcaaattttcccagtcctgatagtcatgcaattatgatacgcagtttgagctgtttcacttttttgtctgatatcttcatacaacttcaatgatgccttagcaaatttagtgagttggtgaacaagtttggttaaacttgcatgtatgcaacacaaatgtgaagaatcggc

SEQ ID NO: 36748 - DNA, 481 bp, Glycine max
  Clone ID: PAT_MRT3847_133186C.1
atatgagatacactgagcatcgtctagctatctcgatcgaactgtccaaggtcctgtcacattcggcgtggtgtatggtcgtaaaattaattaaattttgttttaaggtgtaacttaattagcgtggttggtaacactaacgattaacagcaatgtaggcttaacgtggtggataggcctattttaccaacccgagttggctgctgcagcaacgtaatgcgcgataaggccgtaacgtcaggccgttagtaggaagcgtcacaagcggcaactaaagacgtggcgtgtggtcgcaatgttgaggtattatattccgcgtggggcacgcttgtacgccgcgcagtggcgggcaccaaatttgagattaaaacatcgtggtaccaaaatttggtcgcacggcagcaaccaaccaacacggtgtttccgagtaaccggcataaccgtatacgacactggctaccaatgaaccccacatgatgat

SEQ ID NO: 36749 - DNA, 356 bp, Glycine max
  unsure (1)..(356): unsure at all n locations
  Clone ID: PAT_MRT3847_133187C.1
gttacagtggctgtagacgagtacagtccctatctaaacaaatgtaattggaggacgcagttccttgtattcagctgtgcaatccgctctctttctgcaatttccaacttagcctatagcttgattagttaattgttgcccaatggtctctattctttttattttttttggggtgcagaaagattgagagtgctggtattttaaagatttttttgggaggtcataatcaccctcaagtttcactgaagcatttgttcatcataactgctttttgttatactgaaactaaagcagtctgtatagtgaaaagctgtatcgaagtctgagctgacattgnccttattatgattattgaa

SEQ ID NO: 36750 - DNA, 372 bp, Glycine max
  Clone ID: PAT_MRT3847_133188C.1
ccacgcgtccggtttttggtgtaaaaaacaaagccaaatattatttaggtttaggtatttgaagtataagattctctaaactaaaatagcttaatctaaacaagtacaccttgggaaataatgaagttctttgccgtgatcaattgtgataattacacattgcttcacaatctcacagaataaatggaattatagcaaagcgactacttggttctctacgacattcaagacaagcagatgaatatgtaattcctcatggtgattggtttgaaattgtctcctctccacattatctgtctgaaatcggtatatacgctagttttgcggtagctactggaggatccaacctaacaatcagcctgctttcaggtt

SEQ ID NO: 36751 - DNA, 149 bp, Glycine max
  unsure (1)..(149): unsure at all n locations
  Clone ID: PAT_MRT3847_133189C.1
agnggctcagaaattcctataacaaatggcttgagattcaattaataaattggcctttattacgaagctcacctttactctaagatgttactgcttctaaaagggaatgggaaaaccaatttaaacccttcattacctttaatttgggc

SEQ ID NO: 36752 - DNA, 261 bp, Glycine max
  Clone ID: PAT_MRT3847_13318C.1
aggtaatgcaataccccactttcacacaacatataaaaccaaaaaagaggcggagtctgagctgccaccggagacttaactctgctcatgagatgggtcagtgaaagttggcaactgtcggtgacgcaattcttattgcttcgtggctctatgttgcatcagctagttgctttgtggaactgagttggtgcccctgaatcagtcagtgtggtgagaaaattgtgggatatgtttacaacaacaacaacaacaacaacgcct

SEQ ID NO: 36753 - DNA, 271 bp, Glycine max
  Clone ID: PAT_MRT3847_133190C.1
gcaaatctcaactatgctgagtctaacagagtctccatattaacagtggacaaattttcaagaaggatggttcttcagtttatgggaattaatcacatgttatgttatgcttctcctgctttggctgcaccaattatgccagacatgaaggaacctgaagtcatacgcatgtaggactttgaagctacctagtggagtgagagttcaagatattgtagaaggggaaggaccagaagcacacgatggagatttggttacattcaattgtgta

SEQ ID NO: 36754 - DNA, 366 bp, Glycine max
  Clone ID: PAT_MRT3847_133191C.1
gggtaacaagcgcctctccggaaaaaattttttttgttcccaagtgggaatttgggagggacaaaagggtaggtcagaacggtcaagacttatttcggggttgcttaaacaatagaaattaacttatccttttttatcaaacactttgggggtgggtttgggctaaaaagcaacaaggaaggggcatggtttcaagcaaaaaaaatagatttggggatttttacaaccttcattaagggattaataaaactttaagatttgcaaagcccgccttggatagcaaggccaagtgcctgatggggggggggaatcagggggggcaattttaaatttgccataggggaaggttcaggggctttttcccgc

SEQ ID NO: 36755 - DNA, 439 bp, Glycine max
  Clone ID: PAT_MRT3847_133192C.1
aacccttgggctgatgtatgtgcttgtttatgtgcttgcatggtcgtgagaagatgatagaccgggacctagaactagaacaagacgaacaagaaacgaaaaaaaaaaatctcggtccattatacccgagcccgagtccggcctcctaaacgagacttttcctcgccggacctattggaacatccgcgtcctccgccccttctctcgtccgtcgccgtagcctcctcatatacgggagcccggaaatggagaaaatccccgttaccacaaaattagatggaccgtccggcaatcatatagacgacactaagagaataaccgcagaacacggccctagaaccccaaaggaaaagaccgcctaatctgacgagggtatcgcgaaaagcccccacgtcgagtatctccctaaaagtcctcccctaagttccacaaaacatac

SEQ ID NO: 36756 - DNA, 360 bp, Glycine max
  Clone ID: PAT_MRT3847_133193C.1
atcatgatctatcatttgcccatgtcatttatttactataataaaagttacttttggcttgctttgtctcgtgtttttcttgaagtgtcttttttctattattcatcaataatttcacctgttaattgttaggcggtgattcatgattcatggacactgttatttgccttatatatcctttttcaacattgattatattcttctctgtttatcacatttatacttttgtcactttctctccctagacgtaaatattgaatggtccatcgtccatgcaacatttttcttaatagtttttttttttaattttagaaaatggttgctaaatatatttttttacttaaaatatttcttgagcac

SEQ ID NO: 36757 - DNA, 488 bp, Glycine max
  unsure (1)..(488): unsure at all n locations
  Clone ID: PAT_MRT3847_133194C.1
gcgcggacgcgctggccaacccaatcttcaccggcgcccacaacaaatcccattcctgcatctcctgcttcagcatcgctgcaaactttactttccatttttgtacttcctccccgagaaaaaatggcgaacgcagcatagggtatggacgaccacgacgactggagcctacagtggctgatacacgggggggggggcagaactttttttttttccanngacganctcatatacttcgcaaatgcatgtggagcagtccgtttaagggaagcctgcattaattttaaggaattatggaagaagaagcatgcagatgatctttggataaaagaaggagctgctatgcaggcaagcttaccaccagcactctcattggctggatcatcaggagatattctggcgaatgatgtaaccacccatatttgctgtaaagacagcattgcttgtggggacggaaatgggtgtgtgggaacatggggattctactt

SEQ ID NO: 36758 - DNA, 2807 bp, Glycine max
  Clone ID: PAT_MRT3847_133195C.1
ccacgcgtccgactggtcactctctttggttcctttcccctttttccctcttccttctttcgctacgtctcgggtcactccccactctacactgcgtatatttatacgtatctctacgccccaccggccaatggcggactccgacctctcctcccccctcctctcctcccccgaccacatcgtcgtcaccgtccacccctccgccgcgccatccgccaccggcaaccccttcatcgccctcggctgcgacgacgacgacttctccgtgccgccaccgtccaccctggacccgttccgcaaccgcacgccggcgatcgaggggctctacgagtgggccaagacggcgctgtgcctgccgctggcggcgctgcggctcgcgatcttcgggctctgcctcgcggtggggtacgtggcgacgaaggtggcgctggcagggtggaaggacaaggagaatcctatgcccaagtggaggtgtagggttatgtggatcacgcgcttgtgcgccagatgtattctcttctcctttggctatcagtggataaaacggaaaggaaaacctgcaccaagggaaattgctccaataattggatctaaccatgtttcttacattgagcctatcttctatttctatgaattatttcccaccattgtggcgtccgcccacgcgtccggttttcaggtcatatatgttaacagattcttaccatcatcaaggaagcaggctgttagggaaataaagaaatctgctttcaaggaactgaataacagagaagggcctcttgtgataaatttcctcgagtactattatttcccgagggaacaacaactaatggcaggaaccttatctccttccaacttggtgcatttatccctggatacccaatccagcctgtaattatacgctatcctcatgtacactttgaccaatcctggggtaatgtttctttgggaaagcttatgttcagaatgttcactcaatttcacaacttttttgaggtagaatatcttcctgtcatttatcccctggatgataaggaaactgctgtacattttcgggagaggactagccgtgctatcgcaactgcactgaatgctgtccagacaggacattcttatggagacataatgcttcatatgaaagcacaagaagcaaaacaggagaacccctcaagttttatggttgaaatgaccaaggtggaatcattatttcatatcagcagcacggaagctgtggactttctggataaattcttggccatgaatcctgatcccagtggtcgtgttcaatatcatgacttcttgagggttttaagacttaaggcttgcccactatctgcaaagatattttcattcattgatgtggagaagagtgggacaattacgttcagacagttcttgtatggatctgcccatgtaatgtcacaacctgagttcgatcaatcctgataaatttccttgactactattatttccccagggaacaacaactaatggcaggaaccttatctccttccaacctggtgcacttatccctggatacccaatccagcctgtaattagacgttatcctcatgtgcactttgaccaattggaagaattgacaagaatgactttctttcatgccttagaagaaatcctcttctcatagcattttttacacctcagccacagcaaaaagaatttgaaggtaatggagtgatagaaatagtgtgatggatggatttcacattcaggtcttttgtggactacaaagaaaagaaatgggtagggattcctggggaatacatacagtataggatgcagtggcctcattttttttttttttccttttctcttttaatttttttaccttgctctgattaattactcgtaaagcataactatttggtgaagatctgtgccatccatcctgcttcatttgatgttttttgttagctaggtcagttttgcacagctagatgtcagttacctggatgttgtgatcacaccgatccaacatttgagttttggttcagggaccatgctgacatttagggtccatgtggttcatgtaaagtttgaaccaacgtgtcaatttgtaacaaacattataactgtattttttttcaaagatgtgaacatgaagaaagtaatgtaatttatttggattttttagtatcatgaaggaatggtttgttgcttttggagtgagggagaggtccatgagctttttatggtatttgacaatgataatgatggaagaattgaccagaatgactttctttcatgccttagaaaaactcctcttctcatagcattttttacacttcaactgcagcaaaaggaatttgaaggtaatggagtgatagaaatagtgtgatgggtggatttcgcatttgataaaatactctggctttttaggtcttttgtgtactagaaagaaaagaaatgggtagggatacctggggaatacatacagtataggatgcagtggcctcatttttttttttccttttctttttttcattttttttcccttgctttgattaatttctcgtaactatttggtcaagatctgtgccatccatcctgcttcattttatatttttagctaggtcagttttgcatagttggatgtcagttacctgggcggtgttcaccccgatccaacagcttgagttttggttcagggaccatgctgacatttagggtcaatgtggttcatgtaaagtttgaaccaacgtgtcaatttgtaacaaacattataactgtattttttcaaaagatgtgaacacgaagaaagtaatgtaattattgggatttttagt

SEQ ID NO: 36759 - DNA, 272 bp, Glycine max
  Clone ID: PAT_MRT3847_133196C.1
gcaatccaacatgtcgctacctttccaccagcagtctgtcccgagacatcctacacgtcacggatccaaggtcctatcgcaatcggaaggaagcgatccatgggtccattcgcgcctgcgaggacaagaagaaacaacgcggagttaaaaatttcccgggtgacacgcgcaatgctccccgccaagaacagcaatccgccgggctcggaaacctccctcacattatgaagcacgccgtgtccctcgtcctcgggcacgtcctccgccccaag

SEQ ID NO: 36760 - DNA, 2496 bp, Glycine max
  Clone ID: PAT_MRT3847_133197C.1
caaagtgtgtgtgtgcaagagtcattggatgatgatcagtctaacattgctgctgcatggtgctaatgttttgcaaggctcgagattagatcttttagatgggaaaaatgtctgtgaagctctggtggcagaatcaccttccaatcaagccactaatggaagccatggggttgatttccagtgtgctgatgaggttgtcaaaacagctgacatagttaaacaaactgacttagattttgaaactatggaagtgtctgcaaatgctgatgatgcagccaaagatgttaataatggtggtaatccagggagaattatagttctgtctcgagctactagttcttcatctcctggtaaaactaggcccatttcaggcaggtcactgtcgtctcgagctggaagagatgtattgtctgactcacttgatggggataaattacacagaggaagagatgaagttttcattgatggccctcacaaattttctagagaaagacatcaagatatctcccctagaaactctagatttaactttgtgcgaggtagaggaagacttaatagtcgattagactcagttcgtagtgaatgggaatctgaccgtgaattttctggtgagttttacaatggtccaagtcagtttcgtgggcccaggcctaagtatgcacctgcttttgccgataccgatatggagtacaataatgttgcacctgatgggtcatatgttggtaatggtcgattaggcagaaagccattgaatgatggttcttacattgcaccgaggaggcgttcaccaggaggaagagatggcatccaaattggtcatagaaatccaagaaacattagtccaaatagatgtattggagatggttcagacttggttggagtgaggcataatgataaatttatgagaggcttgcctgaggataatatggatgctatgttcacccggtcccaaacatttgagggaatggatggtcggtttacgagagggagtaggaatttttcttccatgcagagaaggggtcctcctcgaattcgttccaagtcacccatcagatctaggagtcgctcacccggtccatggtcatctccaagaagaaggtcgcctagaagaagatcccctgatggttttggtggacatccagaactatcccatagaagatcaccattttacagggttgacagaatgaggtcccctgatcgtcctgttttccctgcggagagagtggtgaggaggcatggctccccctcttttatgtcaagaccttctaatgatatgagggacattgattctgcaagggaccatggtcatccgaggtctggtcgaattttaatcagaaataggaggtttgatgtagtagatccacgggaccgtgcggaaaatgatgatgaatactttggggggcccatgcattctggtaggttacttgagcttagtggtgaaggaaatggtgaggataggagaaggtttggtgagagacgaggacctgtgcgttctttcaggcctccctataataacaatgttggtgagaattttcaccttaatgctgaagacggacctagacattatagattctgttcagatgattcagattttcatgaaagaggaggcaacaacataagggaaagggactttgacagaagaatcaagggccggccagctaatgtgccacctagaagaacaagaaatatggatgaacaagaagagaatttcaggcatggtggtggtggtggtggacaggtttggagtgatgacagttttgatgatatttcacgggtgaagaggaaaagattttgatttccctctaatcttttatctatataaagcctcctggggaatgttggaggattatggaattcatatttgcaggtttttcacctacagaattagattagatttataataatattagtgctccttttccttactacctacctagctttagtttttaagcccattgaagtaatgattgtaaaagcatgcatcaagtgtggccaagattgtaggggaagatgtaattggggaatgaaggtcgctgaacgaatgatggagagtggtgatgtgcatgcgagggaaacaaatggcattttcgtttttaataatttaatggaacgaagttattggttctttggactttccttttcctaccagcaacggattattcagtccgctaaaatgatatttacatagacatcaaggcaaataaagcatatctattggaagtactaactaaaatactgtaagaagggtataaaaataacattagctggagtagtaaaatctatcaattattgtgtgttctggcgtgtgaagatgataccgacttttaattcatagtcaatgggggaagccagccacaatgttgttttccagccgtccaggaggacttattaataacagcgcaagttccatgctagtttttaaattatgtttacattacttgtcaattctcaagagattttaaaaattaattatgatgatcaaagctaatttgaaat

SEQ ID NO: 36761 - DNA, 1469 bp, Glycine max
  Clone ID: PAT_MRT3847_133198C.1
ggctcgaggcgattaattatagtttaggcagctttattatggattcccatgatgaggagcatgctgccaaactacttagagctcaaacccacatatggaatcacatatttagcttcataaactccatgtcccttaaatgtgtggttgacttaggcataccagatatcatacacaactatggccaacccatgccactctcaaacctcattgcttcactaccaatccacccatccaaaacttgctttgtccatcgcttgatgcgaatcatgatccattctggcttcttctctcaacaaaatcatgacatggagaatcagctagatgccaagtatgtgcttaccgatgcatctgtactattgcttaagaaccatccgatgagtgtgacacctttcttgcatgccatgcttgatccgtctttgacaaatccatggaatcaattttctactgtggttcaaaaatggtgacactacaccatttgaaacggcacatgggatgatgctttgggattacgctggcgctgatccaaaacataataactagcatactgatgctcatcccctgccagctatagagcagcttcggccacatcgtttggcacaagatgaacaccttttaggtttgaataaatctcaccatttcggtcttcatcaagattgaaacatttcttagtcaatggtgtggcaaccacataaggggacaagcaatttaccctaataccaaactgtccaagctccaccgcagtgtttttcatcagtccaattagtgcgtgctttgaacttgtgtaggcatgtgaagcccctccactaaaggttccagcaacactagcagtgttaattatgcttccccttttagcaggaatcataaccctagcagcgtgctttgttcccagaaaaggaccaaccaagttcacacttatcactctctcaaaatcaaacttgctgttgtcaagtatgcttgtttttatctcatcaattatgccagcattattaaacatgatatctagattgccatacttggaaatcgctgtgttaacggcgttttgaacgtcgttttcgtttgtgacatcgcaatggacataggaagcggattccaagtgtttgcaaagagagagacccaaatcgtcttgaatatcagctatcacaacgtgtgctccatgcttagagaagagtcttgcagtggcctcacctataccgctagcaccaccactgataagagccactttcccttcaagccttataaatatttgggtatgacatgttaggttagcaagaagacagctgtcacagttctataattttatctaagacaattggtatttgttaacgtatataatcctttattttagtatgaatgcattagataaaatttgttaagctactcatactaaaaaagaaatgtgtatgtaacaaatattagtttatttatttttagtatgaatgtgctcgagccgaattccgagcttacgtcgc

SEQ ID NO: 36762 - DNA, 222 bp, Glycine max
  Clone ID: PAT_MRT3847_133199C.1
gcgccctttttttttttttttttttttttttttttttttttttttccacccaaaaaaataaaagggcaatgcatcacacaaaaaattgttactttgttaatccaaatttctagttaacaaaataactggcctcatccataattgaaaaacaaactcccattgaaatctttaaacaaaaacgtgtatccctacaaaatttatccctccttctttgatggcccc

SEQ ID NO: 36763 - DNA, 440 bp, Glycine max
  Clone ID: PAT_MRT3847_13319C.1
agaacatcattatttatttatttatttatttatttatagctcttaacacatataattccctggatacaacatgtatactggtcatattcaactctagagagctttatctgatatgatcatccttaacatattcaaagatagctaaatacttaactgtataatatatcacacaaacgtagagtgacatatatagagtaaataataaatataagtttaatttatatatatatatatatcccacactttaattataagaaggcttaattaattaacaagttggaaagggaatcccacaagaagcaacggtttttcgggcattaggagagttaacatactgcttcaagctagcgtttttgaggtagccacataagcatggtttttgctgcttcagcttcgtgcaacaagcattggaaggtttagcaccggaagtgattgctgga

SEQ ID NO: 36764 - DNA, 752 bp, Glycine max
  unsure (1)..(752): unsure at all n locations
  Clone ID: PAT_MRT3847_1331C.1
caaaaacctttgtgtccgttcaactttttgcaccacgcagttctcgacacaaaggtgttgttggttcctcaaaaccaacacaaccaatcaaagaaactaaaagccatggcatgttcttcattcacatttgccaatccatcatcaattccaagaccgagaaattcattactttcttcttctctaagcccgagagccatggccaaagagctttacttcaaccacgacggttcggccatgaagaagctgttggcaggagtggacatggtggctgagctgcttggtgtgacattgggtccaaaggggagaaatgttgtgctgccaaataagtatggaccacccaagattgtaaatgatggagaaactgttctcaaagaggtgttttttttcttattattcattcatcatcaaccatttgcttcttcccttttgttgatgttcttttttttgtaatgtgttattagttttaaggttatggataagtgacaattgtcaattgacaaatttatgccttgtttattgattactgttttgaaaaatagttctttgttttctataccgataagaggtggctcctagaagatgatattgttgatcaatcattccctaagaacttggacaaaaaagcatttggagaaaacacaggaagagaatgggaaaacatttcccagattttttagtattttggtttttaaagcgcttgttttgaaacaaatttcaaacatgatggatgntgggtgagaaaatgattgctg

SEQ ID NO: 36765 - DNA, 260 bp, Glycine max
  Clone ID: PAT_MRT3847_133200C.1
ggaacgagcaagactgagagagagtggtaccaagaagagagcggagagagagggagagggtgcgagataggaaggacccatgtttgaatatcgtcggacaaaggataggagaccaacaacgctacatgcgagctaattggagagatcaccggaatatctcctcattttatttcactcgtttctctgaagacacaacggaggaggagctttggcagcatttcaagaaagcgggcaatgttagggagatttttatttcaaag

SEQ ID NO: 36766 - DNA, 480 bp, Glycine max
  unsure (1)..(480): unsure at all n locations
  Clone ID: PAT_MRT3847_133201C.1
caaaagggattataatcattttgggaggttggaaaaaggatctgtccaaaagaaacgaaaagttttttatcaacgctaaataacagcccctaaaaatctcaatagtggggggttttaatgcaatcccatgttccagttttttactacataaaaaaaaagggacttttgatcaaacaaagttccttgtcacggaaaaaaacattttttactttcctaacagggactatggaaaacagggcaaggctaccaatttattcacggaaactttgagctgcacaaaatagtttccagttttacaacaacaaaacataaatttaaatcccaatttccccactcccatcccttttaagaactgtcctgcgcggagtcagcagcatcaggatgccgaaaatatattctaacagtcctgcgaacaggtttattattcccccctccgcttccacggccgtttccaccaccaccgtngccgttcccaccagt

SEQ ID NO: 36767 - DNA, 398 bp, Glycine max
  Clone ID: PAT_MRT3847_133202C.1
taaaacgggacacaactttagtgtgtcaaagttgtgaatcaacaccatactgtcatggaaatggactcggtttggcacaatgcattacctgagtaaggggcaaatgatattcgtgtgttcgcgactatagctagatcctgatggtattgatctaccaatgcaatgttattgagcagagatgtgcagaaatagataacacagtctctagcggtgagtgatgaaaatactgatgcgtgaaagtgacgcaacctgctgatggctagattgtcaaggatggcaatgtgcaagaaagatgtttggagagttgaatgtggaataccttctggatttccgctcacagttatgtgcaatagcattgttaatgagatgctcattagatatagctctgaaaaattact

SEQ ID NO: 36768 - DNA, 459 bp, Glycine max
  Clone ID: PAT_MRT3847_133203C.1
atgcaccttattgaatggaccctttcaatgttgcgtgaagtatggtatgggcatggagtattgaaatttgacgtcttcgtgttcaacgcacttgttctcatcaattgtatgtgtagtaagtattcttttcatttcattcatcgtcttattgcgcacgtcccccatcctcggcttctccttcgtggagcactcttactccgtcacccaacacatccaggtaaggatctctctgtaattttaattcattgcaatgtctttttagaatcacagcagaaattaaaaatttgtctgaaacctgtttatgctttctgttggcaaatagtagggactaatttggaatttattagaaaggaagacaaggatgagattcatgtttgtaatttgagcttgaaactccatctcttcgtgcttaacttatttggagcttgttttaatggatttcagcattgcttggtttta

SEQ ID NO: 36769 - DNA, 436 bp, Glycine max
  unsure (1)..(436): unsure at all n locations
  Clone ID: PAT_MRT3847_133204C.1
accatctcactcagtacttcgggccgcacctatttttgtgtgggcgcttcgaaaaatagaggactagtaaataaattaacttatatagtaccgggagggttatgaagtaccatatcttgcgccacctatacatgactcttgccagacgtgtggtagaaacattgatcgcatgcgtacaacatatggtgctactattaatgagagattggtatagcctacactaggaatagaggcgaaccggagaccaaagggccctgcttaacctggcctttcgtgcaccactgtttgtgttgatgcctcgagacactaactggataaacttcatgaggagaccaggatatactaattcgctctgactgattggccccctgtgtgaatcttgccgttcgagccctccgattcttcccccnactacaatatgccctttggtgctctc

SEQ ID NO: 36770 - DNA, 411 bp, Glycine max
  Clone ID: PAT_MRT3847_133205C.1
acgactcctactgcaccaatgcatgaatcctgacggtatttggatcccatgtgtacctaagcgtcaggaggcattacaaacctcactgtaagagctcgctgctaagggactagctcatatgattctaacggcccatatccagaggacagaatttgcgatcgtactgactggacgatggcctacagtaagctaagccgaccttgatgttcacgagagattcacgaaggaatttggagaggaaggttaatactgttggaactctcactcttaaggtccacactgagtctcaaatatattgctataatttgaaatctattatcctttggatccaaattaaatgcatctttgtcatatttggggatgaacaggcccctttaggaccgagatttatttataaaggtcgatactcat

SEQ ID NO: 36771 - DNA, 437 bp, Glycine max
  Clone ID: PAT_MRT3847_133206C.1
aatgattaaaccatttcagatgcatttttcgcaaatgaacaagcagagcaattcagaaaatttccaccatgctgttgattgtgctttagatgaggtctcaagacgggttgagtttggtttatcctgcccttgcatgcctggagatgtgatttctaagattaaaactcaagtaattagtaatgctggaatcaataatcagttgtgcagaagaaatggaggggacaggattatgaacccaatgtcttttgaacccatgaaacttgtcaattttgttaaatcattagcccagtctccacttgttgaatctgataggctggattttgtaattgcacgttcccaattgtcagccttctattgctcaaagggttattctcaactacctgagttcccagtgcttggtgggttgttcgagaatgatatggaaactctattcttga

SEQ ID NO: 36772 - DNA, 1522 bp, Glycine max
  Clone ID: PAT_MRT3847_133207C.1
tggcttttttctttctctgtgcaaaaaattgaagaaaaaagaaaccctaaaactcacacagaaatggctctcaaggcggtccatgttatcgacgtcccttccttggacctggtgaccgagaatgcctctctgtccctctgctcctgcgaacttccccaacggggtgaagatgagtcggagtgacttcaagattccattgttcgtcgttatcgcacaaagagatactgacaagaacgtactggtgttttctagaaaaaaaatgaggggaatataatgcaatgggacgttgaacaagatgaccctctatgcactcttcaagaggcttttgtcaaggtggaacccactttgggttttaacattgagttgaaattcgatgaccactttgtctatgagcaagattatctcgtccatgtccttcagaccatcttaaaggttgtgtttgattatgccaaggacagacctattatcttctcaacattccagccagaagcagcaatgctcattcggaaattgcaaaccaactaccctgtgttctttttgacaaatggtggatgtgaaatctatgaagatgtgaggaggaactcattggaggaggccatgaagctctgtttggagaatggattggaaggaattgtctcagagatcaagggaatattcagaaatcctggtgcagtaaccaagatcaaagagtccaagctttctctactttcttatggaaaattaaacaatgttccagaggcagtttacatgcaacatctaatgggaatcgatggggtaattgtggatttggttcaagaaataactgaggcagttgcggatatgataaagccaacaaagggtggtgaaggagagggtttggttgagggttgtgggaaggtgcagggaaactcaaagcctcaattttcacagcaggagttgtctttccttttgaagctcattccacagttgatacaaatttgaatagcagaagagaagaaaacatttcttgaggctttttaattaatttcacaatatgtactgtgtggcccttcacaaaatcagtggacccccttggagggggtccataaaaagcttaacctttgtacatatatttcttcttttcactttgtagatataaaggaaagaatgattcatgtgtcaacttactggttaagtggtggtcgtcatccaaatatacttgtcagataatgcttttcattgtttcaaaattgttacactggcatttgtctaccactgcaatgagaaaatacggaaacttggcctcttcctgtttgtgttcttgccgttagcttttagcttggaacaaggaattttgctatgatataaaatatactcttatgttgaattctctttttccagtatatatatatatatatatatatatatatatatatatatatatatatatatatatatggaaaaagaaagtttgatattgttagtgtaaatttatactgtttagttaattcattaaaaatcattttagttataaaaaaaaaaaaaaaaaaaaaaaaaaaaaaac

SEQ ID NO: 36773 - DNA, 849 bp, Glycine max
  Clone ID: PAT_MRT3847_133208C.1
tctcccacgtttccgcggacgcgtgggtctctctctctctctatctctcaatctctcacagaaatggctctcaaggccgtccatgtcaccgacgtcccttccctggacctggtgaccgagaatgcctctctgtccctctgctcctcccgcttccccaacggggtggaaatgagtcggagtgacttcaagatgccaaagttcgtcgtgatcggacacagaggtaatggcatgaacgttctgcagtcttccgatcgaagaatgagagccatcaaggaaaataccatcttgtccttcaacaaagccgccactttcccgctcgatttcatcgaattcgacgttcaggtgacgagagatgactgcccagtcattttccacgacgatttcatcttcacagaggagaatggttctgtgtttgggaagagattaacggagctgaatctgtctgagtttctttcctatgggcctcaaagagaggctgaaaaggagggaaaggttttgcttagaaaaaaagaagggaagataatgcaatgggacgttgaacaagatgaccctctatgcactcttcaagaggcttttgtcaaggtggaacccactttgggttttaacattgagttgaaattcgatgaccactttgtctatgagcaagattatctcgtccatgtccttcagaccatcttaaaggttgtgtttgattatgccaaggacagacctattatcttctcaacattccagccagaagcagcaatgctcattcggaaattgcaaaccaactaccctgtgttctttttgacaaatggtggatgtgaaatctatgaagatgtgaggaggaactcattggaggaggccatg

SEQ ID NO: 36774 - DNA, 1182 bp, Glycine max
  Clone ID: PAT_MRT3847_133209C.1
gaggccaagtttccgtatgttctcattgcagtggtagacaaatgccagtgtaacaattttgaaacaatgaaaagcattatctgacaagtatatttggatgacgaccaccaaaccagtaagttgacacatgaatcattctttcctttatatctacaaagtgaaaagaagaaatatatgtaaaaaggttaacctttttatggatttccttcaagggggtccactgattttgggaagggccccacagtacatattgggaggctaagtttaaatattttctcattgcagtggtagacaaatgccagtgtaacaattttgaaacaatgaaaagcattatctgacaagtatatttggatggcgaccaccaaaccagtaagttgacacatgaatcattctttcctttatatctacaaagtgaaaagaagaaatatatgtacaaaggttaagctttttatggaccccctccaagggggtccactgattttgtgaagggccacacagtacatattgtgaaattaattaaaaagcctcaagaaatgtcttctcttctgctattcaaatttgtatcaactgtggaatgagcttcaaaaggaaagacaactcctgctgtgaaaattgaagctttgagtttccctgcaccttcccacaacccttaaccaaaccctctccttgaccaccctttggtggctttatcatatccgcaactgcctcagttatttcttgaaccaaatccacaattacccaccattaccaaaaagaactcacattctcctctgtgaagatgaaatcgtcgtggaaaatgactgggcagtcatctctcgtcacctacaaaaaaccacacgtgcatttttgctttaacttttttttttcggtctcttttttctgaacgtcgaattcgatgaaatcgagcgggaaagtggcggctttgttgaaggacaagatggtattttccttgatggctctcattcttcgatcggaagactgcagaacgttcatgccattacctctgtgtccgatcacgacgaactttggcatcttgaagccactccgactcatttccaccccgttggggaagcgggaggagcagagggacagagaggcattctcggtcaccaggtccagggaagggacgtcggtgacatggacggccttgagagccatttctgtgagagattgagagatata

SEQ ID NO: 36775 - DNA, 809 bp, Glycine max
  Clone ID: PAT_MRT3847_13320C.1
gacttattaattgtgttaagaaatttaagtgaggagctagagaatgatgatgaagtctgctatgtgtgcagtggtggttgtagcacttcttcttctggcggaggtggggcccatggctgaggctgtgacatgcaccccaacagagttgagtccgtgtcttccagcaatcacttccggtgctaaaccttccaatgcttgttgcacgaagctgaagcagcaaaaaccatgcttatgtggctacctcaaaaacgctagcttgaagcagtatgttaactctcctaatgcccgaaaaaccgttgcttcttgtgggattccctttccaacttgttaattaattaagccttcttataattaaagtgtgggatatatatatatatatagataaacagtttaatttatacacactttgatcctacaaagcatcttgacacaagcattcaataggatttcaccactttatcgcaacattttaacatgatgcggtaataaagtaaattcttgttgaatatttggataacgatgttatatactcatagtttgtgtgtataaattaaacttatatttattatttactctatatatgtcactctacgtttgtgtgatatattatacagttaagtatttagctatctttgaatatgttaaggatgatcatatcagataaagctctctagagttgaatatgaccagtatacatgttgtatccagggaattatatgtgttaagagctataaataaataaataaataaataaataatgatgttctagagtggcgtatatgtcctctcaaaaaaaaaaaaaaccaaag

SEQ ID NO: 36776 - DNA, 385 bp, Glycine max
  Clone ID: PAT_MRT3847_133210C.1
gggaaaaaccaaccaacaattcgggggggggggaaacccaaaaaaattcccattttttgaaaaccctggggattacccttttcttccccaaacccccattttaaaaccctcaaaaggcccccaggccccccttgttttcccccaaccccaaaaccaaccttacaaaccccggcctgcccccgttttaattttccctcggggcccccaaaccaaaaaaactgccccccgctttacaagggagcgaatgggaaaaccccggggttcccccccctataacccttgggggaaaaccccctttcccccgggggggtaacaccgaaaaggcccccaccggtccccctttccaaaaaatttcccacccccacgccccacgggccccccccgg

SEQ ID NO: 36777 - DNA, 246 bp, Glycine max
  Clone ID: PAT_MRT3847_133211C.1
gtgagccatggacgtcggaaagaacaagcgcatctccaaagggaacaagggttcgcaacaagaaggcagctggtccctttgccaagaaggattggtatgacattaaggccccttctctttttcaagtgaaaaatgttggcaagaccctcgtctgtagtacgcagggtaccaagattgcttctgaaggacttaaacatagagtgtctgacgtctccttggctgatcttcaaagggatgaggatcatg

SEQ ID NO: 36778 - DNA, 362 bp, Glycine max
  Clone ID: PAT_MRT3847_133212C.1
ttgtattcaccagtctctgcttcgggctcgggatctgtgcgcatccatatcaggcgccacacatgttctcgccatgccgatctactttgaggcacgatgagcttgaggatatgctggcttggctctagagccatactcactgtgcatggcatcccatttgaccggcatgacgccaagattgctttgtttcgtacatctatacgccgcttgaacgggaggctgcctagactttctctctcggccatgtggaccactgcacattgtctggcgcctgcaaaggatgtgtgacaggactcagctctcgagctcgagcgatagagacgcacgcctgtacgatatgacaggaaccttgcggagaacgt

SEQ ID NO: 36779 - DNA, 469 bp, Glycine max
  Clone ID: PAT_MRT3847_133213C.1
cttgggggggggggggggagctaccccaaggagatgcgtatgcccgacgaaaagcattacgtatagacagaggactaagctgatggacaatatctgtacggtgttaaaacaaacaagcaaacagcagagaataggaccagctagttcaatgggtatttgtatgttattaaaactgaatgcaaaaatgccgacgtaaacactctatagacgcttattaggggcctcccagagagaatagggtcttggttgtgaaaagatacgtgataaaggttaacgtggctattggtccaaatggcggggtagtgagcgtagtgaaagtaattgcctgccaaggcgccactagccgattacacgccccccaaacggttgtacataaacagcaacacgaaacttgaagcgagggtgggttaataattgcactgacgagcggagcagcgccagtagccgcgaatccgcgtatgcggttgct

SEQ ID NO: 36780 - DNA, 570 bp, Glycine max
  Clone ID: PAT_MRT3847_133214C.1
aaagggattgaacggactaaggggcttttcacaaaaaaaaaaaaaaaaaagagaatagactaagggtcattaaaatttttaagtttcaaaacccaaaattaaaaaaagcttcactaggatttttttataaacaaatgcaaagctgccttgaacaaactgaaaataaaggatatatattatcccctttacttttttaaaaaaaaaaactgggggaaaaaatttttttggcttaaagttaaacatatttaagggttaaaaatattcgaaatgtatcacgggaaaggctcatttttataaaaataacatcattaaatacaaggcatacaattatataaaaacatcctaaggagggaaatttaaggaatttattttatggtatttatcttaaggaaaacacttttatattatccctttaaaaaattcttaaaggaaaaaaaatttttttttactcataagcaaggggaacctaactttaatcaatccaatgacaaggaaatcatctctaatgataaaaaaatttaacaaccctgtttaaaaataagcaattcgttaaacaactaacattggaaa

SEQ ID NO: 36781 - DNA, 440 bp, Glycine max
  Clone ID: PAT_MRT3847_133215C.1
ttcgtccttttttttaaatttttgttgttatttacaaggactaacaggttcctgcatgattcatgactcgctgtatgaaagccacgatagccagacgcgtcaggcattgtgacacataacggcccataattccgacagcagtacttacatgagcggtctttatgtcgccctttgcctgaaagtgtcgtagaggcgactgcaagcgtattcactttactcacacaaccttacggttcaaggccaaggcaatgcgctgacttaaacggtgaccctttgcaaggattgttcttgaaacactgctaactccctgtatctgggcaacatccactagacatgatgctgtaaaaccacacattctcgtgaacctagcaccatcacatccatggggggatccattgcgcagactgcatcatctcatgatttgacactgtgtacattga

SEQ ID NO: 36782 - DNA, 271 bp, Glycine max
  Clone ID: PAT_MRT3847_133216C.1
ttcggcctccccttgtatattctttctcattctagaacaaataaaagactctctgatcgctctcaagaatgagtggataacctactgtgaagaatcaaaaaagcttgaagactatgcatcacaagctgaccaaatgcaagtgaataccacagctcgattttattcaaagcatatgaggagcactcaaaatctggtacagagaaactcattgccaatatgactagccgaccggctgatcacataccggggatcttatggtatctgggtcact

SEQ ID NO: 36783 - DNA, 737 bp, Glycine max
  Clone ID: PAT_MRT3847_133217C.1
ccacgcgtccgcggacgcgtgggttcactgcgtgattgattaggtttgctggtttccatctaagttcgttggaattgtttaattgttctttgattttcttcacatagcaatctctttcacaatggtgattgctacaagaaattccttcgtatctcttatcttaatatcctcacttttttgcacaacactccttgccaagtcttctcacccaatctccgatgctcaagtcaggaagaacaagcttcagtgctatgctgatattgacagtgggttgtggggttggtcatgcaaatcaacgatgatagcaagggagaattgtgctctaagatgcctttcaccagcttgttacgagctcatctacgagagtgacccgctcgaagagggagaaaaggactttattcgaagccaagagtacaaatactgcatgcacaagttgtccatgggagagagccttgagggtgttaagggtgcctttagcaactaatcaacacgaaaattctgaattggaggtggaagtatggtgaatttatatatgccctgttaaatgtagattaaagaaaatgtccaagagagtcttgagagtattttttttctttcaagtaattaattataaatgaaccagatacaagtatatgctcttagaaatccagtacaatctagaacagaacaatgcttctctaaaggtgagtgccttagttttttagccctttaagactctattattagcattttgagca

SEQ ID NO: 36784 - DNA, 270 bp, Glycine max
  Clone ID: PAT_MRT3847_133218C.1
tggtttataacataggaaatgacaacttgttcgatacaaggtaaatgtgatcctacacgaccccatgataccccctgaaaccagatgaggctctgagcacacggcatcacagcgctaaaggacttctgtcttgctgtctggcatccccttcgcaccactatccgtctactgcgggcaaacatagtccattccctgaatttgcaaagtgagcatacccctcaatctgtctctcgatgtcttgcatgataacactcgcgctggactttcttc

SEQ ID NO: 36785 - DNA, 492 bp, Glycine max
  Clone ID: PAT_MRT3847_133219C.1
acgaggcgaggttcattaatatttgtctgacaagaagccagaagaaattcccactgtaaggcctattaattttttaatagataacacaagtacattacaccattaagatgagcagaacatacaagataaccaagagggaagttatgaagagaagtacaacaagcatgaagactcaagccgccagattttgattttgaagcagcaaaacattgttgaaacacaaaatagaaccatccaggttgacatggctaacattcagaagaaaaaggaagaggcgaaggtcagatattgtattgcgctaaaggagttgaaagccaaggcgcaacagaagggaagctttgaggttttgggctcaagaaaagtggaaagaaataagggctctttatcatgattgtatacatccaatattgtgcaggatttgaaagttaaaagtaggcgcaacccaacattttattttgattgatgggacatggagcaattcagcaacaatgt

SEQ ID NO: 36786 - DNA, 556 bp, Glycine max
  Clone ID: PAT_MRT3847_13321C.1
attcccggggtcgacccacgcgtccgcggagacgtaaggttccgccgaagtgggatatacccgaagcgctacttcttgcggttcctcttctacaactagggtcggctgatctattctaactcatagccgcactctcattcgagcagctccactcacattcgacgctgacgatatagcaaaccctcgccggacacctagtaactgcaaaggtcaaggctgcaactctgggagaggatgctcccaggggtgtgttatgaataattgtaggtggctctcgacacactggtgccatggtggccatgggacaaaaagaagcgtatgttggtgacgaatgcctaccaaaacgaggtatacatactctcaagactaccatggagcgtgagatactcagcctcaggcacgacatgcatgcgagccgccatcacacatcctataacgaaccacgtgccgttcctgaggagcacccagcgcttctaactgaagattctatcagaccacaagctatcagagaatagatgacacttatcatgatcgagaccctcattgtgcctgacat

SEQ ID NO: 36787 - DNA, 272 bp, Glycine max
  Clone ID: PAT_MRT3847_133220C.1
tccccttctcgttccacgcctccgcgttctcgccggcccacccctacacggacccctgggcccctttaccgcccaatgtgcatatacactcacagcgaacgagaagagcgacctacaccccccctgggttgtcatactccagttggccactggaaaacgccccgtggaccctgaatttggggccctatccctcccccctgccccccttcacaacccttacccatacccgctcgcaccatctaattgatccaaggcttgatccttcctctccc

SEQ ID NO: 36788 - DNA, 603 bp, Glycine max
  Clone ID: PAT_MRT3847_133221C.1
ccacgcgtccggctggaggttggtataatgtttgttttgaatggagagaagaaagaaagtatcattttccaataaaaaaaaatgtcagttagcagaaatacaatatgaggtgctgctctgcatagctgacaactatgaagtcatgcacataaatttaaactgagttttgaaaattaagtcctctgtcctttctttctctttcactctgtgttgccaccactacactccacatctcacagtacgcactctactcatccatagacaatagttccttgccatccccatccatattactagttagtaagtaagtaactcactccctctccctctttctctttctctctctagggggccaaaacttccatttttatcattctctgcactctccaaaaaccttcttcacagaacaacaagtactcttcaaaggggtgccccagatgcggtcacagtctctgtaacccatcaaatgagtttgagcttctccatctcttgttggggggtgaatggggggcatggtgtctcacctagccgcgaaattcgccttctttccgccgtctccgccgacgtaccagctcaagaagagcggcgaggacggcaagctca

SEQ ID NO: 36789 - DNA, 1940 bp, Glycine max
  Clone ID: PAT_MRT3847_133222C.1
ccacgcgggtcaaacacaacaagaaacaccgaccagagctaaagagggaaaaagggttttagggggttcaaatagaaaaaatcaaattcatgtagctgtctacgtgggttagatttgttagcattgcagaagaaccagatacccccaagtattgttattatcatcatcattgcatctatctatctatctatcttctattcattttctctcattgtatctgatttgtgttgttttttgctaacacaagcaatggaggttgtagagaaggagaagaagaagtacatcacctcagaggagctgaagggtcacaacaaggagggagatttatggatctcaattcaaggtaaggtgtacaatgtctcagattgggtgaaggagcaccctggtggtgatgttcctatctcaaaccttgctggccaggatgtcactgatgcattcatagcataccatcctggcacagcatggtcacaccttgacaaattcttcactggctaccacctcagtgacttcaaggtctctgaggtgtccaaagactacagaaagcttgcatctgagttctcaaaattgggtctttttgacaccaaaggccatgtcacttcttgcacccttgcatctgttgctgttatgttcctcattgtgatgtatggtgtgttgaggtgcactagtgtgtgggctcatttgggctcaggcatgctattagggttgctttggatgcaaagtgcttatgtgggtcatgattctggccactatgtggttatgacaagcaatggtttcaacaaggttgcacagatcctctctgggaactgcttgactgggataagcattgcttggtggaagtggactcacaatgctcaccacattgcctgcaacagccttgatcatgaccctgatctgcagcacatgccggtcttcgccgtgtcctcgcggttcttcaattcgataacttctcatttctatgggaggaagttggagtttgatttcattgcaaggttcttgatctgctaccagcacttcactttttacccggttatgtgtgttgccagggtcaacttgtatctgcagaccattctgctattgttttcgaggcgtaaagtgcaggatagagccttgaacataatggggatccttgtgttttggacttggttccctcttttggtgtctttcctgccaaattggcctgagagggttatgtttgtgcttgctagctttgctgtttgttccatccagcacattcagttctgcttgaatcactttgctgcaaatgtgtatgttgggctaccgagtgggaatgactggtttgaaaagcagacaagtgggacattggatatctcttgctcctcttcgatggattggttcttcggtggcttgcagtttcagcttgagcatcatttgtttccaaggctacctcggtgccaattgaggaacatttcgcctttggtcagtgacctttgcaagaagcataatttgccttataggagcttgtcattttgggaggccaatcagtggacaattaggaccctcaggactgctgccctacaggctagggacttgacaaaccctgcccctaagaatttgttgtgggaagctgttaatacccatggctgaggtatttggagtttatagagtttaggattttgtcaaggtcttttttttttgttttctcttgaaaaagaaaaaaaaaaatctcattgtgattttgctagccaccacttttccagtttgggctttgaatttaactttttgttgggtgtggtgtagaaatggatggtgatccagatgttactgcagttcatgtgcttttcatcaatacaaaattaatatcatgtatgcccttttgcctttttacttctatttccttaccttggcatagggtttcttaatgtctgtaagttattataccatccgtgttgatcttgttataccatggttgcatcattacg

SEQ ID NO: 36790 - DNA, 803 bp, Glycine max
  unsure (1)..(803): unsure at all n locations
  Clone ID: PAT_MRT3847_133223C.1
aaagggattagatccttgaaccagatcaaatcatcaaaatctgtgtctagggggttgtcaaaacaacaatcacattgttgttgctgtaaaaggggattccttagtctagatttgtttgcattgcagaagaaccagataccccattattgttcttatctatctatctgtctatattctatttatcttcttattgtagttctcattgtgtctgatttcagtgatttgtgttgtttttggttaacacaagcaatggaagttgttgagaaggagaagaagtacataacctcagaggagctgaagggtcacaacaaggagggagatttatggatctcaattcaaggtaaggtgtacaatgtctcagattgggtcaaggagcaccctggtggtgatgttccaatctcaaaccttgctggccaggatgtcactgatgcattcatagcataccatcctggcacagcatggtcacaccttgaaaaattcttcactggctaccacctcagtgacttcaaggtctctgaggtgtccaaagactacagaaagcttgcatctgagttctcaaaattgggtctttttgacaccaaagggcatgtcacttcatgcacccttgcatctgttgctgttatgttcctcattgtactctatggtgttctgaggtgcactagtgtgtgggctcatttgggttcaggcatgctcttagggttgcttttgatgcaaagtgcttatgtgggccatgattctggcactatgtggttatgacaaccaatggnttcaacaaggttgcacagatcctctctgggaactgc

SEQ ID NO: 36791 - DNA, 238 bp, Glycine max
  unsure (1)..(238): unsure at all n locations
  Clone ID: PAT_MRT3847_133224C.1
ctcaagtccatggctggcttctgcacaatgcagaacatgaatgacattatctccatagctagcaacggtggtagagtgcaatgcttgcangtgtggccaccagttggcaagaagaagtttgagactctttcctacctgctagaccttgatgatgcacaatttgcaaacgatagtagaataccttcttaggaatggatggatccttgttagatatcattggagcacgttcgtgtacgta

SEQ ID NO: 36792 - DNA, 333 bp, Glycine max
  unsure (1)..(333): unsure at all n locations
  Clone ID: PAT_MRT3847_133225C.1
cccacgcgtccgtattcatattcttattgttcttgttcttgatgtatctgtgacgagcatcatggcctctatagcagcgctattgttggctatgtgcgtgcttccggccatggttgtggccattcgcccagcaaagaaccctttttgcgtgaagggtcgcgtctactgtgacccttgccgtgntggctacgagaccgcaccaaccacctacattggcggtggtgagattatgttgcaatgcaagagcagggttagcaacgatgttgcgtacaccaagaaagtgtacactgactcatctgtagcattacacaatgtacgtggacgatgatcacg

SEQ ID NO: 36793 - DNA, 361 bp, Glycine max
  Clone ID: PAT_MRT3847_133226C.1
cacagtcatgtcatgtttgtgagagaatggttatgcaaatgcaacccaacaacctcaactacttctgtgggtctctagtttctgaattctacagcaaattcaacactccactacgtatcttcatttttgtcatcattacaaaggctgattgaagggatgattcttgtgaggctgctgcaagttggagttgctcaaaaagcatgggaggattattgtgtaggctagattatttatcatcttatactaccctgccattggaaattaactgccgtttagagaagatggcttttctttgttgacaacatgtggtttagaggctgtagtttcaggtagcataagaagctcgtgaagttatttcggt

SEQ ID NO: 36794 - DNA, 244 bp, Glycine max
  Clone ID: PAT_MRT3847_133227C.1
ccttcttttttttttttttttttttttaggagattttagtttttcaacacatacaggagaaaatttaataagtttttattgtaaggaccaaattgagagaaggccctacatggttagatactaaattccatatattgggactcgaattatacgcttattttgatttttttaaaaaaataaaactaatccttaaatctttatggaacatataacttggccttaagttaataaatagggaaaaatt

SEQ ID NO: 36795 - DNA, 353 bp, Glycine max
  unsure (1)..(353): unsure at all n locations
  Clone ID: PAT_MRT3847_133228C.1
cgccggcacgcgcnccggaaggaaccgggcgggacccacccacgccgtttgtaacacgccgccaacaagcacgaagaacagggcccgagaaagagacaccgcgcggccgcgaaccacgaagaaaagaccggaaagggaagcacgcacnaaaaggaaaagaagcgacccagcccacaaaaggaggggaggaaagaaccgagaccaccgaaggcccacggggacgcaaggagaaagaggcgaagccagagcaagngacgacagaacagcaggggcgagaaaaaagagcaggccgaaagcaaacaggaggcacgagggaggcagaaaaaagacgagggaaagggccggaagaccgg

SEQ ID NO: 36796 - DNA, 231 bp, Glycine max
  Clone ID: PAT_MRT3847_133229C.1
aaggttcatggttggcactttgttagaaagatgtttaatgagttgcctgtggaatcccttctagatttccgctcagagttatatgcgatagcattgtcaatgggatgcgcattagatatagctatgatacattactgcgccaggctaaagctccaagtatatgtgtacaatccttcaaaaattttatgtctatgtgtgtgtatggtgatgataacttaattagtattcatg

SEQ ID NO: 36797 - DNA, 172 bp, Glycine max
  Clone ID: PAT_MRT3847_13322C.1
ggatagggcagactgaagagtctctctctctctctctctcttggactgattcgcttcatacgcatctactctctacctcacctctttctactatcactactctgaacgcaaagttggtgtatagaaaggatgatgatcgtggtagctggaggcttctttctgaacggacacg

SEQ ID NO: 36798 - DNA, 264 bp, Glycine max
  Clone ID: PAT_MRT3847_133230C.1
gcacaagtccccgatgaacatgtaagccactaaatctgtctcttattcttggatcatctccctcttcccagcataggcaatttttaaaaataaattatttagttattttatgtaaatataatgctatgaataagaagggaagtgattaagcattaacacattcactgagatgggattggcttgtttgatttaattattttgtggtctaatcaaggattactaagctgaactgaagttaatgtgttgatctttgactggagatgt

SEQ ID NO: 36799 - DNA, 416 bp, Glycine max
  Clone ID: PAT_MRT3847_133231C.1
ggtaaattgggttactattcatatctacaaacaattaatgcctaattactactaacaaactaatattttggttaaaatacctgactggggactacgggctaacactaggcaaaaaaaaaaacccaactaaatcgcatttcaataaacccccaccggtttcaaaccgggttttgggtgacccaaaaacaaaacagcataggggtccctaatctaattcccatataaaaaagggggaaccgtttgagtctcggcctgaaaaaaaaacaaatccggctgagccacctcattttctgtaacgaatctctaacactttacagagactctaggagtgaatattcgctgaagaaagaggggctacacgccggtctatactccgaaaatacaaacccgacttgtaccgaaccacacacgcgttg

SEQ ID NO: 36800 - DNA, 109 bp, Glycine max
  Clone ID: PAT_MRT3847_133232C.1
ttaaaatattagcagatggtttaaatcacatgcaagagaggaggcatggttccattttctaccttgcatgtgatttaaaatattagcagatggttttttctttgcttca

SEQ ID NO: 36801 - DNA, 1231 bp, Glycine max
  unsure (1)..(1231): unsure at all n locations
  Clone ID: PAT_MRT3847_133233C.1
tgcaggtaagctaagaagggtagaagactatctctttctttcgctctatttaaggaacacaaattttacaggtgtagtaacctgtttcacaacccaatacatgtcatgcacatgttcaaccaaaatccggataagaccaaactgcatttacattttgctgctgctaattaattcaattactggctatgggacttcattcgccgactcctcctaattaactcgtccgacggctgcgagaagacgattcatcaagtcatatttcacttacaaaacaccctctcctaccttctctcttatcacttccaaccatgactgcaactgatattgctcgaacagcggtcggcatcataggaaacatcatctcgggcgctttgttcctgtccccagcgcccacttttgtcgaaatatgcaagaagggatcagtggagcagtactcggcagcaccatacctagcaacgctggtgaactgcatggtttggaccctgtacggtctacccatggtgcacccaaatagcattttggtggtaaccattaacggctctgggtgcatcattgagcttatctttgtgacactcttcttgatctactctggtgggaaaaagaggctcaaggtcctcctgtggctcttattggaacttatttttatctctgttctcacctttatcactttaactaaggtccacaccttcaagaaacgctctgccattgttggaaccacttgcattctcttcaacattatgatgtatgcttcacccttggctatcatgaaactggtgatcaagactaagagcgttgagtacatgcccttttacatctctctcgcctcttttgggaatggtgtggcttggacaacttattctctcatccgtttcgacaagttcataactataccaaatgggcttgggacattgtttgcggtggcgcaactgattctgtatgcaacctattacaagtcgactcagcggcagatagcggcaaggaatggcaacgggggggtgaacttgtcgcaggtggtggtgggtagagatgaccaatccaagccggataattgatcatgatggaatctccatgtgttcccttcagttcttcaataagaggtttctttagatgcatgttcagcaatgttgtttgtagtactttggacctcctataaaatgtaatcatatttactattacataaaactaccgtaagtttagctccaaaaaaaaaaaaaaaaaaannnnannnnna

SEQ ID NO: 36802 - DNA, 232 bp, Glycine max
  Clone ID: PAT_MRT3847_133234C.1
gtgtcgctgccgtggtaactgcggtcgtggaagctcctgcaagtgcggcaacggctgcctacgctgcacgatgtacccacacttgacctacaccgtgtcaaccactaccacgacctcggccatggcagtgtcaccacttaaagctcacttcgagagtgctaacatgggtgttcctgctgacaactatggctgcaaatgtgtagctcactgcacctgcaacccctgcacttgc

SEQ ID NO: 36803 - DNA, 205 bp, Glycine max
  Clone ID: PAT_MRT3847_133235C.1
gggtgggtgtttttacgcgcccgaattcccaaataaaccacccattcaccaatccaaacaaaacttacaaacaacgactaattatcctcatactcggaccaaaagacccaacatcaacccttaacaccaagactaccactccttaaaagcaccccccccaaaaaaacacaatccacctttcaaaaaaaaccccactagccccaaa

SEQ ID NO: 36804 - DNA, 423 bp, Glycine max
  Clone ID: PAT_MRT3847_133236C.1
gcgacaaagcgccagtttactgttactttataagacgaaaacagagatgcgccattaaggcgaatatagctctggatgcttaggatgacgactagagggcttgctgctagaaggcttatatcaaacaggtggacgagactccatttttcaggattgatgagattggagcatgcatccactgacacagaactaacaaaagatgcatgctacgaaccaaaagggccagaagctgtagatgggggaaggcattcgtactggacaccgacgctagacagccgccaaatagaaagagacagtcggacgcagcagaggctccaggattgcgcactggaggcagcatcactctaaccattggatagtgataccggagtgaccaaacgtggcggctataacaacgtgcctactggtaaaaccgatgcaccg

SEQ ID NO: 36805 - DNA, 217 bp, Glycine max
  Clone ID: PAT_MRT3847_133237C.1
gcgccaacagacatgaaccaatgggggagcctcgtaaaagaaatgttgctcgtgactcgacagtttaatgcgctactttgcccaaatatttcagtcatcaatgtctgaaaattggaatctaaccaacgtccatatctttgttccgaaacacctaacattgacattttgccaaagacgtcattccgatgatgcgccagggatgactttcttatggaac

SEQ ID NO: 36806 - DNA, 263 bp, Glycine max
  Clone ID: PAT_MRT3847_133238C.1
aaaggcaaagcagagcaaccctttttaagaccaaaaactggtgcgttttttacaatttttaatatcaggtcactttaaaaatacatttatttttgcttttgcaacaagggttactaaaaacaatgttccccctctgaatgaaaatgggagaagaggggaaaagaaaaccttgttttacttaaattaatacaaaacggtggtttgcgcccgcaaaaatttctgccacaatgttcacttggacttgtcataaaagagaattaacc

SEQ ID NO: 36807 - DNA, 452 bp, Glycine max
  unsure (1)..(452): unsure at all n locations
  Clone ID: PAT_MRT3847_133239C.1
ttttgtggcaaatggaaagagagcaacaaaacattttcatttagaggagactcaaattggctaggctttagttaggtctgtatatagcctgtttataatttctcacttgactccactgtggtttctaactgaaatctaaatgttgctttgggatctgctctcacataatatnttccaaattattttaacactcttttccatcgaatgaaatttactctatctgcttttgtaacttaaattgtgtgattacttcccatccatcgaaaagggtatatttctacagcttagctttttatatttttcgaacttctagcatcacctatattagttgcatatggccatcactatccagtatccacacacagttatttttagattaaaaatcaattcaaataatacatagaagttataactataaaaccaattcttatgtctttatatttttaaggaga

SEQ ID NO: 36808 - DNA, 348 bp, Glycine max
  Clone ID: PAT_MRT3847_13323C.1
ttttacggtttgtattatggaattcatttgtagggtaaaataagttaagaggggggtttaaaagaaaaaaattaatattaagggggtttcacaccggaaacggaagaacaaaaacttaaataaaaaaactcacccagttaaacaattaaaaataacatccgggggagcaaaaaaaccttggaagattattataaggaagcaagataacagtttttttgctaacaaaacgccatcaaacattgcaaaagggaaggtttggcccaaaaaaaaataatttgaaaaaattgaaggaccaactttcctaaggaagtatgggttcaaaaattaaaaatggctttaaaatgaaaa

SEQ ID NO: 36809 - DNA, 397 bp, Glycine max
  Clone ID: PAT_MRT3847_133240C.1
cggccgctgtaggttgtttagaagatactttagggagccacatgtgagggccactacttcaacaattttagagtgaagctgataaccctttttgtacgcaactggaactatgtccctcataagaaaggggtctgattaaccaagaaaggggattctgatgggatatgtaacgccattaagttgggggtcggggccaatcccatgactgatacggttcaagatgctactacttctgctgctgaaactactgctggctacaaacgatttcctcgggtgaggccggcttggcgaagcactaccactcgaaactgaaactgaagggtgacttgtggaatatacttcctgaggcggaacatagaacatcagagccaatgtgcctgtaatcaacaggctgatt

SEQ ID NO: 36810 - DNA, 285 bp, Glycine max
  Clone ID: PAT_MRT3847_133241C.1
tcggcgcgcctttttttctttttttttctttttttttttttttaaactggatcaacattctttttcatttgatttttagttggactttaaggcacctaaaaagacaccatttactggcaactatagtttaacattaacacatcagttggacatgaaacaagcaaaacaaaagctaaagccattagcaaaaattcggtctctttttttttttttcactattaagggagggagagggatgatttgggccccttttggcgtcttttcgcaaccgtacggacccgtggg

SEQ ID NO: 36811 - DNA, 388 bp, Glycine max
  Clone ID: PAT_MRT3847_133242C.1
aacataaaaaaaaaaaaaaattaaaatttatttaaaaaaaaaaaaaaacaagggcaacacccccaaaaaaaagccccccataggaggggggagaaaaaacaaaaaaaacattgggaaaaccacccaaataaagggaagccccccaaaaaggtcatgggttcactctcacaaaaaaacccccaaatttatttattggggaaaaacccccccaacaggaaagataaataacagaacataaaaccccgagggccttatttcccccccacttaattttgggtcccacccccaccccagaagaatttaaaaaaaaaccggggaaaagtactgccatcacagccttaaaaaaaggagggggacaaaaggggcccacctactcaaaggttttaaa

SEQ ID NO: 36812 - DNA, 233 bp, Glycine max
  Clone ID: PAT_MRT3847_133243C.1
ttaccaaattccatattccaattcaataccctaactccggtcgaagcaccaaatcgtgatggcaccaaaggcagagtagctaccatctcaggagaagcatgtggaggagaagactatcgacggtgggagacaaggctccggcggatctggtgccaaaagccggaacgaagcttgcgaaggatcgactcgccgtcgctgagtgtaagaagtcgacgagttacaagaagatcgtg

SEQ ID NO: 36813 - DNA, 660 bp, Glycine max
  Clone ID: PAT_MRT3847_133244C.1
acggctgcgagaagacgacagaagggctggtcatggcccaatataaagggatgcttagtttgtaataggcagcagagaaaaataatagagtttccttcttcacgttcttgcttcttgggagggtcctagacctcaaatgctaggaaacattgagctgattttcagttcataacatgtaacaaccttaataacttctttgacatatatgcgttccttcaaataattatacttaaagtaccaaactattaactcaatcaccggtggcttctcttctcttccacaatgccttgctatctcatcatcacttcatgatttggatctacaactgaacaagcttcatggaactttgccaagtacctttgcaaaggactgttggctcatagcataatgcatcaatctaatcagaaaaccaatacaaatctttgaatctaattaaaaaaattataaaactcttgaaccccagaaatatgtctacgttttgttatagtttaattttaatttccttccccagaaacaataaaaaaaaacacattctcagctgtgttttaccttttttttttaaggaccttaccatggttttcagtaaccactcccgtaaggttgatttgaaaaaaataatatataaaacggttccctccctaagaactgattttttaatgc

SEQ ID NO: 36814 - DNA, 394 bp, Glycine max
  Clone ID: PAT_MRT3847_133245C.1
cccacgcgttagaacgagctgcgagaagacgacagaaggggatgaaattgactgcttggggatcggcggtacccgacacttagatgtagagttgctgtgcacccgaagagcgaagacctcttccgattcgatcatcctctgggcaggcaggttacttgaggcaaagatttctggcatctaaagtcaaagcaacgagacttcagtctgagaataatcgtgaagtcagagtcttaacaaaacttaccaaagcctatagattggatgctatcggaggttccaaaaacctctacagagcaagggaagctgagaaagcagaaagtacccgagtgggcaagacctccagaggtggcactcgtatagtcggacagctataaaggagaaacaagaacgggct

SEQ ID NO: 36815 - DNA, 408 bp, Glycine max
  Clone ID: PAT_MRT3847_133246C.1
gttgggcctcggaaatctatttacctgttgttttagaagggctggtgaagcggggccgggggatattggaaccacaaaaattcttttggttgggaaagatagaaggactcagttccccttgaaaaaaaaaaatagtaaggagcccccccaaaccaggaggaaatgcccccgggggggggccacccaaacgggaacacccgctgtaaaagcccaaaaaaaaaaccccggttcttctaaaagggggcgcgcaccccggggggcctgagaaaaaaacctacccttaatagtctaccccgaaaaatgagggtaaccctcccgcccggggaacccaaaacaaggcagccgctccagataacaaaaaaagaattgtgtctacggcctttggggggtggggaccccctccccccc

SEQ ID NO: 36816 - DNA, 416 bp, Glycine max
  Clone ID: PAT_MRT3847_133247C.1
gtttttcttggcgaagtgggaggcgaagaagagtacaaaatatcgcaggcgttaaaagaaaaacccatagataagcccgttatcatcaggcgcattggcacttgtgccgatcacatcacttactagcgaccaagttggtcatgccggggacttgatcaacgccgccaaagaaactgcggaccataaaaacgctgctaggaagacagatgatactcacctgcccgactattccgaggacttcagtgatatgatctcagacaggaacaacgcaatcggtaccgaatgggtctatggtttcacgtgccgcaaaacccccgtcaccggcgactagggaacacgcgctggcactggtaccaaggactgaacaggaagcccggttgcttcatgacttgcatctgcgacgagagagggggggg

SEQ ID NO: 36817 - DNA, 245 bp, Glycine max
  Clone ID: PAT_MRT3847_133248C.1
caatagagatgaattaagcaagtctgatttccggtggaggatggcatctcaggagactgtgcacggcggctgagattcccgctagaaggctaaacctctatcgtatcttataggcgctggacatcaccggacgtaacgtggcgctaacgctggaccaatatatagtggaaggcaaagtcatcagagaaccagtagtcgagcggtgcgtcgagcagatcagaaagtatcgtcgattcaagcaagga

SEQ ID NO: 36818 - DNA, 222 bp, Glycine max
  Clone ID: PAT_MRT3847_133249C.1
cacacctagacaattggctcataaccgaagaagagcaagcaaaaatggttctcacatccactgcgctcacacccagatgacgcaagagcagagcctaaactatacgtttacttccagatctgcgcgtgaacctattccagagttcccgatgccggagaaatccatcccagaagttgctgcttatcggataataaacgatggctggttgttgcatggtgcacc

SEQ ID NO: 36819 - DNA, 659 bp, Glycine max
  Clone ID: PAT_MRT3847_13324C.1
cccgcgtccgctttttttttttttttataaacattgaatagggataacaagaatcactttgggggaagctaccatgatatttactacttatgttgtaaccttttgaagtgataatttaaattcaaatccccctcaattaggagtgttcattaaattttgtcagcctaacgactcagtccgaatatataaaattggctcttttttacacggctgggtccaactggagctgaatggattaaattagttcaattcttagacttatattttttgaaactgaattaaccagaattaaaacaaccttttttattatatgtgtgtaattagttacattggctcgaattcttatgcaattgggtctaacttgaactgaataaactaaatatctttattagttcagttcttagatttatcctatttttcaaaactaaattaaccaaacttaaaactttttacagaagatagtgttgttagaattgagtaagatcatgatgagaggtaaaatttcttaatgagtgtttaataacataaatttatattcaaaatttaaagttgagataattcattaagttgcatgttaattaatctatacacttaatagtaaactttaattaaaattctaaattcagattaacttagatattttttttcctttttaaaaa

SEQ ID NO: 36820 - DNA, 218 bp, Glycine max
  Clone ID: PAT_MRT3847_133250C.1
ggctgggagaaggaagacgacagaagggccagttctgaatgttcacataataagtgagtgatcgggactaggatgtctctttgcacttgcttatttagttggcgcaagctaaagagctctctgggagacatctttgctaggaagcacaaataaggagcctacagggttgacccagaaaatcatcctgaggtcctttctcagctactagagattaacta

SEQ ID NO: 36821 - DNA, 585 bp, Glycine max
  Clone ID: PAT_MRT3847_133251C.1
acgaggctcaaaagtcctattcccccttaagattttagcagtagacttttcaatttaattcaagtctatgaatgaattcaatggttggttcagttggtcactttggctaggacatggttcttcttatgaaacatgttttttgttttcagttccaattttgcaagcataacatacatgtcagagtctactaaaactaggacacctctctgcaaatagaggatccgaagacaactacatttataactgtgccatatattccctttcatttgttaattttgtctaattacttgtttccataaggatttcttccataaagtgaaaaaaaattaaaaattttgaattaaaataaaatataaaaatatgaatttcatattattttgttgtttatttttctctcttttttttatccactttttatacaaatgaacaccccataaaatatcataaacaaaagatgtctaagtgtcttatcaatcaaaaacaagtgagttctcacaggataattggttaatagagtttaattacacgtcgtgaatttgatttttttttttttatatatatttaaccagaagtcagttgtcataa

SEQ ID NO: 36822 - DNA, 368 bp, Glycine max
  Clone ID: PAT_MRT3847_133252C.1
cccacgcgtccgaacgaatttatctagacttttttaaaatgacatacaaacatgaaaacgttatttatttagatggaaagggaaactacaccactattcatccaatatcacccttcaatatcaaatactatactttatacgctttacataggccaaaatcatatacacacttaataaatgaataacatattgagaattttacatgactcaaaatatttaacacatatgacctctacaataacagtaatattctactacacatacaaaaatttaagccatactatataccactcatcgagaagtatatcccaacatttcttaagcttagtaactttaaaacatacacatctatatggaatcaacatcat

SEQ ID NO: 36823 - DNA, 259 bp, Glycine max
  Clone ID: PAT_MRT3847_133253C.1
tccgtgactcttgagaccctctgagagcggcgccccctctcttttttcccccttttctttctcttctttaatatatctttgtatagattttggaactgtccgacgtgtattacagttctgaactacatatcgcagtggtgaacgcgtataccggaaaggtcggactaaactcccccagcacctacccaattgatgccgtggctcgcagatgcccaaactctccgtaaccttgggataaccgttcaacaccttctgcctt

SEQ ID NO: 36824 - DNA, 416 bp, Glycine max
  Clone ID: PAT_MRT3847_133254C.1
gtggatccaccgggcggcaggaattcggcacgagggttgttcaagacacgataagaggaggagtaaccgacgtttttctaactcttgggggggtcctttttcttcatgctcttttcatagaaaaagggcgtctagagacaacttgcgctgtcttgaggaacttcgtatataatgacgagttaaagctcaaggatgatattcttccagttccaaccaatcatgtccctcatcacactgtggagctcacaaatgaagctatcgactttatacgtgcgatctacctattgcatgacaatgataatgatggatctttacaaccttctccgtttgatgatatctatgtaactgcaccaaaaagtgggccttgatgacaactctggatccttcatattgtttccctaacttgatttgcattg

SEQ ID NO: 36825 - DNA, 1493 bp, Glycine max
  unsure (1)..(1493): unsure at all n locations
  Clone ID: PAT_MRT3847_133255C.1
cgggccggaattcccgggtacgacccacgcgtccggttctgcagcttcctggggttgacccaaatgacccttctgtcaggatttgctggcgtccatgcaaaatcagtctgaggttagtctttctatgaaaaagaatatattggatttgaaaggaatttcttttagaaaatttcagtgcaggccagtaaacgttaaccttgaacacctttcccctttctcccttcttttaattgtttttttttttattagaaatcctttgtgaagtgtttatgatgtctgcccattgaatgccttaaggacaatagttagttttgtttttttaatatgaaaacataatcagaccgcacaaccttgattatactaggttgagtaagaaaataaatgtgttcttaataacctaattttagaaattgttactcattacttcattagtgcttgtttttaaaatgtattttcaggtttatattgtgcctttaagtatattattagacgtgcttgcgtacgtttggcctggagaatcagatccctcctctatatatatgtatattaatggatcacgagatttttatacaaagactaatttgctaccaagcttaagatcttttatgcctagtgccctatcttaaacttcattttttttttcttttccttttgggggtgggggtaagtggtattttgctccatttcctgtaatgctatcaattttctgattgtattgtttatccagcctcaacagaagaatgacgacaagccatcaaacgaggaggagaagaagtaatctttgagaaccactttgccctgtatggttttattttcttggtagcattcttcgcggctgttactaatcgggggaactatttacgcatgtttcaatgtgtctctctgcactttaattggaaccaatgaatgtatctcgttaaatataaggatgattaaaaacttaaaataattgaataaaaattaatagatcctcaatttctaattttaagaagtatctaaacaatgttcagatcaatagcttaggaatacatatntaaggcaagctagtcaaccccacagtctgaagctactaaaattgatttagaaaccaccaagaaaaatcagcctttcccatttagctgctcctcacctttattagtggaggcttgtcgacccaagatggattttctctccatgctcgcagttgctcattcagttcagcttcagagtaactgaaagaccccccttttctttggacggatctcatcaaactcattccatcgtgttttgctaatctactcagctgtgacttaacaacaatttggagctgcacaaaaaacttggatattgcaggatctagtccccttggaaacccattcttcccgagcttttaagccgaattttgtcatctgtgagtcacccatcataagaatagggtaaaaacaatgatcaccccacggtatattattcctttaagccaaagctcagatcttagcttcgaaccggacgcgtgg

SEQ ID NO: 36826 - DNA, 3279 bp, Glycine max
  Clone ID: PAT_MRT3847_133256C.1
gaatttatctggaagcttgtctcttatatttttccaacgtgcggctcgagctcgagccgaatcggcggattgaaagttgaaagaaataagcattggattgggtatgagtgagtcggagaatagagagatagatggcgaaatcggggaataagaatatgggatcaaccgcaaaagttcacccttccaatgatcccgaactggatcccgattcttacgccctggagaagttcagactctacgaaaccagagcgaggttttacctaatcggaagtgatcggaacaagaggttcttccgggtattgaaaatcgatcgatcagaggcgtgggatctgaatatcagccaagaccccgtgctgtattctccccaggaaatcaagagcttgctccagcggattgctgaaggtaacagggccactggcggcctcacttttgtcgctaaggttttcgggattgccggctgcatcaagtttctcgagtcctactatttgattctcgttaccaagcgcagacaaattggttctatttgtggccatgcaatctatagcatcaaggagagccaattgatagcgattccgcatgtttcaattcaatctgatttagcccactctaagactgagctcaggtacaaaaagcttttgtctagtgtcgatttgaccaacgattttttctttagttacacttaccctataatgcaaagtttgcatgataacgtctcctccagatccagacaagaggtaaggatgttttaagataacttacttgttcggaatgccaaatttacactagcaatcagatcttgaggttattatacccttgggtccgtagctttagttcatggacattatgagaagatttgtcaatcatgtatccgttcgtttttacatattaccacatatacttccttatttctccgatttcaaggggtagttttaatgcctaaatctttgattattttctgattaatctaataagaattgtagtttattttagcattttaatctttttgggttgaccgagatttttatcgaggtcagggggactaattaatggagaggtgtgtgttctcaagtaaaacgaaagttttttgaatggtcgaaaaaggttttgatgtgatgttgagtaagaacagattttccttgatgaagaagctggttcttgtaagtgaaggatgagatcagctcatgctaagggcttatttgaatcactttgcctttcccctgaagaatcaatatttagccccaagcctgatataattttgcttacaatgaccccaacataccaagcaacaaaattgcattttgaagacctagctaagagatatggcaatccaattattgttctgaatttgattaagacagttgagaagcggcctcgagaaatgatgttgaggcgtgaatttgcaaatgctgttgggtatctgaaccaaattctaccagtggagaaccatcttagatttattcactgggattttcacaagtttgcaaagagcatgtctgccaatgttttggcagttttaggagctgtagcaagtgaagcgcttgatttaactggtttttactacagtggtaaacccagcatcattaagagagccaacaagagcaatcaaacaagcacagggggggatacttcactaagagatctgagagatagttctgggtatattgtgaggattgggaacaagtaatgaaatgctaaaatccagtggttaatcaagacaaagagactgacatgaaccataagaataaaaaagataattttggtagtgatgcaccacattttcagagtggagttctccgtaccaactgcattgactgcttggaccgtacaaatgttgcccagtatgcttatggtcttcaagctttaggacgccagctccatgcaatgggtttgactgatgttccaaaagtggatcctgatagtagtattgctgcagctctaatggatatgtatcaaagtatgggagatgctcttgcccagcaatacggtggctctgctgctcacaatactgtgtttccagagaggcagggaaagtggaaagcaacaacacaatcaagagaatttttaaaatccataaaacgatactatagcaatgcttacacagatggtgaaaaacaagatgcaataaacttgtttttaggttacttccaaccacaggaagggaaacctgcgctctgggagctggattcagattattatctccatgtatctgggattggggatgatctaattcctgagaagtgttctgaaccaaatctcagttcttctggaagaggtggaatgatattcacgcctataccagcttgcagagaagacttctctcgcataaagttgacatcatttgacaagttaattgaaaagacctgtagtacaattaaaaatgtaagactatgccgtgagccggatcagagaccaggtggggtttctggaaacagtggtgtagcacctgatgcagctgagatacagctcaaaagcccaaattggcttttcggccagagaaagtatgaagagggttcctctgctgcaaaagttgcttcttgtgaatctgacgttgaaggatctcatgctaatggcttttgtgacttgaattggctttcctctggcaatgatatgaatgaagaggatgttttccaaaggtaccttacaatgacctcagcaaatgaggccaacggttggtatggaggtagtctccttggtgatcaagatgaaagcagtgagatatataaacattatgctgagttatgtcagggacctgccttggaacttttccaaaatgaccctgataaggagcaacactatgcagatgctttaagcacgagttcatatgaaattgttaatgatgctgtcgttgcagcagaaatggaagcagctctaaaggagtatgaccaagttggtgctgaccttgggatcattcccaaatcttgtaaattctttgctgatgatccgagctggctgacgagatggttaactggggacgaaaaagtaccaaggatatgatgggacattattttgacatgtgtaatttgaacacttatttctgtactattttaactcgcagctccttatacgaaagtcattgtctaagttttctaatcaattgccaggccttagaaatttgattctttttttgttcccgggcggagcggtcgtcggtgcagatcttggtggtagtagcaaatattcaaatgagaactttgaaggccgaagaggggaaaggttccatgtgaacggcacttgcacatgggaatattattaatgaatggatgtttatgattttcgtga

SEQ ID NO: 36827 - DNA, 871 bp, Glycine max
  Clone ID: PAT_MRT3847_133257C.1
tacggagaagacgacagaaggggacccacgttaaggaatcctcttttcttttcctctttctttctttctcgtaatctttcatttttttccctcttcccttttttcgatggacacggacagcttcgtttccttcgatcatgtttcgccggaggattcccacgaggttcatgtcttggccgttgatgacagcctcgtcgatcgaaaggtcattgaacgcttgcttaaaatctcagcttgtaaagttactgctgtggatagtggaatcagagcactgcagtttctggggctggacgagcagagaaggacctctgaatctgatgggtttgtcccggatttgaaggtggatctaattatcactgactactgcatgcccgaaatgaccggttacgagttgctcaagaaaatcaaggaatcgaccatgttcagagaaattccagtagtgatcatgtcttccgaaaacattttgccgcgcatagacagatgtttggaagaaggtgcagaggatttcatagtaaagccagtgaaattatctgatgtaaaacggttaaagggttacatgacacccaaagaggttattaagatgagaagccaagaagacagaagaagtgatggctatgttaacggtggtgatggtgggggttgtggaagataaacaacaaaagaaagctggaagagcaagacacctctgacgtgtcattatcaccaccgtcaacttctaccctttcatcatcaccgtccgtttcctcaccatcaccgtcatcttctcctacttcttcagccagcgtgcttgcctctccaatcagacagcttaaatgaccagcaccgattgactctctggtatgtcatccacagcagcaatttctctttttgc

SEQ ID NO: 36828 - DNA, 199 bp, Glycine max
  Clone ID: PAT_MRT3847_133258C.1
ataaaaaaaaaaaaaattagagaaggtttaaatcgcactctcgtctaggatacacacttacatacactctcatacgacatcttatctctcttatattgacacatctattcaatacacacttcctctcttttcacaattttgactctgaaaacacctttcgtttcacaattctatatcctttcatctcatatcccttttt

SEQ ID NO: 36829 - DNA, 884 bp, Glycine max
  unsure (1)..(884): unsure at all n locations
  Clone ID: PAT_MRT3847_133259C.1
atgtcaatgtacaactcntgcttgtcatgatgcagagagagtgaaggattatcagcaagcaatgacttgtcaagatgtagtgttcctttcgattgatctgccctatcctcataatacagaagttgcttggtattaggatcaatggccatgaaaagttcatcagtaccaagtcgagactgatggatagctggattaggttttgaccgtttaatgaccatagtcattacagcattactatctttcttcttcctctctttatgctctagaagtgcctgagtaagcgacatattgcttacagtatctccactgataaggacaaagtctccatgtatcacattgcgctcataaattacacgtagcgcatctccggcgctgacagagttctgcgactctacagtcgttaccgtaaaattaggttgagagagccactcagatttctcgaggtagctaatgacctgctttgaatgagaacagcagaaaacgaaaacctcttcgacgccagcggattcgagccaagtgagcgtgtaatttatcatcggaacattcacgagcggcagcagcactttggggcgttcgagcgtgataggtctgaacttggtggtgaaactatcggccaagagaacggcctgcaacggaacccgaaccagttcgtcggggtcctctgaaaccctagcaccgctttttttctgtgcgcccattttgatttcctgatattgttttcttatccccgcgcaagcaaacaattcgagagaactgctatcgggaatataagctcaagactcaactcaacacaagtttgcagtcactagagacaaccgagtgtatggatttattccgtgttggtttattctattccgccacactacaatttaccggacgcgtgg

SEQ ID NO: 36830 - DNA, 479 bp, Glycine max
  Clone ID: PAT_MRT3847_13325C.1
ggtaaccatgactttgttgaagttccatgaagtgtggaagccagttttggtgatgattatagttaatttagctctggcttttgtcaatatatttctcaagaaggttcttaatgaaggagtggactacttgaccatcctaacatatcgacaagcaatttcagccattttcttgacacctattgcttgtttctatgaaaggaaaaggaagctggagggtcacataatatgtctgcttttcctaagtgctcttgtgggggtaacactcactcaatacctgtaccttattggactagaatatacatctgccacgttcgcatgtgcattcctaaatatggtgcctgtattcacctttattatggcgctgccactggggatagagaaagtgaacatgaaaaagctgagtgctaaggccaaggtgttgagaacttttgtgtgtattggtggagcttgatgttgatcctttataaggagtgccctta

SEQ ID NO: 36831 - DNA, 399 bp, Glycine max
  Clone ID: PAT_MRT3847_133260C.1
atgatagctggtcttagcatgccagaagttgcatctcgccatgaatgacaggaagacattgctcatgaaataactgcactgtgctgccttttctactatggatagcgaagaaattcacatgactccatctaattcgaattctgaaacaaaatcactattgaagtcttacacacctctatgtgtttagagctacaatcggtattgcactctgggctgcttgccggtattttctgtctctgatggctctacttcaggactggactataattcagcctatctccttcaatcgtttaacctatcaactatgatgatatatacggactggctaatggatcaaagtcagtccatggttgccgttaacgaacctgcatacgccattcaaatggcactagatgactg

SEQ ID NO: 36832 - DNA, 640 bp, Glycine max
  Clone ID: PAT_MRT3847_133261C.1
caattgctccaaacttcatgtttttgttgcattctctgttcttctgctggtgctactaatcgtgttcgtaaaaaagggaaggggaacgacgaggacggatcgaaagtgtgtacttttactagtcatacatgttatggtgtcggaacggaaagaaaggtgaagcgagaccaacctgggctcgtgcaaacggtacttctacatgggtcttcttcgcatctgatgatgcggtgcggtgcgatgcgtacgctcagcagggagccgccgactgaacgccatcatcgggtgacggcggaaggactggcgcattggcgcaaatggaatgagccagatctgatggagatgtggcttaggcccgacccgacatgcagcgtggccttgcccatcatctcgctgtcatgtgtggcataagaggcgaggtgtgatggattggccagacggagggtcgtcaaacgtgacagaactcctttacagcgccttgctgctaacgtcgaggcgcttggggagggcggactggatctgcttgatggcgaccttgtccttggtggtaaggttcttgacagcttcggcgcggaagagttctgcgttggcagcgtagcgggtgtcgtgctcgacgtcgatcttgccggccgcgagctccatg

SEQ ID NO: 36833 - DNA, 337 bp, Glycine max
  Clone ID: PAT_MRT3847_133262C.1
acattttgtttgctcacacaatattgggtctatctacactagcccacttttagctcaactcctagctgtccaactcacctgatcataccttctccatcttgtcagatatacatttatttatccaatttatattaactaaactgttttaacccttcaaccaacaatctctattgaaattattattttatagctcccttgataaatgaagttattatcttcagggttattcttcttcatttcttgaacatcggtaccattgtaatccattcaattattttagcgaatatcttttataaagatggccatcattttctcaaccacatgcttcttatttttt

SEQ ID NO: 36834 - DNA, 135 bp, Glycine max
  unsure (1)..(135): unsure at all n locations
  Clone ID: PAT_MRT3847_133263C.1
cggtcatgggaatttcttngnnctacacagacgtggccngaactccngcatnggcaaaggggagatttnnggnaaatacgataattggtaacattgacncaggtgtttggcctnaatccccaaccttcagtgaaa

SEQ ID NO: 36835 - DNA, 338 bp, Glycine max
  Clone ID: PAT_MRT3847_133264C.1
atggactgccaccccatttcatgatgttcaggttacaattgattggggtatttcctctcatgaatgtgttcccaggacctattgtgttttaaatccacaaaatccttttgtgttaaatatgtggatgggaatattgacttttccccagtgcactttccgaagtgttaagagaatgcctctttctatatttgtgaggagctgttgcaaataatgcttttctcattaatattccatatgcttttctttcaattgttagatattttgttttaaattctcttcttagaagattctgatatgaatttttccctttaatttaatatttacatgtcttctttttt

SEQ ID NO: 36836 - DNA, 503 bp, Glycine max
  unsure (1)..(503): unsure at all n locations
  Clone ID: PAT_MRT3847_133265C.1
accggtnccggnaattcccggngtcgacccacgccgtccggtgtggtaatcaaccactctactacgattcttcatttatgatcctcatctgtcgaaacctaatggccctggctctcaaatggactggaatgcctgatttgcttatgcatagaatggagagcctattggtcctagagcttattcttattggctttacaatgtaccatggggcatgtgcaagtcattgatcttcatataggagcgttttggaaacccaactgtactcttatctgagaaggattggatgatccggatcatgtgactcttccaaatggttcgcgtgacaccatctggttaaactgttacaaaggcgttttgactcatctaatgaaagcagtcgatgatggatgcatatgtggttgggtgctttgcatggtcatagttgcataactctgaatggaggctgagttacacatcaaggctagggattgtctatgttgctatctgagcccttaacagatacc

SEQ ID NO: 36837 - DNA, 278 bp, Glycine max
  unsure (1)..(278): unsure at all n locations
  Clone ID: PAT_MRT3847_133266C.1
gaagaaaacaccatcatagacgttacattgatatcaacagtactccaagtccttcaacaacattcagtncaaggaagacagttatataacatttatacaaaaaaaanaaanantnctggccatggctgcatcattattnatgccttcatccatngnggnggaanaagcnaggttcgaagccgaantggcggaggtgnaancttggngganctctgagaggttcaggctaacaaaanggccatacacagnaagagntgtagtntccctccgnggnaacc

SEQ ID NO: 36838 - DNA, 436 bp, Glycine max
  Clone ID: PAT_MRT3847_133267C.1
gcctcgacccacgccttccaaaccttccactttatttccatttctaaatttgttaacccttggtcctctcgggtttcaaacatcaaccatggcttcaataatacccttgttgacattcaccttgctctttctttctttcactttgtcatgtactattgacacctatactattctatacataccacattcatatgatgtgcttattgaacaaccttgatctttcaaagttacccatttaaacaaggtcaatgtataaatttttgttccaggaatagaacatatttgattctcttaacttgagcatgttgaaccttgtactctaaatttactgtgaattttagcaaaatcttacttttaaatggtttttatgttattaattctttgtatttttttttcatatcatatttttttattttttttatcattttcttttttt

SEQ ID NO: 36839 - DNA, 726 bp, Glycine max
  unsure (1)..(726): unsure at all n locations
  Clone ID: PAT_MRT3847_133268C.1
ctgttatcccggaaagccgggaagaatttaaaaaaaaaaaaaggagaaaagaagaaaacaaaaacgaaaaatggggctgcaggcccgccaaaaaaaaaaaaaaaaaaaacccagttccccaaattagaaaaccaaacccccaaaccctaaaagggtaactggggaacccccccagcccccctgggcgaaagggaaaaaagctgtggggggggggggctggtaaccccctcccaacctcccaaccaaggcaccctgggcccggggggctgggggaaaaagggaacaaaggccccaagctcccctttggctgggtgggaaggggcaatggggcactgaagggccaaactgcctaattgggggacggggggacctgggaaaaaaggaatgatcccttaaaaccacaaaaggcccctggtcccctttttgaaattccccaaaacccgaattccgaacctccgcgcccgggcggggaaagggttaattgtggtataggggaaccaaaaaccaacccccgggcccacccggtccaacggggaaaacgggaaaacccgggaccttccccacctaggggccttgccccccctcccccctttcgcctttggggaaaaagggaaaaagggccggccgccccccccttccaacattttnaaaanccaaagagaaaagggcccccccccgctccaagcataagggggggggggggggggaaccccccccccccccccc

SEQ ID NO: 36840 - DNA, 387 bp, Glycine max
  Clone ID: PAT_MRT3847_133269C.1
tatctgtatagcggccgctctgtggtcgctggtgcttttttctctgtctttccttcaatttcagtacttaccaccttctcccgggggctattgtctggtctgcactcttgcttctggtcatgcctctattaccctcacactgcctcctctgccgatttttttgatgcgtgacttagcctctttcgaggcggagtttctaacctgctcccgtctaattgctttgcacttgtgcaaaatttaccgtcaccttctaaaaaactactcatctaaacttttatcaaaaaaggagctcgactcgactcttgtgaatttggagggggaagactatgccggatatgctactctagacgctatctaagattgcctcagattacaacagcccaccca

SEQ ID NO: 36841 - DNA, 1599 bp, Glycine max
  Clone ID: PAT_MRT3847_13326C.1
cggctgcgagcaattccgagagtgatgaagggttgttacttgggatctgtagggatggacgaagaatgaaattgaaaagtgaaaagtagagatggaagaagaaaaagcagcggcatactacgacgagctgagccgtaagggcgagggagccgcgaggttcaagcaaggtctcggcttttcctcttccgcgccaaacgacgacgttccaaaaccctcctccttcctctccaaattcgtcaaagcctcctccactgcgccttcaaactctgagaagcaagcgcagcttcaatccatccaccacaagctcaagaaaaagccctcttccgagtctagggtttcgagcagcgatagcgatagaagtagaagacgaagcagagatagatacagggaatcgcggaggcgaagtaggagtagagaaagacatcggcatagggagagagggagacggaggagtagaagcgtttctcctcgcaagcaacgcaggtcggagaaagacgcgaacgatagagggaaagtgagtgaaacgaagaagaggaagaatgctgagattgattattacaagctaattccaggttatgaccgcatgtcatctgctgaaagagtcaaagccaagatgaagcttcagctttctgaaactgctgcacaggattcagaaaagggtgagggctgggagcgatttgagtttaacaaggatgcccctcttgatgatgaagaagttgaagttgctgaagatgatgcgtccttagtcaagcacattggccaaagtttcagattttctgcagttaaggcaagaagggaggaacaaatacaagctgctcatgaggaagctatgtttggtgctacagcacttctgcctcccaccagtacagacagtgagcctgaaagggataatgagaaggagactgataaaaaagaactggttacaagcctcttaagtgaaacagtgctggccaagcaaaatgggtcttggcgtgatcgggttcgtcaaacttagaatttgcacccttaaagttgatgctgataatagaaaagttggctgaatgttgaatgaagttgagctttaaccatgtctaaagcattcaattttgcgttgctcagtctgtatatggtgtgagatgggctttaaccgtgtatacaacttgtatctggttcctatgcaactggcattattttcaagcctataatcactagtgaggtaggctatgtgttactgtttatcatttttagagggggaagcagagtgatgtgtgaaacgccatttgtcttttgtgtaattccagtttcatagttaagtatttagaggaaaaaaaaaaaaataggatgatgctattcatcgctgatcttcacagcttacatccacagatttcatcatctgaatacagttggtcacttggtctgacaatggaacagttttctcaagaatgcgaggtgatttgacttttgggatgtgtattaagcatgatccttgccaatacgtgaaaaaggggggcaagggttcatgtgtagttaaatattgtgagttagcaggaaagtttttcccgtgatccatgttagaaacagttttcttaagaatttcatttcagactgtctgatatcgga

SEQ ID NO: 36842 - DNA, 435 bp, Glycine max
  Clone ID: PAT_MRT3847_133270C.1
ggaaaggatttttttttttttttctattttaaaattttttgatctaaactttttgtaaatgatttggtacaaagtttgttgctttgaaaaaatcagcccctttggagggattttttcttttgttaaaccaaaaaaaaagggacccaacattggtgaaaccaaagaaacttgaaaaattgggcccaacgagggtaacacgagggggccaacggagccaaaaccaaaaaaggaaaatgttaagggctgaaggaaaaggaaaaaaaaaaaaatgggccccccatgaacaaaagcatagcatccacaaacaaagaggaaggccgcaaatcccaaccccaggaaaataagtctttcaacaaatttggaacgagtcttttgggggggggccatgagggcaaaattcttcttggcagcacccccgggattattcttattatt

SEQ ID NO: 36843 - DNA, 515 bp, Glycine max
  unsure (1)..(515): unsure at all n locations
  Clone ID: PAT_MRT3847_133271C.1
ttttttttttttttttttttttttttttttttttttttttttttttttttttttttttttttttttttaaaaaaaaaaaatctttcccctccccccaaaaggggaagcaaaattgggttttcccccccccccccccccctctttgggggggccctaccccttaaaggggggaatccccgattcccaccccttttttggccccggtttcccccggtggggggatcccctttttggggaaacaaaccccctttttttttgggtaatcccctccccagagggggcccgttcccccccttcggggggggaaaaaccccgccggggggttccccctaaccaaataaaaaacccgggggggttttcccccgggcccccccgccggggtcctatttaacattgcccttcgcggcggacccgacggggttttncccgcgtttgggggcggaaggaatcccccgcccgcgaggtcccgggggcctctgccccccgcatgggaggggagagctcgggagtcccgg

SEQ ID NO: 36844 - DNA, 110 bp, Glycine max
  Clone ID: PAT_MRT3847_133272C.1
tcttcctctcacgcatacggattcgaccacgggggggttctattcaagtatctgcaggtatacacacactcaagaacattctattttcatattcacctgtagtgtgaaac

SEQ ID NO: 36845 - DNA, 473 bp, Glycine max
  Clone ID: PAT_MRT3847_133273C.1
cccgcgtccgcgctctttggcgacgaggaacagcctttgctgtttcattctgtatcaattctcttaattagaattttgattttagtttgacccttaattgttcccaagtgctgtgtttggcgggttgtctgaagtttgaattttgaaagaattgacaagaatcagaatggggtataagagatgccatgaggctaatgaatttgaggatctttctttgaacaaggcaaaacgttttgaatgcaacaatgaactggtttcattagctgatattgttacacccaacaaggcctttgcccagactgttattaaaggtgatgatgaagatggcttttacaatattcaatggcatgatccacttgaaacagatgctgccaaggaatttccatatactggtgacaagaatgttcaaaccagtggccacttcagctgctattctagtgaggatgatactgggtttgggggaacatggttat

SEQ ID NO: 36846 - DNA, 108 bp, Glycine max
  Clone ID: PAT_MRT3847_133274C.1
cccacacgtccgaccacacttccgaccactccttctatataaatctatatctttcccccagaacattcattttcaaactttggattaaccaacacttctacacattat

SEQ ID NO: 36847 - DNA, 278 bp, Glycine max
  Clone ID: PAT_MRT3847_133275C.1
acggctgcgagaagacgacagaaggggaggttacattggaaacatattatgtggctgagcgatcggaaaaatttatcttacttatagcatgtaagatttgtatgactgtctactcatgtgacacaccgctgaacccacagtcaaaaagacttttgatataaaagattcttaagttaaggatctattatcatcattttatttgtttgagttagtcaccaaattaaactattgattctaatatcaattgttggaaaattgagaaggtaaaataagagaga

SEQ ID NO: 36848 - DNA, 435 bp, Glycine max
  Clone ID: PAT_MRT3847_133276C.1
ctcgagccgattttgcatgctcttctcttcccaagaataagcaccgctcaaacagataccatttttgaaactccttcttctctgttttcttctctgttttctcctctgcttccattctgcatccacttctttctctcttcttctttgtttctttgtttctctgtctctcttggtccctcaccaaatgtaaagaaggattttctcacacccggcgccattagtccttctttcagattttaggtgtggttactagttttttggatttggaataagcatttccataacagaataccatgtccatttaagtgtgtgaagaagagggggaaaatagaagagaaggaaaacccagaaatggcaaccacgtataataacgtgaaagagtttacgagcgacgacgaagcatctccgagggcgattctggagacccctgtttcg

SEQ ID NO: 36849 - DNA, 262 bp, Glycine max
  Clone ID: PAT_MRT3847_133277C.1
gcctctcccttcaaattccggcccaaaatgccacacttcattctgggggggcatcaattggttgcaagagtggcaaccatgcttctcaatcgaaattcacaagctcttcattcttgccctgggttaaaggtgatggtcgcgctctaaaagcttggaagaaaaaacttgtgccatcttccatttacttggtgcctcgagccacactcacatttgatgccccaacttccaactcagacaaaaccaaacaaaggaagcacactgt

SEQ ID NO: 36850 - DNA, 2435 bp, Glycine max
  Clone ID: PAT_MRT3847_133278C.1
ataaacaagaaaatcatctcaacttcaaatatctacaatctagttttaacaaataaaagaaagaacattgatctaaattagaaggcaataataatgtttacaagcaggctaaaaaaacaaactattaaatatgacaaataaaaggtcacatcagtaatacaggggaacgggttaaatctaatatggtacaaaatacaaacctaatttagagcatctataatgaaggtcacaactcaaaccaaatatctaccttaacttatccggagaataatgaagataaaacctagctatgagatgcccacatgcccctaatttctgcacaggtcaaatattatttgcccaactaaaatcatgcatcatcatcatcatcatcaccatcatcatctttatctgcatcaccatcattctcagcttcttcatcttcctcatcagacatgttattaattacatctgtaattatatccttcacctctgcttttctatgcattaaatccagaccaaagtgggtaccaagttgcctgaggatatcggataaagttgcagtattgaaatctacttccttcagaatatcaacaactacagcatgcatgtcctgcttagtgggttctgccttggccttcttattacttttacttttcccttgatccttaaccaaagcctttgaagatttgtcagtttgttttttgcttgcagttttccccttagtgtcctgcttttcactaacagttttctgtttcttggatgcaggttgctttgacttaacggaggcagaagcactgtcatgctcagcaacactcttttttgaagttgtcttttttttaattttttcaatgctcttggcatctttaacaggggtcttcttggcagatgaggttctatcagctttgctaactgaattctctttaacagattttttggaagtacgcttgtgagactttgatttctctttctgttcctctgatttacttctttcatcatcactttcattgttcggtactgcaacatcttcatcttcctgagaaacatcttttgcatctgaaagttcagctttatcatcctcctcatcatcagaagacggtttttgctttttcccagattgggaagtttgtttttgcttcttggcaggtgtctctgtagatgcttccccaggagatttgctagggactgactttctggttctctttttacctttctgttctttatcagcaagtagaatatccccttctgtcttcttctcgcagcctacccaggagatttgtgcgggaagctcctcctggttcacattggacctgtctgtttgaaatcaacgagcatcatagaagtcctacaacttgtctacgacaaatttttcaacactttcctagacatgcaccttctttttcacatcagtcttagtcacctgaacatcaagaaaactagccaagtactacactttaaattgtgtacctttgttttttttctactcagtaaaggatgactcattgtcatcttgttctctcgatatctctttgacaacttgaaagacatgtctcttgatatcctttgccttcgtgttccgtcccttttagtttagcatacattcataagcagagggtcatcaggttttctctttgacaacttgaaagccgacgtccgggatatccttgagctgcgtgccacgtcccttttcaattattaaacctttactagcggaggaccttgcagacttcgccggagagggcacagagaagcgctccatcgttttcctctccctcgtgggcctctcactcggcgccggcgtaaccggatccttcttactcctcctcctcttacccttacccttcgccttctctttctctttctcttccgcttcgtcttcctcctctttttcttcttgttcatctttctcctctccgtcttcgtcgatctcttctttcttctcctcaagggcgtcggcttcctcttctacttcctgattgccagctgctcctccgtctttgtcgccggcattcgcgttctgggatttcgccgcggcggcgtccgaggaagcgtctttctcgggaatctccgatttggcgtgattgtcgtcctggaggggaggcttgttgtcttctagggcttcggaggccatgtttttttttttggggtgggggtggagaggaattgggaaccctagcggagagagaaaccctagaattggaagaaagggaatagaatctcgttgtgaattgggattgggattggaattagaatagagagagaaagaaaggagggaatcgcgaaatgaatgaaaattggagtttgatgagagggcgcgcttaagggtgaaacttgaaagagtggttttcaaaatttgatgccaaaattgtgagcgggtttctacactcactcactcactatcaccatctatcactctagttcccccttgtttgtttttttctttttttcttttctcc

SEQ ID NO: 36851 - DNA, 696 bp, Glycine max
  Clone ID: PAT_MRT3847_133279C.1
tccgggacatctgtatacctatcataatccagactccccgctaaacacaacaattatgggctctaagacactgttgattggcttgatccttgtgcatgcattgctactttcctattttagtttcataaccaatgcttccgattctgatcacaggtcattgttgaatttccctcaccctcacatgctgcaggtcaagacaattaaacgcaggatcccgactccaccgcctccgaaacctaatggacccattcaaattaagccgccatatcctagaagccgagcaccgcctccgccgccaaattaaatctagcaacagcatgttatgattgttcaagtttcttagtaattatggcttactgcctcaacgtgttttgattacgatttgcttcacggattcactattgtttcagtagtctctattattattattattattgtacattcccactagccataccaagtaactgactgacgattatgtggtaggattagtagtcgctcaataatccctattattaaggcattaattagttgcttgttctttttctctttttgaacttagtcaaataccacgcacgatcttaactcttaagaatctaagtcgcgcgctgctatttccttttatctactttccttgtaaagctatacaatggcttatactatgttcaatgaaatgcaatttttcttgaacgcaac

SEQ ID NO: 36852 - DNA, 527 bp, Glycine max
  Clone ID: PAT_MRT3847_13327C.1
agagacaagggtaaaacaaaaagcattattagattgactgacattattctgatctattatggcgccatgaaaatgaaatccatgcagcaaataaagattttaccaatgcacaaaacttttcttgacctcattttataaaaggtcttatgaaaatgtattgtgcttgtcctataaaacgacctttaatgatgaagatgtcgggacataaatatatatttccttggttaacacctccataggtacattgatctcaaggcctatttacctgaattaagactcttgtgccctcttccattagagacatttatcggctactaccaaaaaatattcatattgggctctaacagactaagatttgatgccaaaggacattgtacatgcttctacaacttgataattcccccaaatatgctgtctatattaactatgtcggctaacacggggggaccttgtgcagcggatatacatcatgcatagatggctttaataggctacaaacactggtccaagctccatggttacaacct

SEQ ID NO: 36853 - DNA, 274 bp, Glycine max
  Clone ID: PAT_MRT3847_133280C.1
ctgcacatggctatcaatctattgatgacatttcatatggttttaagaagctacatgaagatgcagatggaaatggttcactggtagatggtgatactcatgcaattggacctgccctccctgatgatgaggaggagctgttacctggcataacaggtgattttgacctacatggcttgcctggatcccttgaggacttggaagagtatgatctttatggtcgtggcggaggtatggtactagaaactgatgcacaggaaggtctcactggggg

SEQ ID NO: 36854 - DNA, 320 bp, Glycine max
  Clone ID: PAT_MRT3847_133281C.1
acgcgtccgaacacgcctgcacgcacccgttcgtacaggtccacggaggcgccagaaggggacgactgaacaagataagactgtccatagctctacaaagaaaagaatagcaccctcgtccacctcactctactttgcgcccttacctctaacctaccttaatccaccggtcgtgatgtgacaaacactgatctggataaactttaaaatggccgcacatactttgcgtggacaacatataatattaaaccagctgtggaatataatatagcaacatttgaaaaataaactttgcctcacactgttgagcaataatggcg

SEQ ID NO: 36855 - DNA, 151 bp, Glycine max
  Clone ID: PAT_MRT3847_133282C.1
acaaacatcttagaatttcttttatttcatgaaggagtacagattactaaggtaacaatagctattatatattcacacttatttttagaatggaggcactgtccacttattatagaatcacgagcagctatagtccctgaattagatatgc

SEQ ID NO: 36856 - DNA, 302 bp, Glycine max
  Clone ID: PAT_MRT3847_133283C.1
aaggtttgttgtgagctatcacctagtttttcgggaggagaatatcaagttgttggttttctttgtagctgcaatatttttggtagcatggccatgccatggcgcatgcttcctaacgtttcctctccgcatgataactggctatggtgagcgttcttcggagggtaaaagcgcaagttttaggctcgctgtgttatcacacaacatccgagccctttataccattcctgaagatgtgcgtgggtcctactatggactacatttatggcgtacaatttagatcagactctaaaacaattacc

SEQ ID NO: 36857 - DNA, 515 bp, Glycine max
  unsure (1)..(515): unsure at all n locations
  Clone ID: PAT_MRT3847_133284C.1
gaattttatacctccgcaccctagtctagatgatttattgcttctatgtgctggactctgtgtctgtgatgctaaacttgtttgtgtgtctaattattgatggggtacaagtttcgtgatgagggataaatcttagtgcagtgcagacaaaaacatgacatatctccattggcttattcattgattttttttaatccaacaggcaagaaagcgtaaacagattatagacaataatagaggggataatcaaaattatctacaaataaataaagtgatgataaatataatcagagggggcagtgattggggttggcggctttctggggagtcagggcggggatggaaaaaccccgtcatcatgcctacttgaatagcagtggctctgctattcaagagacacaggcttgtcagaaccatttgcactgtgagaaattgtttagttaatgaagttcgcgtgatgatattaagcttttgcatcaacccttntccattcattttcatttgatcacatgaca

SEQ ID NO: 36858 - DNA, 294 bp, Glycine max
  Clone ID: PAT_MRT3847_133285C.1
accagtgaacatgggtattggggattcatgatctcctctaattcacacattagggggatacacaacaccaaggcttataaaatggcgccttgactttaactcattatcttcttgcgacctctgtttgatcactcacgtgcgcctctgcttggatgaacgtgccattaacatcattatatggaatgaatgaatgaatgatactcgatgatatatctcatctgactcgttcggaaacaaactcatcacttgtgatgctgctgctactactccacacaacctactacagggggggca

SEQ ID NO: 36859 - DNA, 566 bp, Glycine max
  unsure (1)..(566): unsure at all n locations
  Clone ID: PAT_MRT3847_133286C.1
tcgatctatcgctacgaatgtaccagagtaccgtacaccaagccggcctggcgccgacaacaaaggccctcgcgcccacggcggcaagtcccaactaaaaaaaagcacaagttagtatagactagcttgttaacataaggaggttgagtgcagtcgacatcacactatcaaccaacttctcctccgccatttccgtcaattccacaaccggtggcaacggcttactgtctatccttgtatgtgtaaaggtcgttgtattatttattagtatgcccagtagctgccgccaaatcatacagaactactgccgcttaccaagtaaacgtgagccgccggttaggcaaaatcgtaacccggctatgcataaacggcaaaatccgcagaaccgtgtgtggccactgcaaagtatgagaggcctttggtatatgttggcttatatataaccgtagagaacggatgagcggatgcctaaacaccagcactaattcctgcgggggatgccacagataggcgggaggctgacggcgcccaaaggngggccaccaatgctacaatacagcgagtac

SEQ ID NO: 36860 - DNA, 467 bp, Glycine max
  Clone ID: PAT_MRT3847_133287C.1
ggtatttgtttagaaacagacccattatgaaaaatagttgctaaaagaagcccctttagggcaatttgcccgattctgtcatatatctagaaaatgactttgatgggagaatttggctagctctttatcaactttagtttttttttttttttttaaaaaaagaaattaatcttagtacccacaaaaggaaaatgaaacaaatgtggttttgttctgagttaggtatggacctatagtgatgattggttctccggtgtttctaaggtcactactattcttcatttcaagtttttattttttacaaaaaccaacttcttgaggttcttcacttgcctgttacaaaacaaatagtgtattaatcttatgaaatttagtatggaccttaataattcaccagtttctcatttcaaatttaaaagaaattaatcttagtacccacagaagtgtatttttaacaaaataaatag

SEQ ID NO: 36861 - DNA, 162 bp, Glycine max
  Clone ID: PAT_MRT3847_133288C.1
caaagctattttttgtaacaggtaaagctattcgcagaggcgggaccaagctattctgcacaactcttccaattcattgcttccatgactccctctcactacctcgcttgggacgtatggcacttgggagctggcccaagcttgtcaatatcttttagtctg

SEQ ID NO: 36862 - DNA, 308 bp, Glycine max
  Clone ID: PAT_MRT3847_133289C.1
gccacgcgtacgattaaattatgggacatttatcaatggttagtgcaaaacaggaaagaggaaagctggtgcacggttactgatgaatctagaaagacactacgctaaacctgatttggtaatgtacactacaagcatttattgcttatgcaaaaataaacttctaggagatgccacgagatttgtactcttagatgattgataatggaaattccccgaatgttctcacctacactactctgatacatggatatggcatcatgggttatttgaaagaagcattttcctagttgaatgaaatgaacctg

SEQ ID NO: 36863 - DNA, 1040 bp, Glycine max
  unsure (1)..(1040): unsure at all n locations
  Clone ID: PAT_MRT3847_13328C.1
ctcgagccgctcgagccgcatttttattggccggttctccccacaatccatgtttttatatacttggccttcgccttgccctccaattttttataaccatctcagttcgtgagagttctcttgggctcccaaagagtccatctggtggaataaggaaacagctttcacagctattggttgctctaagaaagcctgaaatctcatattcaatatcatggtttacagcatcttacgccattattcctgcacttactgggaccatgttcttttaccagacacagtatttgaaaatagactcatcagtattgggtatctccaaggtgtttggccaggcaacaatgctcttatggggcatcatatataatcaatacttcaaatctgtcccaccaaggaaactgatatcagccattcaagcaatgatggcattcttaatgatttcagatttcttgttcgtgcgaggtttttatcgacaaatgggtgtgccggactcgctctatgttgtgattttctcaggattcttggaggttctatttttctttaagattctgccattcagtgtcctaatagcacagatgtgtccaccaggatgtgaaggttctataatggcatttcttatgtcttgtgtagccctggcattaattgtgagtggataccttggtgttgcacttgcatcatgtattaaggtaacagcaagtgacttttcaggacttccacttggacttctgatacaagctgcatgcactctcgtgccaactttttggtcatcatgcatacctgacaaggtagaatcaaaagccaagaggaaagactaatttattagcttttagagatataaaatataataatgtgattcaaggaaatagtggtatgatgctcaagtgattgattctgtttcatttctttgccttcatgcatcagctggcagatacaagctatatcagttggttttctagattttttataccaaatattaataagtgatagggtgtaaaggtatagtgtgaccatgtgatgatcatgttcgttcannnnngtgcnnt

SEQ ID NO: 36864 - DNA, 122 bp, Glycine max
  Clone ID: PAT_MRT3847_133290C.1
tgactgcatgtaacgcgaattcatgatatggaatatgaagagttacgatcacaacgatgacagcaagaattgaccctcaaccgaagtcaatagaatcgggttgttactgattaaactcaaaa

SEQ ID NO: 36865 - DNA, 247 bp, Glycine max
  Clone ID: PAT_MRT3847_133291C.1
acctttgactcttgaggaggtggctaatcacaacatcagaaaggattcatggattattatcaatggactggctgatgatttcacgccatttctgcatgagcctgctgcatgatatgcagttttgggatcatgcccacttaaggttgccacctatgattttccatatgccttccacagtgattctgacatacaactgttcgaaagatactctggcgctgacgttgactctgtctctctttcatcgaca

SEQ ID NO: 36866 - DNA, 300 bp, Glycine max
  unsure (1)..(300): unsure at all n locations
  Clone ID: PAT_MRT3847_133292C.1
tgaaccatactatggtaccttctaatatttttaatagccttatcatttcattatttctgttctaatcttcttcaaattgattttgattttctaattaattaaacccatttcattttcatggctcgatctcccattttcttatttgtagcctgcgactgtataaatgtctttaacaaataacacggttggctgacaagtttgtatcatctacttacttaattgatcaaatactgaattagtgaattctaatttattattaaaaaaaaaaaaaaaaaaaaaaaannnnnnnnnnnnnaaaaa

SEQ ID NO: 36867 - DNA, 308 bp, Glycine max
  Clone ID: PAT_MRT3847_133293C.1
ttcaaattacttccctatcaactttaggtggtattataaagggctaccatcctaaccacatgttaccaataattataattctattccataaatgcaaccttataaatcattaccacatccaattaaggcagcaatctctcaaattacccaatcctcacaccctaatttattaacaataaataacaatactcttctcattcaatctcctaattttaatcattacaatctaaatcccttaaccattatccattatatttcaaatcttataccaacatcctctgtaatttcatttccaataacatatattt

SEQ ID NO: 36868 - DNA, 289 bp, Glycine max
  Clone ID: PAT_MRT3847_133294C.1
accatttctaccaaaccttacgaccgttgggagacttgccctttatctaacaaaccctgtgggccttgagatgcccatcctttcgaatttgatccataatatatcagttctgaacgcgcacgaccgttggcaatggtatgctgattcttgctggcttggaaagctgtaacaagatctttggtgagcatcctgacaaacagggtggatgatgaggatcaccaccatccgaacttttaagggatggcggaacatgcgagggagactttcacttagaacatctaccgctccc

SEQ ID NO: 36869 - DNA, 426 bp, Glycine max
  Clone ID: PAT_MRT3847_133295C.1
atgttagtgtagaactccctgtttaaattatgcagaatcagcttttttacaatatgtttgggtgaacttaaaaaacattttttagaaaatgttgctgaaagtatgcccaaatccaaattctaaaaacaaagaatagtcgctttcagtgttttcctatcatgttccaattcaacatctcaatggttctgaatgctactggtacctctcaacctttattcctcactctcttttgccactcatcatttgctcaaagttgacaaattttaaaaccatttgtcataatatcattttggtccatcccatccattcacttcatggtagccgtggaggcaaaggggatatcttggctctaggtgctagttgaagaggatgttgttttggcaaggagagatggagaagatgagtggaaaatagatggaagaagag

SEQ ID NO: 36870 - DNA, 413 bp, Glycine max
  Clone ID: PAT_MRT3847_133296C.1
tgatcccaatcattccatacacttggaatcccaatcccaaaatcctaaagcatttttatttattaaaaaaaaaagtatcacaaggattatttattgcaacccattgatcacactttttttttcattattattattatgtccaattcacacttgttctatggaaaatgtgggattctccgacatcaccgcccgctgcagatcctccaggcacacatcgccaccgcaaaacagcatcctcgcgccacatctaacggcggcgttccgtacactccgccactcgcacccaactccattcaaatgattcaacacttcgcacaacaccagctcctccggttcgaaagtgttccttacgtaaacaaaatccccaatccacgtcacctccaccgaatctaactccgaaccactgaataact

SEQ ID NO: 36871 - DNA, 232 bp, Glycine max
  Clone ID: PAT_MRT3847_133297C.1
tacaacgacatctcagacgtacttctatcagaactcacccccactgagtgctcctgcagcaccacgtgctgcatataacacagccaaagctccagattgggatgctgcttgcgctaacaaccatgatccatctggtacgccagcacttggagtgcatgcatcagcttataaaaatcaagtctaagctgtagaaccagagacgattctaccaaagatggaagtgtccccccta

SEQ ID NO: 36872 - DNA, 474 bp, Glycine max
  Clone ID: PAT_MRT3847_133298C.1
gttgaattctgaagttcttaataatttgtacgcatacttcagaacctgaatttgcttctctcttctcttaccaggtttgtgagctggatttaatttttaattttcataaggtaattcattttttctcatactgtattctctccaattattagtaaatttgaatatgaaatccccacactaatagtgcacacagttcatctatagtctatgtggtaaatgagactaggatcccgtgcagtctactttgtgataaatcatattgtctgttttttaatataaatttcaaagtcctatataagtaagaatgctaatgatttaagggaagaaaaataatctaccatttactcttcagagttaatcttaatctggggctaaaaatgagcttgatcttggcaggcatattttatattggatgaaattttgttggctggagccatgcaggagactagcaagagaactactctgagactgata

SEQ ID NO: 36873 - DNA, 586 bp, Glycine max
  Clone ID: PAT_MRT3847_133299C.1
cccacgcgtccgcccacgcgtccgttcctttcctttcctttccctgctattgctatgcctagttgctaacaccctcttcctttctttcctttccgaaccttcctcgtttttgatgctttgacttcttccaattgattctctctctctctctctgggttctctggcatcaaagttcgtacctttttgtgatttggaaggatctgatgccagtttggttttctggggtggctgtgttccttgtcccactttccttctttttataggatacttgactaattgaaaaaattccttttgttttcattgttatattatagtcaagttatttgatgtattttagttcttcagtttggaatccgttttgggtttggttatgctgttatggtggctttggaagtttgaacaagggggattcttagatccttttgcactttccctctcctgaaattttgcagtcatatcaaatatttgcgttattttttcttctttcgtaagagcatagctcttgaaatagagaaagtatctttagcttttttttttttatgttaaggaatcttgtgaggggttggatcagatgtcctgtgagttc

SEQ ID NO: 36874 - DNA, 825 bp, Glycine max
  unsure (1)..(825): unsure at all n locations
  Clone ID: PAT_MRT3847_13329C.1
ccacgcgtccgattttctgcagttgaggcaagaagggaggagcaaatacaagctgctcatgaggaagctatgtttggtgctacagcacttctgcctcccaccagtacagacagtgagcctgaaagggagaatgagaaggaggctgataaaaaagaactggttgcaagccttttaagtgaaacagtgctggccaagcaaaaggggtcttggcgtgatcgggttcgtcaagcttagaatttgcacccttaaagttgatgctgatgatagaaaagttggctgaatgctgcatggagttgagctttaaccatgtctaaagcattcaattttgcattgctcggtctctatatggtgtgagatgggctttaaccatgtatactacttgtatcaggttcctatgcaattgccattattgtcaagcctacaatatcactagtgaggtaggctgtgtgttactgtttatcgtcttcagagaggaaagcaggatgatgtgtgaaacgccatttgtcttttgtgtaatgtcagtttcataattaaatatttaaagggaaagcttgcaaatggatctagaataatgttattcatctctgatcttcacagttttcatcatctgattacagttggtcacttggtctgatattggaacagttttctcaagaatttcatttcagactgtctgatattggaacatttaaggcaagaactatttgttttcattgaaagtgtcgctatctttagatcaaagcatgcaagtaattcaaattttatttgaacgtgtcaacatggtatcaaatgtagaaaatatgtaaacttagntcaactgctttt

SEQ ID NO: 36875 - DNA, 366 bp, Glycine max
  unsure (1)..(366): unsure at all n locations
  Clone ID: PAT_MRT3847_1332C.1
cgcgtcggaacctgtttccagtgcggctgtggttgaggcatcccccccccccccccccccnnnnnnnnagaatgaaaagtacgccagtccacctcccaccgaccaaccagttggtctccaaacagttcccaatacaaaataatcgttcttcatccctcctggaggatcccaataatccgaaataaacctccgaccaggcaaacggtcatcctcacattgtcacataacaaaagtccaccgtgatattacgcatgcatcaattccacgtaaaatatagcttgcgagacttacgccccgccaagcccccaatcccgtcccctcataagagtaagtcaggggcccgacaagcccccagatgtccggccc

SEQ ID NO: 36876 - DNA, 451 bp, Glycine max
  Clone ID: PAT_MRT3847_133300C.1
ggaaaaacgcataactgaatcgacgaaactgaggcaaaacctacatagggaaggttgccccaatatcagcatgcttcccattgcactgcactcatcccatgcgaattaagctttccgattcggtgagttatgacccttttcatttcattgcatagtataataattttattgacagttattgaaatgatttctggtttgtacatccattttttctgagatcatcatcttaatgcatgaatttcccttagttttgattaattgggttggaaggaagagaagctgtgattccgtgattgaattgaataattggaatacaacttcttttcatcttgagttaacggttttcgtttctgattgctagctatgcagcttttaatttctagttctaattagttgcttggttttcttctcaagttatctggttcatgaaaaaaaaaaagtaaagtgaggg

SEQ ID NO: 36877 - DNA, 1148 bp, Glycine max
  Clone ID: PAT_MRT3847_133301C.1
cctcttatgtgtgtccgtgattcattgatctttacccttctttttttttttcctgattcattaatttgatagcagttaaacggcaccgcgttccgtccctcctctctctctgtgtggttaacagaaagaacaacgctgagatccaatcacaatcattcattttcattcataccgttcgcaacacgatcactatttctgcgacgatggtggcacattcgagttcttggggcagggcactcgtggccatctcgccctataccttctctgccatcggcatcgccgtcgctatcggcgtctccgttctcggcgccgcctgggggatctacatcaccggtagtagcttgatcggcgctgcaatcagggctcctcgaatcacttccaaaaatctcattagtgtaatcttctgtgaagctgttgctatatatggtgttattgtggctattattcttcaaacaaaattagaaagtgttccagcatcaaatatctatgcacctgagtctcttagggctggatatgcaatctttgcatcgggattaatcgtgggctttgcaaatcttgtttgtgggttgtgtgtaggaataattggaagcagctgtgcattgtctgatgcccagaactcttctctctttgtgaaaattcttgtgattgagatctttggtagtgcgctggggctattcggagttattgtcggaattattatgtcagctcaagcaacatggccgacaaaagtttagtttcccttgtatcagaatgtggtgtgggaatgctattatggtagagtgcaatatatcctctgcactgcccgggattaaaagttttctctgtttcctgttggtagaaatgtaaaatccagcgtaatagtttgcctccattacaacattaggctgtattatttaccaatgagttgttaggtcttgtgtatcatcagatatatctgtctgttggttgaattttaatatttttggaggactaaatctttcattaatcaataaaaaagtgaatttatttgtgcttgtgaataaactcaacaagcattttgttattaccaaggaaaaactatttgggttcagagattattcttactaagaatttgtgattaacagtgatgagtctgagattatgaatgtcagcaaggagttggtgtcaga

SEQ ID NO: 36878 - DNA, 482 bp, Glycine max
  Clone ID: PAT_MRT3847_133302C.1
cccttttgtccgcccacgcgtccggttaaacggcaccgcgttccgtccctcctctccctctccccctttctctctggttaacacttaacagaaagaacaacactgagatccaatcacaatcattcatttcattcataccgttcgcaacacgatcactattctgcgacgatggtggcacattcgagttcttggggaagggcactcgtcgcgatctcgccctacaccttctccgccatcggcatcgccgtcgctatcggcgtctccgtcctcggcgccgcctgggggatctacatcaccggaagcagcttgatcggcgctgcaatcagggctcctcgaatcacttccaaaaatctcattagtggaatcttctgagaagctgctgctatatatggcgttattgtggctattattctttaaaccaaattagaaagtgttccagcatcaaatatttatgcaccagggtttctaagggctggatatgc

SEQ ID NO: 36879 - DNA, 686 bp, Glycine max
  Clone ID: PAT_MRT3847_133303C.1
gagaccaaacaaaacactgcacctggttaaggatggagtatagcatggcacagtctagttgcaaaactttggtgcagtggttggtagcagcattgctcattgccttgttgggtggtgcacaagctgttgcaatatgtaacatagactcaagtcaattaaacttgtgtcgtgctgcagttactggtcaaaaccctccaccaccggatgagaaatgttgtgcagttgttcgccaagccaatttgcgttgcctctgcagttacaagtctaccctaccttcatttggaataaaccccaaaaatgctttggccttgcctggtaaatgtggtctgcaatggcctcctaattgttgagtgtagtgaagcagtcaatgaaggtcacggactcatggtcattacaagcaccttagtcttcaatattgctttcaggtgtttcattaacactgaagataaattttaagacagcatttgatatctctcgaataacggtgcagtttattttaatcagtatgtaatgtccaaaagtttgctagcagatgtgtacgtgtattagtgtttgatgttgcagaggtatttgaagatatatcattactcttttccctctatatgtctaaacctgtaatatgtataataaaatgtctggtttttggactctgattcagtggaaaataaataaatgagacagccagt

SEQ ID NO: 36880 - DNA, 657 bp, Glycine max
  Clone ID: PAT_MRT3847_133304C.1
agtttcgcgagacaagaccaaacaaaacttggcaccaggttaattaaggagagggtatagtatggcccagtctagtggcaaaactttggtgcagtggttggtagcagcattgctcattgccttgttgggtggtgcacaagctgttgcaatatgtaacatagactcaagtcaattaaacttgtgtcgtgctgcagttactggtcaaaaccctccaccaccggatgagaaatgttgtgcagttattcgccaagccaatttgcgttgcctctgcagttacaagtctatcctaccttcattcggaataaaccccaaaaatgctttggccttgcctggtaaatgtggtctgcaatcacctcctaattgttgagtgtagtgaggcaatcaatgatggtcacggactcatggtcattacaagcaccttagtgttcaatattgctttcgggtgtttcattaacactgaagataaattttaagacaacatttgatacccctcgaacaacggtgcagtttattttaatcagtgtgtcatgtccaaaagtttgctagcagatgtgtattagtgtttgatgtgtacaataatacaagatatcattactcttttccctccatgcccacacttttaatttgcttaataaaatgtctggtttatggactctg

SEQ ID NO: 36881 - DNA, 914 bp, Glycine max
  Clone ID: PAT_MRT3847_133305C.1
gcacaagggcctgaaaagatgcttgtatatgagtatctgcctaacaaaagccttgatcgctttctgtttgataagagaaggtcttcatctttggactgggcaacgcgatttacaatagttacaggtgtggcaagaggacttctctacctgcatgaagaggccccggaaagaattattcacagggacattaaagctagtgacatattgctggatgagaaattaaatccgaacatttcggactttggtttggcaaggttgtttcctggggaggacagttatatgcagacatttaggatttctggtacacatggttacatggcccctgaatatgcattgcatggatatctgtctgtgaagacagatgttttcagttatggagtcctgctgttggaaatagttagtgggagaaaaaaccatgatatgcagcttggttcagaaaaggcagatctcctgagctatgcgtggtcgctttatcaaggaaggaagataatggacttaattgacccaacccttggtagatataatggtgatgaggcagcaatgtgcattcagctagggttgttgtgctgtcaagcaagcataattgaaagacctgacatgaataatgttaatctcatgctctcaagtgattccttcactttgccaagaccaggaaaaccaggaattcaaggtcgtgcaggacgttggaatacaacctcaacttctgctttgaccaataccaatgctagtagtgctaccagggtctcaggtggtagtggtagttttgtagaggattattctagaaattctatatccacctcttcttttgatgaaggaagatgatctccattcatattgtatagggtgtaatagaagatctctatttatttaagggtattctttttgtaatatcgattttatattagtagaaatag

SEQ ID NO: 36882 - DNA, 249 bp, Glycine max
  unsure (1)..(249): unsure at all n locations
  Clone ID: PAT_MRT3847_133306C.1
gaactcaactaacccccattcttaacgcttcaataatcatcctanttaacaacttaattgtntagtactaaagtgttataanattgttagtaaccaaccctagctaagttgagctgtatacacgtttctatggatctgagttttttcgtggctatagaattgagattaggaaccctagcaaacaggacaaaagttgtgcagttcttttcctagtgattgtattgattaaaacgcatagctcaagtcact

SEQ ID NO: 36883 - DNA, 252 bp, Glycine max
  Clone ID: PAT_MRT3847_133307C.1
atgccatcaatagaagcagtctttattccaaagcactccattattttttgaaaaagtttttttgttatctttagagtagatattttgtggtttggatatcaaacagatgcttttaagcatgccagctgtgcagctgaattttgaggtgtctgattaaactgggtgtgactcgtctaattgaattaatggaagcctgccactttaagacttaagacagccagtcatgctgttgaattcagtggttcacattgc

SEQ ID NO: 36884 - DNA, 299 bp, Glycine max
  Clone ID: PAT_MRT3847_133308C.1
gagaaagcagggtgcgtgtttttagagagagagagaggaggaatcaggcgaattgtgtgtggtttggtttggggcatggaacggctgggcatgctgaatcagcttattggtcaccttcggctgctcttgtacgctctccaatctcactctcattcttcttctactctcattcttcagcctcctcacactctcctctttcgactacgactccccaggtcctctttctctctcttagatctatttattcacttcttcttgcctccttttccttattgtttatctttcaagtgaattaaccg

SEQ ID NO: 36885 - DNA, 471 bp, Glycine max
  unsure (1)..(471): unsure at all n locations
  Clone ID: PAT_MRT3847_133309C.1
cggaattcccgggtcgacccacgcgtccggcctgcgctcagcgaaaaactacagtcccacgcgtcgactcttcacgcatacacagtttttcaatattcttattttttttatttattacagattcctcatccttcctcattcctctttaggattttaaattttgtgcagaggccaaccgggagaagaaaagaatctcatcggaaagaagagagaaagagagccaagatgggttcgcagtcgacgacgggtaacacgaacaagatagtggttcggtcctcgttcgtggaatcgtttcgcgggtgcggtatctccgggatccgaattgacaaggaggagttgaagaagcaactaaccatgccacagtatctgcgctacgcaatgcgagattccattcggcttcaggaccccgccgccggcgagtcccgctacattagccgcgctgagggcgaggactccgncggtcctccctgg

SEQ ID NO: 36886 - DNA, 495 bp, Glycine max
  Clone ID: PAT_MRT3847_13330C.1
attgtgttttcttacaattcatggagagtgaagagttgttgtgagaaggatgaagaatgaaattgaaaagtgaagtttagagatggaagaagaaaaagcagcggcgtactacgacgagctggcccgtaagggcgagggagctgcgaggttcaagcaaggtctaggcttttcctcttcagcaccaaacgacgacgttccaaaaccctgctcctccttcctctccaaattcgtcaaagcctcctccgagtcggagaagcaagcgcagctccaatccatccacgacaagctcaagaaaaatccctcttccgagtctagggtttcgagcagcgacagaagcaggagcagagaaaaacgtaggaaaaggagcagaagcggagatagatacagggaaacgcggaggcgaagcaggagtagagagagacatagggatagtgaaagagggagacggatgagtagaagcgtttctcctcgcaagcaacgcaggtcggagaaaga

SEQ ID NO: 36887 - DNA, 984 bp, Glycine max
  unsure (1)..(984): unsure at all n locations
  Clone ID: PAT_MRT3847_133310C.1
cacgcgtccgccgaaacccttcttccttaccggcgaacgaagtcggtggcagaaaaggaacaacctcgattcccaaatcgtaaaatccgatgacgaccgctgcaagacccacatgggcacctgctaaaggtggcaatgaacaaggcggtactcgaattttcggtccctcacaaaagtactcttctagggacatcgcatcgcacaccactctcaagcccaggaaggaagggcaggacactcaggatgaattaaagagaagaaacctacgtgatgaactggaagatcgtgaacgaaggcatttctggatcacggaaagggtagccatctgtttttggaaggttccaagagagacattgaagatcgcattgttgctcgtagtgttgatgcagatgattctgacgttgaagtcaaaagtgatgatgacagtgatgaagatgatgatgatgaggatgacactgaagcattgctggctgagcttgaacaaataaagaaggaaagggcagaggaaaagctacgcaaggaaccgacaacaacaggaggaggagctcaaagtaaaggaggcagagcttctgcgcggaaacccactgctaaataatccaacagcatctttcaatgtgaaaagaaggtgggatgatgatgtggtgtttaagaaccaagcccgtggtgaaaccaaaacagctaagcgattcattaatgacaccatcaggaatgatttccatagaaaattcctgcaaaaatacatgaagtaagtccttgtgccagaagtctgagttgtttggactttggactcaacagaacttattaatttgcagtttgtatctaaatgtatgattcaatgttgatggatatattgtttcctcttataacgctttttaacatgctaatcatagttgctgtaacatggtgtatgcttgttaatgccaactgggtttaagagtcagaccttaaaataacattcagtgaggttgtctctcccnnnnaaaa

SEQ ID NO: 36888 - DNA, 811 bp, Glycine max
  Clone ID: PAT_MRT3847_133311C.1
gttccatccgacattcgatatttttcggcaagggattctcattcattgtcttccgagtgcagaagcatgttactgagtcaggaattgcatgagacttggaaatgtggagtgttttatttggcaggaacaaggattccagaatggtttcatcattgtatcaatggatcgtcaatttctttctggtttcgtaacaatttcccttcaatatctctgggtgttgttgctggacccaagagttatttaaatgtgcattccagatttaggatcaatatcaataacaatataacatttaatttaggaataaggaatcatttggttcaagtacgtcatcatcgggtggagctagcctcgatacctataggtttttggggaaataaatggaatcgtgtggaatgtactgtatacccacttcaagagttcatcaaacaaattggaatccatgttttggaacaaggaaacaacatggaggacatccaatttaccaatccgctgtcgtcctcaggggaaatgaacaaaaagaggaaaaagaggggaatcacgcgtccagctcctccccaagtactggagggtccagtgtccagattgtttttgtctttctttgtccaagttaaaatgtcattgtaattaaaaaatgtctcggatgttagtgttttttttttcaaacacaatatttaaagtaagctcagttttatgacatgtatgattaccttcaaaaatacatttatatgttaaaattttgcttgaaaattagttttgtagaagtaagtcttgggttgcttttgcaatctggattacagtagggagaactcaa

SEQ ID NO: 36889 - DNA, 179 bp, Glycine max
  Clone ID: PAT_MRT3847_133312C.1
gatgccttaaggatgctgagcccatgtagcgagccgtacagctaaacatgttcagtgcaccagctggtggaaaatgcataccaatgcagaggtctcggataacaaagctatgtattacatatgctccctcaccggtaagctaaccaccccaagcttttgagatctgaaccatgctatgt

SEQ ID NO: 36890 - DNA, 1192 bp, Glycine max
  Clone ID: PAT_MRT3847_133313C.1
cccacgcgtccgtacggctgcgagaagacgacagaaggggctcattctctcttcgttctatcaccgaaacccttcttccattaccggcgaacgaagtcggtggcagaaaaggaacaacctcgattcccaaatcgtaaaatccgatgacgaccgctgcaagacccacatgggcacctgctaaaggtggcaatgaacaaggcggtactcgaattttcggtccctcacaaaagtactcttctagggacatcgcatcgcacaccactctcaagcccaggaaggaagggcaggacactcaggatgaattaaagagaagaaacctacgtgatgaactggaagatcgtgaacgaaggcatttctcatcaaaaaataaatcttatgatgacagggatcacggaaagggtagccatctgtttttggaaggttccaagagagacattgaagatcgcattgttgctcgtagtgttgatgcagatgattctgacgttgaagtcaaaagtgatgatgacagtgatgaagatgatgatgatgaggatgacactgaagcattgctggctgagcttgaacaaataaagaaggaaagggcagaggaaaaactgctcaaggaacgacaacaacaggaggaggagcaaatgataatgaaggcggagctgctgcggagaaacagactgctactgaatcatccaacagcatccttcaataaaaaaagaaggtgggatgatgatgtggtgtttaagaaccactcccgtggtgaaaccaaaacagctaagcgattcatcaatgacaccatcaggaatgatttccgtaaaaaattcctgcataaatacatgaagtaaatccttgtgccaaaagtccgagttgtttggattttggtctcaacagaacttattaatttgcagtttgtatctaaatgtatgattcaatgttgatggatatatttgtttctcttataaccgtattttaacatgttactcgtagttgctgtaacatggtgtatgcttgttaatgccaactgggtttaagagtcagaccataaaataacattcaatgtcaatgttgctgtctctatcgtttcctcttataacgctttttaacatgctaatcatagttgctgtaacatggtgtatgcttgttaatgccaactgggtttaagagtcagaccttaaaataacattcgggaggttatgctggaaac

SEQ ID NO: 36891 - DNA, 611 bp, Glycine max
  Clone ID: PAT_MRT3847_133314C.1
gcatgctcccctccgacagctcggtattcggctcgagcaatcatatagaaaccctaatttgttacacctagcttcttccttcattttctcatcatcaatattcaacaacatggctaatttgcaaggagggcctgactttgacaaaatctttcacttcctctccatttgcatccttgctttcatcaatgaaggctcttcctccctctcaagtgcattcatgaatgaaccatggtcatggggcctaagcattcccataagtttgtacgtgaaattcgcacttgagattcacactcaccttggaatctgcgttggggttggagtaccctctttggtctattggggtgccacacgtggtgccattgattggtactgggaagcagcattgaagttcaaccacgagatcttcaagacatgcctgttcaatgttgtgattgggttgctacacttgttggtgtcaaagcttgctcattacatcattgagtgggtgagggatcacaagccgatgaacaacaagggtttgttgtctcattgctagtgcttgcaaacttggacttggagcactctctaaacacccttactaaggcctatttctttcaaacttgttctgagct

SEQ ID NO: 36892 - DNA, 315 bp, Glycine max
  Clone ID: PAT_MRT3847_133315C.1
aatatgttttggtggcaccgcctccaatcctctgtttcgttttccatttgttatcctaatcatctcattattcctcttccagccctattctacatcacagccaccgcaccactagtgaaaaacctcattaatatcacaccctgacatgtgtctgtgagctccaattcaacacatgaccacaccttgtcgtgagggacgaacctagagcgctgttcggaagaataatcctgtgcctccaaagggattaggaaggccagaggtggaggggcaactgttgtgtcccaaaaagtttacagctccattataaaggagcct

SEQ ID NO: 36893 - DNA, 270 bp, Glycine max
  unsure (1)..(270): unsure at all n locations
  Clone ID: PAT_MRT3847_133316C.1
ttccgctcgagattttcttaatgttttggagtagagtattttgggaggggatgatagcaatcttgtgagagatcagtctaaaactcgcacagaaactggattttttaataaaaatgtgtgcctcagagtgtgtcatattcaaatactccgattttgatgatgatgtaataacgacaataccaccccccgttggctgctgcaactgttgtctactacttactacgaagcaccgtggttgggcaaccnnnnnaaaaaaaaaaaatttattat

SEQ ID NO: 36894 - DNA, 579 bp, Glycine max
  Clone ID: PAT_MRT3847_133317C.1
ggctcgaggttctttgctgctttctgccctttttattaggaaaatgtcaagacaaagcatcctcagttgctatatgagtccaagttgtacagagttctccagggaggaagtaatgtctcttgtcatattaaattttttgtctttcttttattttcacgttgtgcagtgacacctacttttagtaattgatcttatttatacttatataacaatgcctatacaaatttggtattggcagctggaattccagatgttagatggtttggagtggagggagattacaatgttctagtgatggatctgcttggacctagtcttgaagatctatttaacttctgcagtagaaagctctcactaaagacagttctcatgcttgctgatcacatgatcaaccgtgttgggtttgttcattctaaatcatttcttcatcgggatatcaaaccagataatttcctcatgggcttgggaaggcgggcaaaccaggtttactgtattgattttggtttggccaagaaatatagagatagttcaacccatcaacacattccttacagggaaaacaagaatttaactgggact

SEQ ID NO: 36895 - DNA, 347 bp, Glycine max
  Clone ID: PAT_MRT3847_133318C.1
gaaaacaactaatatatgttttccctttttttaagcccaatattgttgggttgctaggtccttataaggggtagcaaagtgtaataatgggacaaatatttgaattttgatatgcttatctgaggaaaaagaaatgacggtatctttaaaaggacttgcgaggattcaaaacacaatatttttttaaaataattcccgttagataggagtagcttgaattcaaaaaggccgaaccttctttaatgtgcaagaatattgctcctccatgtccttgggtgtcgggaattaacccgtcgacgtgacttcaattgaaaggtcgagtacaagggaggctactattaaatgct

SEQ ID NO: 36896 - DNA, 1100 bp, Glycine max
  Clone ID: PAT_MRT3847_133319C.1
acatccacttttaacatcaacttttaaaaggaaagacctattaaccaaattagtgatttcccttggaagagttccagcaagacctctctccattgtcagcggaaccaaaaacatacaatgcaaatggcatttacagtgttatattatcatgatttatgagagtaaaattcatacatctattcttcaacactatatcaacatatccttatatcaacatgtagatcaagaatgagctaaagtttaccataaactaccactggcccatacaaatgaatgactatagaatataaacaaaacacaatacaagaaatccgaggaaagttggaagtgaagaatggctacaatgtgaagatggtgatgcaattgacctctgagagttgtatttggattttctagttgaatcattggcagggtaattaccaagccctgcagcaacagcaggaggcacatctgcgtgtgagcgtggtcttgttgggatggcatcgttatgatcctcaatgtcgtaacaatcaaatttcttccatcccaacacaagcttttctcggtcaaatacaacacggtaaccagtcatgaagttttgtccaattatgtttagctcagcagttttgacgactgctagacaatatacaagttcgctctgagttgagataataattattggatcataaacagcaaaatggcttccacctcccatagttaaactcacactaggaatgaggctagtatttgcatcaggactcatatcataacaatattcaaaagggattcttgaatctgatctatgccgcctgtcttgtacttgggaatgaaaactctcagtaagcctcgtataggttggatcaaccaaatatgtaaaagaggtcccagaatcaaaaagtgctgtgaattccacatcaattagagttgttcctacacggacttgagtgactgtgatattataggtagggtgtgatgggttcagattaaatggagtctcatcttgatcaaaacttcccttgtccccaaaacttatccttccaatgccatcacgtccaaaacacatggagaatgaatctgcagtaaatccttcccttgataacatgctaggaactgatattttc

SEQ ID NO: 36897 - DNA, 168 bp, Glycine max
  Clone ID: PAT_MRT3847_13331C.1
gacttctaaaagctaaaaatcatcgaagtactcagagcatcatggatgggacggaggcactcctcaataagatcatcatggtcacagtattctctacaagcaagtcactgaacttaaactactatacagcaacatgccctatatgaaaatgcatccttgccaacacac

SEQ ID NO: 36898 - DNA, 634 bp, Glycine max
  unsure (1)..(634): unsure at all n locations
  Clone ID: PAT_MRT3847_133320C.1
ccacgcgtccggagagactttattattgctcacaagcctttgaaagtagaaccaaaatcttttgttgattctttttctactgactctggtttttaagaaagtgttgctgtaccaatcacttggcttcatctgcctgttcttgcacctttccttttggcagtattttgctagaactgtttccaaagtctgatgacagatcaaaacaggatatgaaatacattaagatatgctctatgatttcatcaattttgttgcatgatacagacatttaagagatttaattgggagaaaatcaaacagtattctttgatttttttttttcccccaaaatctttaattcatcaaagagtatcaagcctcttgttattgagaaattattacatgttctgaaaccaccacatgtttatgattccggtcaattttcacgttagttgaagtttattaattttttagtataaattgaaaatttaagttacgcattacgtaaagattgattatagacgcagttctagacaatacaataatttccccactatttgtcactatcataaactcatcactcattttntaatatggaaatagagaatttaaaggggttcacgtgattacatacagggaagatgtcaataaatga

SEQ ID NO: 36899 - DNA, 588 bp, Glycine max
  Clone ID: PAT_MRT3847_133321C.1
aatcaaaatccttactattccttaaactggaactttgggcccatgattaacatacaattatacacttaatcatcattactttgtctatctaaaatattacttccaactgaatctataatgcataaaggacagttacatggaaaatcttgaacaactacattttgttttagctgaaaacatagctcagatcaaccaaaaatagttactcaaattacttaaaacaaaaatagtctatataacctcctacgagttgtatccaaacgggcctaaaggaaataaaaaaaaaagacctttgtatgcaaaaacaaccctttaatgtgaagccatgaccctgaagttgagtcttttgagccaaattgagtgaagtatcatgtgcatcaaatcaaatggcttagctggtctattcatcacaaaatgcctttgaactctcctcacattcctatgcaatttcttggactttttttgggaaacattttgaaatatagtcttgatgtctgaaatattctctacagaaatttgtatggagaattgactccaattaagcacatcactgaagggcaaagaatagttctcagaaatgatcacagg

SEQ ID NO: 36900 - DNA, 335 bp, Glycine max
  unsure (1)..(335): unsure at all n locations
  Clone ID: PAT_MRT3847_133322C.1
canaactcaggattccggctatttgagttacagatgattccgtggtgagttgtttttggatgacaaggcggccggggagaaggaaaaacctgcatcctgaaaaccggcgcacaaaataacaaaacaaaaaattttatccctggtctggcttgggctggagaatttttgcctgagacgggttatctaggccctgctcaaaggccccctgttttgggaggggaaggccttttggaggaggcgcctgatgaccattgcgttaacgacccctcatggttgttcgtaaacgtcggggcagatgattttggtcaggggtccggcgaaggtgcctttgggga

SEQ ID NO: 36901 - DNA, 335 bp, Glycine max
  Clone ID: PAT_MRT3847_133323C.1
ctggggaacagtaatcggtttggccatcctaaagctgggaaacaacatccaaggactctcaagttcctgtgtcaataagcaagagcattacactgtggaacgagtgcataatcttggagacaaagacatctatgtgctatggactaactttcagaactacagtattttactgtcatagagtacgtgatacaccatcttccatgggtccattgacggctggtgatggaaccaactctcactgacttgctgtatgccactcagatacttctgagttgaagcatcacatgcttcatgaactcatgggagctgttcctggaactaaccctgtttgccat

SEQ ID NO: 36902 - DNA, 246 bp, Glycine max
  Clone ID: PAT_MRT3847_133324C.1
ctcgagccgcaagaatcgccgccggctgcgcagattcatcattccaggcagccaggccctctctttgctgagccgagatctacgggaagcccacttgcaggtgctcctcggaggaggcggacagagatccagcgacaacagcagcagcagcgccacgaacatttcggctgatcctcttctgtcgtcgttcggccttggcttccctacctcagacgcggagcaacatccaagtcgactgtttccatt

SEQ ID NO: 36903 - DNA, 346 bp, Glycine max
  unsure (1)..(346): unsure at all n locations
  Clone ID: PAT_MRT3847_133325C.1
cacactgcttcttccgccttacgctgcgcggctgcttcgctctctctcgttctctacgacgccgttttcgagcgacccttaccaacgctaccaaaagcaaaaaaaaaaaaattggtgggtttngngncnncngnntgtggggggggccggcccacgccccggngaaggcgcagccccngcccnccgggggggggcggggccccgccngggacaacagcggcnngaacaccgccaccaccaccggcgcgcaccaccaccgcgnccgccgccccnccgagcacgccggggaaccggacgccgccgaccccgacgcccggccccgccgggcccggagccagaaccgcgc

SEQ ID NO: 36904 - DNA, 234 bp, Glycine max
  Clone ID: PAT_MRT3847_133326C.1
ggacagccatgcttcaataggacttgccctttggaaagaatcaaaagaggtacttattgggcggctcaaaattacacctcaagaatgattcagtttgttggctgcgataaaaaaattacatttaacatctaaacacatatgatccactatttagaccgaaagttaccaaaactttaattacattaaaatttattaaactaatgttaactctataatgaagttcaaggattccat

SEQ ID NO: 36905 - DNA, 165 bp, Glycine max
  Clone ID: PAT_MRT3847_133327C.1
agtttctgaggcagctggggaagaaatattccagggaagagaacgttgaggcccaatctgggttgagtccctgctttaatatctccggcgtcaagaccatcagtttccccgagtttacttttcagttcaaaggaggcgccaaaatgtcgcagccgcttctgaatt

SEQ ID NO: 36906 - DNA, 451 bp, Glycine max
  Clone ID: PAT_MRT3847_133328C.1
ggctcgagcgaacagacaagacatatgattacattctcaacgggtgtcacacacaggaaaatgaaacagaaggaaactgtctgtctctacatgtattcttataggccatacacgatggatctcattggcgacgtttctggtgagggccgatatggaatacatgactgggtttgacatgtctggttaacggagtgcagtgctttcattcgtcactgatatagaatggatacctatatgggcggtcgccagctagagactaccaccacgccgggatataatttagaccggtgccgtggggtgtgccaactttccctatggtgagccttattatggcttggctgagacagggacatagcggtatgctcgtagaaaaaaggactcgttgaccatgccacacgacatactaactggcgcataaagtgcatagcctggcgtgcctcatgagcgagct

SEQ ID NO: 36907 - DNA, 1174 bp, Glycine max
  Clone ID: PAT_MRT3847_133329C.1
ggctcgagctttgcagtaacaacttcaaattcatttgcaatttagcagcaaagcaatctatagccttcgattaccaacaagaaaatcaagcaaattctcttgttctcactcctactacttgccccctttttctcaatcaccactttagctcaatcaccagctgcagcccccaaagccccagcaaaacttgcaccttcaaaacctgctcctgccacaccggctccagcgcccgcaaaaccattagtcccttcattaccccagtcaccctcttcaggtgttgattcttctggcagccaagacattgtgaagatcctaaggaaggccaagtcattcaacactctaatccggttgctgaaaaccacccaaatcatcaaccaagtgaatgcacagcttgtgacctcaaaaaacggaggcttaaccatccttgcaccagatgatggtgcattttcagaactcaaagcaggttactttaactccctaggagataggcaacaaaaagcactgatacagtatcatgttcttcccgtttatgtgtccagctccaactttgatgctctgagcaaccctgtgctgacattggccagtgacagccccacagggtatcagataaacgtgacagcgtatggtaacagtgtgaacatttcaactggggtggtgaatgccacactcacaggcattgtgtacactgataagacacttgccatatatcatgtggacaaggtgctcattcctttggacttctctaagccaaagcctatagctccagcacccgctgtggccaaagctcctaaagctgataaggagaacgcttcagcagaagatgatgaccaggctcaggcagccaaggacagttctggtgccatgagttttgttagtactcaagggacaaccttggtgtcctttggagttgctcttcttgcagcagcagctacaatgtcgagttgaagaacatccatttctccaaagtttctaatatgttttgaggactagcacgcaactgttgtggagttctgtttttgttgttttcttcttgagctgtgtattgagaaggaaaagtggtgtttgtgagttatgtgaacctttgctctgttcttgttttgtcatcaagcgaaagaatatgtgattgttttattgtcaaaggcaaaaggaatatctgcttgcttttatgcttttc

SEQ ID NO: 36908 - DNA, 378 bp, Glycine max
  Clone ID: PAT_MRT3847_13332C.1
ctcgagccgatttcctaccttttttcttcaaaattgttaccctcacgctttaccagatccacatgagtgggagggctctcttctactattgcatatcatcaccctaatatctaccttatgaatctctaagccaccaacaaagttcccgccaagtccaagctcttgtattttctgaggaaactgcaaaaggagtagaatagcaatatccatattctatgccatcaacgaaatttttgaaaataacccaaccaaacataagtactatgtgatatgatcgcactttcatattatgacttgttaccacaaaatgtacaatgagtaccgtaacaccactctaaacgggtctgattgagcattgttcaataaaatggtttatct

SEQ ID NO: 36909 - DNA, 148 bp, Glycine max
  Clone ID: PAT_MRT3847_133330C.1
tggttggagtggtcttagggcaaaagcttgttctttaagcccctgacattggttgggtccggggggtcttccaggtcttgccaatggttctttggccggggaaccacatcaatgtgccttttgggaaaagctctgtctggatggggtt

SEQ ID NO: 36910 - DNA, 462 bp, Glycine max
  Clone ID: PAT_MRT3847_133331C.1
ggtcctttcaagcttcataggaaattagtgcttagagggcaagggttggatggtgaagttgttgtgtgggagtcataatcatgaattgaccaagtcattagttgaacatccatacgttggacgattgactaaggatgaaaagacaattattgttaatatgaccaagaaacattttactaatgttgaaagagtacaatgccaatggttgtacaacaatcagacaaatatacaatgcacgtggtaagatgtcattatagtatggataagtcaaacacttgtaaaatgaacatattaaaaatatatttaaaaatagtccaaattaacttattaaaaacatattaacttcgtgccaatgcatgtcaacgaagtcgtcttgatgttggtggagttacttgaagtctccaaagaagaaactagagctaagacaacacagtgtgatggggcatacatatgcttatcgtg

SEQ ID NO: 36911 - DNA, 527 bp, Glycine max
  Clone ID: PAT_MRT3847_133332C.1
ttttgcgaggtcaccccttgccttctgccagaacgttcaattttgaaaagaatacgtgtttgtggacctcgctactggcctcaagtaatagactttacacctgaagataaactttggtggaattttggagacaagaatagtccatttaattctggtattcttttcatcaaaagaaaggttggagcttgttcatatgttgatgatcccattgggtgccagtcactgctgtcacgggcaatgcacaaggtgttcggcctgacaagtttgacagcatctgatacaatcacggacattcgtagtgggtctggttctatcacagttgatcagttggttggtaccttctcatctgatcctagtttgattgcttttgcacaactctgctgtgacccctcttggtataatagatctgatgttgatttcaaggaattctgcttgcaagtattatttgagcgtgtgaccaaggatagaccagctctgttacaggtaatgtgcttagaaggttaatttgtatttcctaaattcaataa

SEQ ID NO: 36912 - DNA, 193 bp, Glycine max
  Clone ID: PAT_MRT3847_133333C.1
ctgtatctgacactagaacaaaacttgacgggtaaataaacattgaattagaatgaatcatagaaaactgattagaagaatacttgatgttatgatgattgtggtacaagatagttaagtatgttctaatattgtctgctagcattgcgaagcgattgatcatagattaagtagaaattcagcagtaggccta

SEQ ID NO: 36913 - DNA, 1014 bp, Glycine max
  Clone ID: PAT_MRT3847_133334C.1
gccggttgctttggcatttgtgtttctgtcagtcatgtgtgtgtggcactatggcactctggctcgagatgaatttgatgtccaaaacaaggtttcactcagctggttactcagccttggccatactttaggctttgcaagagtacgaggaattggccttgtgcatactgagctagtgtctggaatccctgctattttctcccactttgtgaccaacctaccagcattccaccaagtccttgtcttcctatgcatcaaacatgtgccagttccacatgttaggcctgaggaaaggttcctagttggtcgtgtcggtccaagagacttcagagtttacaggtgcatagtgaggtatggataccatgatgtccacaaagatgatgatgagtttgagaaagaccttgtgtgcagcatagcgaagttcattcaagcaggaagtggtgggggatgcaataactcgtcaaatgatgagcctgaaaagggtggtggcaaaatgacagttgttggaacctgttctagtactagccaccaccccattttggttagtgagaatgctcatgagattaatcatgtggacaaagctgagacatcatctgagtcacacaaagtggtcaaaccaaagaaaaaggttaggtttattgtgcctgagagtccaaagattgacactggtgcaatggaggagttgaaagaattaatgcaagccagggaaattggggtggcctacattataggacagtcctacatgagagccaaaccagggtccagcatgctgaagaagttggtcattaatttagggtatgaattcttaaggaagaatagtagagagccctcctatgaacttagtgctcctcatgcatcctctttggaggttgggatgatgtaccaagtttaattttggttaaacaatgtagagtaagtaatcatcatgtacatgttatcatcttgtatgcatagtcaaacccaaagagccatcaccacttaccaagtggatgtagggtaagtaattggtagtgt

SEQ ID NO: 36914 - DNA, 400 bp, Glycine max
  Clone ID: PAT_MRT3847_133335C.1
ttgggttgatttatgtgcttgcatggtcgtagaagatgatagaagggacctcggcgaggacgggtttctcgatcggaagaagggggtagaaaacggcggacggaagaacggcaacggactctaggtccggaattaggacatcggcgataaggacaggtaaagtcggagttagggaaacgtagacaaggagtgcttcagtcggaattaaggaagcggaagcaactagagtcggagcctagtcagcgtcggagtcaatgacaaccggaataataacgggctcatatagatcgtagaagtcagtcggaaaaaaactcatcataatcgaagagattaatacttacgatagcgggcggaataagggactcagcctaaatatcatcctctggggacggggctaact

SEQ ID NO: 36915 - DNA, 2511 bp, Glycine max
  Clone ID: PAT_MRT3847_133336C.1
cgcccttaccgaacctatgctagagctagagtaatgggtaaagaggaggaggtacaagagttgatggaggccgacatggaggccatgaaagagcaaatggccacaatgatggaggccatgatgagcgtgaagaagataatggaagccaatgcggttgcaattgccgctaccagcgttgttgctaaggtgaacccgacgtccccatccggcatcaaccaaatgaatcatccaacctcagatatggtaggcaaagatttgggaagtacgggcggcccccatgatgtgcaaattcaaaacgagcacgccttcccgccatatggcttgcctcttaactatacgccacccaatgtggcgtacactcccaataagaatgagacacatgaaattccccaccacaatctagccgacctcgagccttgcctcggatatgccacggaagggcaagtagttggtgaaatgggaaagttggatcatctagaggaaaggctcagggccattaaaggatgtgaagattatgcctttgctaacctagaagagttgactacttgccccgagaaccatctaaaggtgtattgtcggaagatgggggcatacgcaaaagatgagaaattgctgatacattccttccaagaaagtcttacgggggtagctgttacctggtacactaacttggaaccttcccgagtcaattcttggaaggacctagtggttgccttcgttaggcagtgtcagtataatgtcttcggatatgatgcaactacagaacatgtgcaaaaagggggcacgaatctttcaaaagaatacgcccaaagctttgatgatatggtcttcactgacgaaaggatcaaagtgggtctaaaaagaggcaaatctgatcatcatgctttgataaatgccaaaaaaactagggcaaatgaagagggtgagaatgagggagaagcccatgctgtgactgccattcctatacagccaagtttcccaccaacccaacaatgtcattactcagccaataaccaaccttctccttacccaccgccaacaagaaagcctgtagaattcaccccaattccagtgtgctatcctgacttgctcctatatctacttgataattcaatggtagccataatcccaaccaaggttcatcaacctccatttctccgagaatacgactcgaacgcaacgtgtgcttgtcatggagaagccccggggcattccattgagcattgtaggggcttgaagcgtaaggtgcaaggtctaattgatgcgggctggctgaaatttgaggagaatcgcgtgattttcaactttcaccggaattgggtgcaagccattggtctatttgctcaagcgatctgtgctcctgagtttggacttccaagatcgttcaatcagagattactcgtcttgcacggtggacccttgggtactagtaccctctccttcagaggactgcacgtcctcaccttcagaggactgcatgttctcaccttcatagggctacatgccctcacctttagaggactacatgccctcgccttcagagggtcatgtaccttcaccttcagaggactacacatcctcgccttcaaagggctgcacgccctcaccttcagaggactacctgtccttgccttcaaagggctacatgccctcatcttcaaagggctgcatgccctcaccttcagaggactgcatgttctcaccttcatagggctacatgccctcacctttagaggactacatgccctcgccttcagagggtcatgtaccttcaccttgagaggactacacgtcctcgccttcggagggttgcacgccctcgtcttcagaggactatatgtcctccccttgagaagactacacgtcctcaccttcggagggctacacgccctcgccttcagaggactacacggcgacacgtcctcgccttcggagggctgcgctctccctcgccttttgagggctatgcgtcctcactttcatttccttttatcagttcctgggccaccccctgatattggagggcaaccaactgtgcgagcacatccagagagggaggctatcacgcatctactatgcataccagggcaagatttcacccgtgccgctgcaaaaagacgagtgtggatcatgcgcaccaacatgaccacttttacatggatatggatgacgttgctatttagtaacattctgcccgacgaccacaatgccaatctccccctgcagatgtatcggttgggatcgcgcccacaagacgcccagtgggcccgaagaagtccaacagggccctggggtttccagttctggttacgggcctctgtagtcctacagggtgcccgttccccctggcaaggtcacgtcatcatagggatcgcgcctgcaagacacccagtggacccgaagaagtccaatagggtcttggagttgtcaagctctaattacggcaagggcatcaggccccctactaatcgagctttcatcaagaagtactgcgtccccaggcaggcgtag

SEQ ID NO: 36916 - DNA, 480 bp, Glycine max
  unsure (1)..(480): unsure at all n locations
  Clone ID: PAT_MRT3847_133337C.1
gaggtgattgagaaagagaaagaacgcgccacaacataacacactcgcacacagtgagaagagagagagagagagagaatgtttaggttgcataagcacaggattgcgaagtcaggggacaaaattgagttcagaatttctcatctcaaggcgcttcaggtacccaaggggtgggacaagctgtttgtttctgttgtctcggtagaaactggtaaaacaattgcaaagtcgagcaaagtgtcagtgcgtaatggaggttgtcaatggtcagatacattttcagaatctatattggtttcgagagataattcttcaaaggagattgatgattatgtcctcaagcttattgttgccatggggtcatcaagatctggcatcctgngagaggccactgttagtttgactagctataggagttcangtgctgctattccactttcaatcccactgaataagtgcaaccatgggacagttntacat

SEQ ID NO: 36917 - DNA, 177 bp, Glycine max
  Clone ID: PAT_MRT3847_133338C.1
gaacaatacagcctttaccgatttgcaccaaattcaacaatgaccaacaccatttgaggacaactgtctactgcattcattggctgttcactaatggacaagggggtgccacctaaccacttcgtcaatgaaggatctttcatggtgaagttcatgcaacttcagaccgagcaagag

SEQ ID NO: 36918 - DNA, 978 bp, Glycine max
  Clone ID: PAT_MRT3847_133339C.1
atgggtgaagtagaggagatacaagagaagatgaaggccgacatggaggccatcaaagagaaaatggccacaatgatggaggccatgatgagcgtgaagaagataatggaagccaatgcggttgcaattgccgctaccagcgttgttgctaagggcaagcagttggtggtatacccctgcaaaacactttggagggccctcaatatcatccacaaccacaaccctcacgttccacagcggttaaaaaccctcatgactatggcaggaatgggaaagttggatcatctagaggaaaggctcaaggccattgaaggaggtgaagattatgcctttgctaacctaaaagagttgttcctagtacccaatatcatcacccctcccaagttcaaggtgctggactttgacaagtacaaggggactacttgtcccaagaaccatctaaagatgtattgtcagaagatgggggaatacgcaaaagatgaggaattgctaatacattccttccaagaaagtcttactggggtagctgttacctggtacactaacttggaatcttcccgagtccattcttggaaggacctaatggttgcctttgttaggcagtatcagtacaattttgatatgacacattatcgatactctactatgaaaagatggtgggctacgcaccctcaaagctttgcggatttggtcttcgccagtgaaaggatcgatgtgggttcgaaaagaggcaaatttgatcatcctactaggacgactgagaaaactggggcaaatgaagagggtgagaaagagggagaaacccatgttgtgactgccattcctatacggccaagtttcccaccaacccaacaatgtcattactcagccaataacaaacctcctccttacaccaccacccagttatccacaaaggccatccctaaatcaaccacaaagtctgtctaccgcacttccaatgacgaagaccacctttag

SEQ ID NO: 36919 - DNA, 327 bp, Glycine max
  Clone ID: PAT_MRT3847_13333C.1
ggctcgagctatgaacaacaacgtcttttgcgaccacagggaggggactatactaggccagagtgactcttacacacgagacatggtgatgcaagcgaccatggcatacaaccatgtgggagagggacttatcctgagaatgccacgctggacacatggatatttccacgtggggaacaatgactacactcactggaagatggatgctatggggggatgtgctaaccccaccataaacagccagggtaccagatacagtgctcctactaaccctcttgccaaggaggggactaagagagtggaagcagctgcatcccaatggaaggg

SEQ ID NO: 36920 - DNA, 858 bp, Glycine max
  Clone ID: PAT_MRT3847_133340C.1
atgggtgaagtagaggagatacaagagaagatgaaggccgacatggaggccattaaagagaaaatggccacgatgatggaggccatgatgagcgtgaagaagataatggaagccaatgcggttgcaattgccgctaccagcgttgttgctaaggtgaacctgatgtccccatctggcatcaaccaaatgaatcatccaacctcagatatggtaggcaaagatttgggaagtacgggcagcccccataatgtacaaattcaaaacgagcacgccttcccgccatatggcttgcctctcaactatacgccacccaaagtggcgtacactcccaataagaatgtcaataactccactcctatacccattgagagccaacaaccgcaaactgatcatgcacatgtctcttaaaccgtgggagagacacatgaaattccccaccacaatctagccgactttaagccttgcctcggatatgccactgaagggcaagcagttggtggtatacccctacaaaaccctttggagggccctcagtatcatccccagctacacctcttgcattccacaacaagtaaaaaccctcgtgctatggcagaaatggaaaagttggaggaaaggctcagtgccattgaaagaggtgaagattatgcctttgctaacctaaaaaagttgttcctagaacccaatatcatcacccctcccaagttcaaggtgccggactttgacaagtacaaggggactacttgccctaagaacatctaaagatgtgttgccggaagatgggggcatatgcaaaagatgagaaattgctgatacatttttccaagaaagtcttactgggacaactgtcacctggta

SEQ ID NO: 36921 - DNA, 1073 bp, Glycine max
  Clone ID: PAT_MRT3847_133341C.1
ggtaaagtgtaaacacattctacgcgcctaaagtgtacagattgagtgtgggtgtatcctgtggtggaattatcatgcccgtacatcaatttattaaattataattttcattcaacacatcaactgcccaattaataaaatataaaaaatgaataggttatcagcccccatatgctaaatgttaatgcatcatctggctaatcaattcgctgcaatcaatcaatacccattaaacatttaaacctagatagagaggcaatattcatgttatttatatattcattatctctttctcaactctttcttgatcagaggcaacgaaacttggttgattcgtcgatgcaagaagtctagcccacatcctatcagtcagcttgaccttattttgtttctccgtcacacgggcaattgggatataagcatgtttactgttcacaggcccgactgtgaagccagtatatccagccatagctccatgaacagcaccatgtgcaagaagagtgcactaaatgttgtccgaggcattacttggaatagcccgaatcatgtatgttggatctatcaatgtcaacaagcaggttgtttcctgatacatccacaatatatgctgcatgttcttcagcaacgatacatccctccccagcactagctgcttccacattaacgtagtgcccatcttctcttactgatttcaaaattttacaaatataaactatcatgttatggcccacatgtttaaaatatggaatcatcctgctatcctcatctcgtcccgccattgccgcttgcactgctctgattccactgttgctgcccctctgcctgtcttttccacctccagtggctacactttcaaccgccacagctgctgcctgaatggctctctgggcttctcccaccgcagtaccaatcccttatgacctggctatcacagcaatatcattatcaattgtctttggaatcccagccacagccacttgaagaccacgctttttaacttcctcataaatgagcgcagctcctttgtgagtaccatcacctccaataatgtatacctgatttattcctcgtgc

SEQ ID NO: 36922 - DNA, 1055 bp, Glycine max
  Clone ID: PAT_MRT3847_133342C.1
gaacctgttagctcaagtggcacctcaatgacgaaaaaacgatgacaatgatagtagacacattaccagtattctactatggaaaatggtgggctacgcaccttcaaagcttttgcggatttggtctttgccagtgaaaggatcgatgtgggtcttaaaagaggcaaatttagtcatcctgcttggacgaatgagaaaactggggcaaatgaagagggtgaggatgaaggagaagcccatgctgtgactgccattcctatacagccaagtttcccaccaacccaacaatgtcattactcagccaataacaaaccttctccttacccaccgcccagttatccacaaaggcaatccctaaatcagccacaaagtctgtctaccgcacttccaatgacgaacaccacctttagcacaaaccaagagcaccaaccaagaaatgaattttgcagcgagaaagcttgtagaattcaccccaattccagtatcctatgctgacttgctcccatatctacttgataattcaatggtagccataacccctagccaaggttcatcaaactccatttctccgagaatacgactcgaacgcaacgtgtgcttgtcacggagaagccccagggcgttccattgagcattgtagggctctgaagcgtaaggtgcaaggtctaattgatgctggctgaaatttgaggagaatcgtgtgtaaatcttgacgttgacaagagatgccacacatggggcaattttgaaagctgttgttagatgtctctaaatgactcatcaggattttcaagtttgtaccattattgtaaaccacagttacaatgttaaatgaaatggataaagttgatatctttgtccctcatcctctcacaaacgcatctttgcttattcaactttcaccggaatgtgggtgcaagccattggtctgtttgctcaagcgacctatcctcctgagtttggacttccaagaccgttcaatcagagattactcgtcttgcacgttggtgggggtgccgtaaaacaaagagtaaagttccaaacaaataagtttc

SEQ ID NO: 36923 - DNA, 206 bp, Glycine max
  unsure (1)..(206): unsure at all n locations
  Clone ID: PAT_MRT3847_133343C.1
ttcggcttgagccagcaccatactcgtgctcctcgaagctccaaagcaacaacagcagaaacaagaagaaggaaccttatattttctttgcaaaacctgcgatcccgaggaagaaagcaacgaatgncgncncccggnaagcgcagcanccaccggcgaatctcgacgttttttttttgaggggggggggacccaccccaacccca

SEQ ID NO: 36924 - DNA, 686 bp, Glycine max
  Clone ID: PAT_MRT3847_133344C.1
gaaccgcaaaagaaaattcagcatctttaaagccatggcggctgtgggagacgaaaaggagcaggaggagcttattcctggcttaccctacgaaattgcagagctgtgtcttcttcacgttccgtacccttaccaagctttgtcgcgctctgtttcgtcgacgtggaacagagcaataacgcacccttcttttattttctccaagaagaccctctcccgtcctcacctcttcgttctcgcgtttcattcacaaactgggaaaatccagtggcaggcgctcgacccttcctcggggcgctggttcgttttaccgcagatgcccttgcaggaaaactcctgccccacggagttcgcgtgcgcggcgctgccgcaccaggggaagctcttcgtcatggccggcggcggcggcggttcagacaccctcgtctaccgcgccgccacgaaccagtgggctctggcggcgcccatgccgggagggaggaagaggggcttcttcgcggcggagggagtggagggaaagatcgtagcagtcgggagaagcggcacggacatctacgatccggagagcgacacgtggcgggaggggaagaagcaggggggggagctgaagaggtacgaggttgtggcggcgggagggaaggtgtacgtgagcgaggggtggtggtggccgttcatgtaccgtccac

SEQ ID NO: 36925 - DNA, 528 bp, Glycine max
  unsure (1)..(528): unsure at all n locations
  Clone ID: PAT_MRT3847_133345C.1
tcatagtagagtatcgataatgtgtctaccatcacgattatcgtctccctttccatcattgggggtaccacttgggccgccagatccctccaccttttgggcgtgttctttgaaagatccgtccccctttttgcaaatgttctgtagttgcatccaggtaacagctaccccagtaagactttcatggaaggaatgtatcaacaattcctcatcttttgcgtattcccccatcttctgacaatacatctttagatggttcttgggacaagtagtccccttgtacttgtcaaagtccagcaccttgaacttgggaggggtgatgatattgggtactaggaacaactcttttaggttagcaaaggcataatcttcacctccttcaatggccctgagcctttcctctagatgatccaactttcccattcctgccatagtcacaagggtttttaaccgctgtggaatgtgagggttggtggttgntgggtgacacttgagggcccctcccaaggggttttgcagggggtatac

SEQ ID NO: 36926 - DNA, 547 bp, Glycine max
  Clone ID: PAT_MRT3847_133346C.1
atccatatattattagattatactgaataactaatcatgcacacaggcaatcattcagcatcattacattgaaacaaaagagagagaaattacaaatggacattattatgtgaattacaaattacaaatgtcacaacacagcatcaattctccttggaaattgaaaaattctctaagcctaattaaccaaaatgttatgcaattgagtaagagaaactaaaacggagatggagaaccattggtgttggtctagtggtgaaatttgtgataatatggatgacgaggtgatatgttcaacctcagtacaattattataaaaaagaaaaaacagagtttgaggtggaggtggaggtggaggtaacaattagagaagaaattaagaaagaaaagagagttatagttgtaacagtatttttacattacattcatcatcaacataggatcaccacccccaccacaagcactctgaggagtgcacattttgttaggtccatcatccatcaagcaggggctgagcctataaatgagaatgcacaactccattttg

SEQ ID NO: 36927 - DNA, 381 bp, Glycine max
  Clone ID: PAT_MRT3847_133347C.1
gatctttaaccgatagtaaatatcacttcttaggagcaattttccatggggatatggtatttgttctacctgcgtaagtatgcactgtggctttgaaaccaaagcagtcccttgtcatgaacaaaaggttcaatgagttgttgtaagccaaaacgacactaaattaggggggaaagaaagatggtgtagagaagagtgaaagcaaaggaaaaaaaatggttggtaccagctgatgtatcaagaagagctagaggtagaaactatgcataaacaaccatactgactgccttgtggctctaagaatttttctctaacttataaatgtttgtgtggacattctatattataagcactatgcaatttgcttttaagaatttatct

SEQ ID NO: 36928 - DNA, 738 bp, Glycine max
  Clone ID: PAT_MRT3847_133348C.1
cccgcgtccgtttcaatcttcattgattcattcattcgttaatcatttgcctaaccactttaattgcgatcttcactcccacacaatgccgccactgccaccgccaccgcaggcgaatccagattccggcgccacctccgctccgtcacaggtcagaacttatcgcgtctggcaaggcagtaacgtatttctttgtggagggaggcttatatttggacctgatgtgaaatctatatttatatcgatatttcttatcgttctccccgtggctgtgttctgtggtatggttgcaaggaaactgttagatgattttcctcatcacaccggatggtcaataatggctgtacttattgctctcacactcttcgttctgatcacccttgtagtgacctcagcaagagatcctggcattgtaccacgtaatgctcagcctccggagacagatgactatcattggactgataatagcaacaatggccaaatttcattgtcacgatttccacgaacaaaggatgtaattctcaatggtataacattgaaagtcaaatattgtgatacttgcatgctctacagacccctccgtgcttctcattgttcagtctgtgataactgcgtggagcgatttgatcatcactgcccatgggttggtcagtgtattggactgcgaaatacaggttctactacatgtttgttttctctgccactctgctttgcttatatgtacatgccttttgctgg

SEQ ID NO: 36929 - DNA, 173 bp, Glycine max
  unsure (1)..(173): unsure at all n locations
  Clone ID: PAT_MRT3847_133349C.1
agcaacttcccaattcaggctattgatttgagatgcatatgagcgtgntaatgatgtgattagcaacccgaacaaatatgggtttcaaaactcagactcaccctgttgctcctttggaaatattcgaccggctcttacatgtatacctgcatcaaaaactgtgcaaagataga

SEQ ID NO: 36930 - DNA, 443 bp, Glycine max
  Clone ID: PAT_MRT3847_13334C.1
cttacgcgtgggttcaaactaaaacgcgaggaaaagaaaaaggaagagtcggagagcgatgctggttccgaattagaaactcagagcgtcaacaccgaacagtcatttgatgatactggcagagagaacgctgcctcggattatgtgatggattggattgggaaggaggtgagaaaagaaaggccgaacgaggtgaagaagaatggttcttcttctgctgctgctactgcagcatcgagtagtggaacggtggagaagaaaagtaggaagaaattggaatggtgggaattcatggacgatagtgcggttttgaagaatgagaagaggacaccagcttgggagtggtggatggaagagtattccgcagagcttgcttggaagaaaaggacatgaaggagaagaagatgatgagaagggtcacgagatgatgttttaatcattcg

SEQ ID NO: 36931 - DNA, 258 bp, Glycine max
  Clone ID: PAT_MRT3847_133350C.1
cttaatttctgggctttttttttatcctacccctccatttccaccccaattgctccccaaaaaacctcttccaaggtaatacaaacaatggaaagggttaaaccctttcccctccaatatacttttaaataccattcccacccctctcaaaaaaatcaaaccctggccaaggaattccacaactcttttgcccacgggttaatttattccaaaaccccccccattttttttttgatggaccaaggaagggttcattac

SEQ ID NO: 36932 - DNA, 248 bp, Glycine max
  Clone ID: PAT_MRT3847_133351C.1
tttacgcgtgcgttctaagactgcgatgtctggaactgcattagtcaaaaggcaatgtcgagcctcattggtacatgtgtttacaacaaatagcaacagcacagatgattataatgtcagtatgtatacatatgaaaaactacagtgctgggaattgatctttccaatcgatgtgtgtggttccactaatggttttgatatgtggagtactgagagggcaaattaaattatatggattatgactttcc

SEQ ID NO: 36933 - DNA, 468 bp, Glycine max
  Clone ID: PAT_MRT3847_133352C.1
tttttgtataaataccataccattaattgtccggaaaaaaaaactgtaacttgatgtcattcttccaagactgaacgaatttacttgctcatcgtcccaggggttataaaaattagattagaagttattcacccagaaggttgtggcaacttgatgtaatcactgtatattacattgcatccaataactgaatataacaactgcaaagaacaagtaactcgataggaccagaattccctgcagtttgaaagtaactgcagggcactgcagacataatccaatgctcgcaagtttttttttttatcatatttcattttgttatttaatctataataataattttgtggaactcagtttctatagtcttggcaattttggcatcatctgggtctgggtctggcaagtctacatggaaagaatcctgtctgattggtaataaggactctatgaatatagcttgcctgcggg

SEQ ID NO: 36934 - DNA, 277 bp, Glycine max
  Clone ID: PAT_MRT3847_133353C.1
ttttaaaataacacacacttaacaggggagtacgacaattgaaagaggtgtggaaattataaaatttgctgtgcatactctacaagagggacatgcctaatattcctttattgaattaagcagacgaacaagcgaatgaaaacgctaattccatatcatgcaaaggattgcgcattttaagaagatctggaggtatcctgagaaacaaaaaaagctggccttagagttttaccagtagtttccaaatccttgatagattcccaagagaatatcaaaa

SEQ ID NO: 36935 - DNA, 413 bp, Glycine max
  Clone ID: PAT_MRT3847_133354C.1
ctgtgtttgttagctctctcctacacggcatgactttcagtttgtagggtacaccacctctgactttcacctctttgggtcttccaaactcgccacccctgggaacactccatgcccttttcaaaggttgaagtgtgtgttaaaaggacatgtgcaagatccagcaggggggcgcacctctaacctgtgttcgatgcaaagttccatgaccctctgtgtatgcgcttgttacccggagggtggtagcccctatggaagggtagccgtgggggggttattgccatgccctacccgatcatgactctctgtaccaaaacacggcaccgacaataggtgggggtggttctttctccttgaccgcgttttctcacgttcttggtcacccggatattcgcgctctcccatgtgccggt

SEQ ID NO: 36936 - DNA, 378 bp, Glycine max
  Clone ID: PAT_MRT3847_133355C.1
gcctccttttctgaggaagggccaccactttggggggtttttttatactacttgggagtgttccaccacccagccagttatgagctagatggcccaaatgatgaacaggctctggggtggtgacaaaaaattgatgcccgataggacacacctgctgtcggcttggtgttcaaggatggcaatttgtaagaaagatgtttggagagttgaatgtggaatcccttctggattcccgctcacagctatttgcaatagcatttttaatgagatgctcattagatatagctatgaaaaacatactgcgccaggctaaagctccaagtatgtttttacaatccttcaaaaattctgatgccttatggggacatggaagtgatc

SEQ ID NO: 36937 - DNA, 404 bp, Glycine max
  Clone ID: PAT_MRT3847_133356C.1
cccacacgttcgttcgaatgataccctttcactcacttacgccccaggaaccgtggctctgcacgctttgaaccctctgatcctaattaatattcaaatgtcctactacgctgagtggcttctgtggatcatgcaacacatagatgtggaccacactatcactctactcaccaaggctaggatcattgacactctcgccggggctaacatcctgaacgagtgcctgaacactcatcctacggctgtgcacgctgactaccccacctatgatctagattggaaacgctgtgtgcctccaacactctggagagggttccacgagactcttaccctttcgactggagctctttacccagatgccagtgatccatacactctttccacattagcaaaatgcttgcttc

SEQ ID NO: 36938 - DNA, 192 bp, Glycine max
  Clone ID: PAT_MRT3847_133357C.1
cccacgcgtccgtccacgcgttcggccctgtttttctgtccatagacttctcagagttgctacgcgtgatgatgcagcactcatgacccggcatggaacctgccaccatggtccaagagccatcggagcaggaccagcagactcctacgtatcagcgacgaccctacgtcatgatgctcgcagaagcccagg

SEQ ID NO: 36939 - DNA, 1049 bp, Glycine max
  Clone ID: PAT_MRT3847_133358C.1
tttttagtttttttttttttttttttttatttttttttttttttttttacagttccatttttttttttttttttttttgtacgatgaaagaatgaatcaattcttctatcctacgataaaccacatacattcatacattattgtttactacatccttctttctaatcttgaagcagccaaattttaacataatcttctgaacaaaaaaaccaacgaacagattgctttattttgcttcctttaaggattcttgtcacgcagcggaaggaaatcgctcctttaccttaaatatgtacaagctttgtaaccttgaaaaaaatttacacctcgttttgactaatgaatttaacaaccaacaacaacaaaaaattctggttatctatcctcaaacttcccttcagaacgtttggatgcttcaagtcttttggatgcatcaaaatgattggatgcttcaaaagggttggatgcttcaactcttctggatgcttcaaaacgtttggatgcttccaaacgagcagtgaatccaactgttgtgtgtcttatcgatcgctgccttaccacattacagtattctggatcacttgtttgcctgtcgtttctcatccactgaggctcttgggctccctttgccaggaggcgcatttgcctggatgcattgccgccccaggggaggaggggtgctatgtgagtgaagtaactgatagataatgccatttggcaattcaccacccacacaacacaggtgtacatggtggcaccaagaacttccagccccatgacttcaccgcctttacggaatgcctggtattccatactacggatgcaaaagaagaatacgatggcagaagtcacaactccattcaatgcccaaccgatgatccgtttccagctaaataggatgttttggacgccttcttgatataataatggaaacttgagacataatttagaagagacatcctgatcaaacactcccaatgcaattacaggaagtgaagtgaagaatacattgtacagcgacatgaaccaatcattgtatgcagcttgcg

SEQ ID NO: 36940 - DNA, 399 bp, Glycine max
  Clone ID: PAT_MRT3847_133359C.1
tttcgcggtttctatgtgctccctggaagctcacgtccagcttgaatgagggtccatgcgtccactttagtggatctcacccgcaccaacacagccttcatctcaatggtccttcttcattctgtatggcgaacgcgagcattaccccgggcgggaagatgatgactctcatcaccagcccattcgttgctatctgcattctacctgatactcctgtctctcaatatctctttctctgtgagcccgctgtctacggttgtgcaggtagagggataacacacttacgcaggatgcttgatctgctggcggagcaagatgccgttgcaccgctaccaatgaaagaaacatgggtgcttgttgcggttaccggctagaaacaacagcggcgggacccctacc

SEQ ID NO: 36941 - DNA, 414 bp, Glycine max
  Clone ID: PAT_MRT3847_13335C.1
cccacgcgtccgaaaaagtttatggaactgtctaaggtgtatgatggatttgttgactcttcagacaatctaataataaaagctcaagttcaagtcataagggaaaaatcagacaggcctttccgttgccttgattgccagtataggagggaacttgttagagtatatttgacaaatgtagagcaaatttgtcggcgttttgtggaggagagaagaagcaagcttggaaagttgatagaggataaagctaggtggtcaagcttctttactttctggcgagaagttgatcaaacttccaggcgccgcatgtctagggagaagacagatgtaattttgaaagtagttgtaaaacacttctttatagagaaagaagtcacttctactttggtaatggattccttgtatagtggattg

SEQ ID NO: 36942 - DNA, 489 bp, Glycine max
  Clone ID: PAT_MRT3847_133360C.1
aaaaccaacgaacagattgctttattttgctttctttaaggattcttgtcacgcagcggaaggaaatcgctcctttaccttaaatatgtacaagctttgtaacctatggaaaaattcacacctcgttttgactaatgaatttaacatccaacaacaacaaaaaaatttggctatctgtcctcagacttcccttgggaacgtttggaagcttcaaaaggattgaatgcttcaactcttctggatgcttcaaaacgtttggatgcttccaaacgagctgtgaatccaactgttgtgtgtctaatcgatcgctgccttaccacattacagtattctggatcacttgtttgcctgtcgtttctcatccactgaatcatttggtgatacatagggaagaaacgcatttggatggaagcttatattaaatagggaaggagggaagcaatcctcgagccgattcggctcgagtccccgaaaaaaaatcggggggcc

SEQ ID NO: 36943 - DNA, 351 bp, Glycine max
  Clone ID: PAT_MRT3847_133361C.1
acgcgctgtaccgaaccagcttcactgcataaatttgagagaaatctctgcaaacatgttggtttatcaggacctccttacaggtgatgagcttctctcggactccttccgttacaatgaaattgagaatggaatgctgtgggaagttgaggggaagtgggctgctaagggagcagctgatgttgccactgttgcaaacccttctgctgcgggtggataaagtcctggagtagatgacgcagagtgttaaagatgttgacatcgatgatacattcaaacttgaggatcaagccgatagtgattagacacagtggcgtcaccttcatgaataggattatcacgaattggact

SEQ ID NO: 36944 - DNA, 1317 bp, Glycine max
  Clone ID: PAT_MRT3847_133362C.1
aattcggcacccacacacactctctctggtgttgttgagttttgaaaatggtgtcgtcgcaggttgtgaatcctaatcaatcgtccatacgaatttccagaatacaaattcacactctctttggctctggtgttgtgttgtgttgaggtacttgagaagagaaaatggtgtcgtcgcaggttgtgaatacgtacccgttgtcgagctacacgttcggcacgaaggagcccaagatggagaaggatacctccgtcgcggatcgtctcgctcgcatgaaagtcaactatatgaaggagggaatgaggaccagtgtggaaggaattttactggtacaagagcacaatcatcctcatatacttcttctgcaaattggaaacacattctgcaaactcccaggtggtcgtctcaaaccaggagagaatgaaaatgagggctagaagagaaagctgacatgacaaatccctaggagtgcaaaaagcttttccttgttcatttatctgagagggaatactttgcagtgcccaaaaatttaaaacttcttgctgttccattgtttctgccctcctcatataacaaaacccaaggagtgcaaaaagcttttccttgttcatttatctgagagggaatactttgcagtgcccaaaaatttaaaactactagctgttccattgtttgaactctatgacaatgttcagagatacgggccagttatatccaccattcctcagcagctatccagattccagtttaaaatgatcactaattgaacataaatttgaagcttacatgctgataattactactttcatttgtaattttcgtaactaggaattatcattgcatagactggctagaaaactgagttttgaagtgagttgctgagtagagtagttatgttgtgacatggtttgtctgtatttcattcattgtactgtgggttgatgtcggttatcaacaatcaacccaagagggaatcaagtaatcaactagtaggctatatgcatctaatgcctagtagaaatcaaggtgatcaggtagtgtttgatctcatgtctgttgcttctgccttgctcaggttgccatattgcattggaaagggtcaaggaatggacattggttttcattgctagttattttggtgaaaggcattgaatgtcaaaaattatatataatcccatattagaggcaaaaattcaaacataatcctcgtggcaaaatgtataaaacaatgacaaatgtaattttttttttaacatattaaagacagttttagcgcatgagctacttctggaaagttggtgaaagttgtgtaccacc

SEQ ID NO: 36945 - DNA, 693 bp, Glycine max
  Clone ID: PAT_MRT3847_133363C.1
aagacacacactctctctggtgttgttgagttttgaaaatggtgtcgtcgcaggttgtgaatacttacccgttgtccagctacacgttcggcacgaaggagcccaagatggagaaggatacctccgtcgcggatcgtctcgctcgcatgaaagtcaactatatgaaggagggaatgaggaccagtgtggaaggaattttactggtacaagagcacaatcatcctcatatacttcttctccaaattggaaacacattctgcaaactcccaggcggtcgtctcaaaccaggagagaatgaaattgagggcttgaagaggaagttgactagcaagcttggtgctaattcaccagctcttgtgcctgactggcagataagtgagtgtgtagcaatctggtggaggccaaattttgaaaccataatgtatccatactgccctcctcatataacaaaacccaaggagtgcaaaaagcttttccttgttcatttatctgagagggaatactttgcagtgcccaaaaatttaaaacttcttgctgttccattggttgaactctatgataatgttcagagatacgggccaagtatatgcgctattcctcagcagctatccagaatccaatttaaaatgatcacttattgaaccgaaatttgaagcctacatgctgataaattaccaccttcatttgttattt

SEQ ID NO: 36946 - DNA, 246 bp, Glycine max
  Clone ID: PAT_MRT3847_133364C.1
aaaatttacacatctaaggagaaaattcacaaagattatgattcttaaccaactgaattttatgaatcaatttgacaagcattttttgatctaaaaaataccaaccattaacttaaaaatgatcttaaaaatttattcctaaacttaactttccaaatttatttttttggcaacccaaaagcttttgttattcatattccctacaaactaatgaaaagatttccgaaaaattaatttaagcttttt

SEQ ID NO: 36947 - DNA, 217 bp, Glycine max
  Clone ID: PAT_MRT3847_133365C.1
acccacgcgtgcggcatactctgagtcgttctctcagatctgattttacctttaccggaatccaactcaacctagtacacgattcttttttatcatcgcatcaccattaccattagtccactcactatgataatttatttctcttcaaattccatattctatatgaattaaaaacttataatagcataaactcaacttactaactctaccacttaca

SEQ ID NO: 36948 - DNA, 528 bp, Glycine max
  unsure (1)..(528): unsure at all n locations
  Clone ID: PAT_MRT3847_133366C.1
aggaacgcgggacgcctgcaggcaccggacccgaacttgcaggctctacacacagccgnccgaaaaaaaaaaaaatttatttaacattttcaaccaacgcaccaaacatcacaatggcattaaatgagggcctttaagatcctctttgttactaaagaaaatcctttggaaaagggggagactatcccacctgaggaagaggtccacgccccaacactatatgacagtaaaactgaccaggattctcttgagatcttcaccctatatatagactaccctacagtaggcacaaatgtgcacttactattattgagcctatataacaaatcacttatcaatcaaaactcacatgctttaaacatcctctcatattaatactaaccaaaccctcgaaatggaatcattgcatccctaagaaaccaattgctttggaaccaaatctccctcctttctaaacgtactgttcacggcactcttcagccctgtagaacttcttggccggaaggaatctcagtaacaaatcttccc

SEQ ID NO: 36949 - DNA, 727 bp, Glycine max
  Clone ID: PAT_MRT3847_133367C.1
gcatactccggcttgagcttgccatccttgtccagcagccaggcatcaagaatctcccgcaccacgggcccggcgacccggccaccggcctcgccgttctcgatcatcaccgaaatcacgatctgcgggtcttccgccggggcaaaaccgacgaacaaggcgttggcgcgattacgctccgaggtcttcaagcggtcataacgctccccctgcttgatcgccaccacctgcgccgtgccgctcttgccggcaatgcgatactgcgcacccaccgctgccgcccgggcgataccgcgcggatcgtgcatcaccaactgcatggcgtagttgacctgttcccactgccgggggtcatgcagcacgatattgggaatcggattctggtccaccggcgccacctggccgatgctccgggccaggtgcggacgattccacacgcccttgttggcgatcagggtcgtggcctgggccagttgcagcggcgtgacctgcatataaccctggccgataccgaggatcaccgtctcgccggggaaccaggcctggcgccgggtcgtgcgtttccactcgcgtgaaggcatcagccctggcgattcctcgaacatgtccagggagaccttctggccgacgccgaacttgttcaggtaatcgtgcaggcggtcgatgcccagcttgctcgccaggtcatagaagtaggtgtcgttggaacgcatgatcgccgcgttca

SEQ ID NO: 36950 - DNA, 386 bp, Glycine max
  Clone ID: PAT_MRT3847_133368C.1
agaaaaatttatttggatctttaaattcttttgaagcctatataacaatgggggcttatcgtgactattcattatcacgctcgctctctttcgaccaattaaaactgatatactggacctgtaatccacaatactgtggcgccattgaacacagttcatcatgctcaacggtgacattacctattttaatacaaccagaaggccatccacgtttgaacatattgcaccatagaatggactcattggaaaagattcctgaaacccatgaatatctttatggcccttaattacacgcgctcttgtgcctcacatttatctccactatggattgagcaccacacaatatgattggttcactagtacacaagttcacagctagttgtttc

SEQ ID NO: 36951 - DNA, 304 bp, Glycine max
  Clone ID: PAT_MRT3847_133369C.1
tgttgcagagctaaggccaaatgactagggaccgtgtcggatgaagaacaagagaggacaaaactggagacagcatcacacacatacaaaaggcgccaagaagaaacaaggtgagagaagctgctaggaagaaaggcagattaatgggtaagatccgaatgacagggaaggcaccaggcaaaaggagcgacagggccagactggcacaagggtgtctaacaaacagacgcaggacagaggatgttgatgcatggaagtggacaaaaacggaaccacatacgtgggaagtgagcctaccaaggga

SEQ ID NO: 36952 - DNA, 400 bp, Glycine max
  Clone ID: PAT_MRT3847_13336C.1
aaaagccgagaaagggttaaaatattttccttccggaaatcacccccgaacatatttcttacattcccaacactcctttggtggctgaccatccctcaaagggttaacccaaaaatcaatacactttaaacttcaatttttctataaacataggacttaaaaacatcccaacctcaggaacattaatcagggcatgaagggctctaattctgggattaaaaaaaaaaaagacagcccaaagggggaaactttaagaggggggggtgctgttaataccaaaaatggtcaccttttagggtccggcaaaaacaacgaacggggtcttttttttgctccgggctttttttatatgctacctttattattaattaaaggcccgcaataaaaagcttgttccccc

SEQ ID NO: 36953 - DNA, 1039 bp, Glycine max
  Clone ID: PAT_MRT3847_133370C.1
tacggaagcgaggaagtcgaatgctgcactgcacgagacttgattctcgagactacggtattgtctaatcctgatgcaagtctggggttgaaagagcttttccaggatcatgatatgagtgataaagtcctaagagcacatttttctgaagcgttagcaattgtccaagcctacttgttcagatactgctcagatgatacctttagcagggggaatgatccaaaaatcatcatgttgggttactgtaccaatggatgaagttttgttgaaagttgtgaaaaaatatagtgataagattttgctaaaggagtcagacagaaagcccaaaagctcaaaaaagaaagggaagaagcattcactatttaatgggattagcctagaaaaacattttgagaagtctgatgagtggcgaggtaccccgccttgggatcctttggtggggggaaatgcatatccaaagttcctttgtgatgtcatggttgaaggcttggccaaacatttacggtgtgttgggatagatgctgcaattccttattcaaagaagcctgaaccaaggatgttgatagaacaagcacaaaaagagaaacgtgtgattttgacgcgggatgcaaagttgcttagacatgattatctgacaaaaaaccaaatatatagagtgaagactcttctaaaaaatgaacagctactcgaggttattgaagcttttcagataaaaattaatgaggatcagctaatgtcaaggtgcacaaaatgcaatggaacatttattcagaagccactgacaactgaagaggctattgaagctgcaaagggctttcaaagaattccaaattgcttatttaacaagaatttagagttttggcagtgcatggactgtcaccaactttattgggagggaacccaataccataatgcagttcagaagttcgttgacatttgcaagctgagtgactaatttgaacttctctgtataatacaaaaaagtcgttttcacttcaatgtatctgttttagtgcaatctatttatgtgatgtagttt

SEQ ID NO: 36954 - DNA, 421 bp, Glycine max
  unsure (1)..(421): unsure at all n locations
  Clone ID: PAT_MRT3847_133371C.1
ggtgattggttagttcttaccttatgttttaggccatgtaaatctatcagccgtgaagcacggttttttgttgtatttaatgtgcaagcaatagttctgcttagtgtggactaactcttggctgatcatttgaaatttgtaactcttttttttcctgttgtaaaagaaatttgtacaattttaattagcttgacaagttttatatttaacctaccctattcataaaatttcacgtgtaatatttcataaaggatggaatgtgattggttagctcttaccttatgttttaggccatgtaaatctatcagctgtgaaggttgctgcacagttttttgttgtatttaatgtgcaagcaatagttctgcttaatgtggattaactcttggctgatcatttgaaagttgtaactctttttttnctg

SEQ ID NO: 36955 - DNA, 2102 bp, Glycine max
  Clone ID: PAT_MRT3847_133372C.1
ggctgcgagaagacgacagaaggggggtgcgttgcttctactcacacttccttcctcttcagcccaccaaggaaactgcttccgaatctgatcaatggaaaactcagacgagcaacttcccttctctccacaaaaccctaacaatgccgaagaagaagacgacgacatcgaagagccagaagacgaagacgaagaagaggaggaagacgacgacgacgacgacgacgtcgtttcgcaggagcaatccccattgtcgcggctgcgcgagcagcgttcgaagttggaaaccctgtcccggcgattggcgtcggagctggtcccaatccgagtccacgacgtgctgattcgcggcaacacgaagaccgatcgaggcggagctcatgctcctcgaggaggccaccaccgtgcaggagctcattcgcgccgaaatcgccctcgctcgagattttcgacaccgccgagctcacgctccaggccgggcggagctgcctcacacccaatggcgtcgtcgacgtcgtcgagactttttcgccaacagcggcgatttctagtacttgctctagctgaatgagcatgatcgtaggaaaactggatttaggttcagcttctcagctccttcttagagattgagttcacaactgagattttttttctttttcatttattctctagcattaaacattcttgctgcctgcaatggatggctagtacttttcttttccttctcgtttaaaatcctgactgaaatcgggaaaatggtgatctatgggatgcctcgttggcctatggtgccaaccaaacaacagagttgctaggcttgtctctaggcttaatctcaacaaggcaccatgacttagtctacactcttggatggcgtaccttgactgatccatcacaaatgtcatccaggtctataaggaggcaacttgggcatggtttactatcatccttgaagtatacatttaaaattgacaggagaaactcaccaattaggcctacaaatggatatgcttttctttctaccactcactttggtggccttacaccagatcatcggagcttgcgatttctgcgccaggaatttgatgttcgttgtgtcatcccctttgggttttataatacagcacttaaccttgggatttctgctggtgctgtttttccatgggggcatggcttcatgaacaagccatctccgcttcctgaaaggttttatttgtgcggtgctttctctccagtttgcacccttggaggaccaataacattgtggggatttaaaactaggggattaggtcctactgaaccacgaaggcgaagtagagatggaattattgatgacaatgatgattcctctagatgggacttcattggaggagatctagctgttactgcatttgcagacttgtcttttgatcttccagttaggtggttgagagatcatggaattcatggtcatgtttttgctggtgctgggaatactgctaaattaactcagaatgaatataagcacttttcacctcggaagttcttagaatcctttcgaacatcggtgggatgtggatttgttgttcctactagactttttcgcctagagggtaatttctattacatactcaagcagaatgagcatgatcgtgggaaaactggatttaggttcagcttctcagctccttcttagagattgagttcacaactgagattttttttctttttcatttattctctagcattaaacatttttgctgcctgtcaatggatggctagtacttttcttttccttctcgtttaaaatcctgactgaaatcgggaaagggcactgttttagtgttgaggatttataggatcagtttttggagaagacattaccccttgagggtcataacatataagttgatgctcattgcatttcgatggtgtatgaaattccaaattattcgctcgtgtattgctactttagaaggcctcgattggcactgagaattctcaaactttgtttgttcaacttaaattgaataaatcgctaacattcgttcagataattcttgtggatatttatgcctattgtcttccaaatggtaaaacagcaaattggctttgtgcttgtg

SEQ ID NO: 36956 - DNA, 435 bp, Glycine max
  unsure (1)..(435): unsure at all n locations
  Clone ID: PAT_MRT3847_133373C.1
agggggaaactttcatttaatatatcaatgcccnanacttttatcttaagcagctatgttccactctcaaggttgatccataagaagtgacaacaaggatacaaaaccttttanannanttaannncantnanaaatnaaaattcttcttttcattcaaaancagcaatctacaaagcttctttcatttcaagcaaagtaatgttaatagggaattcaaaacagtacatggtactngttgagtgctttgatgatactgatgctgagtcacttaaaagtgccgcanaatatttactggaaacactaacatatctancanctgtggtacttagctcatgtccangtgaagggaangttantctanttgctgcttttactccaggggtggtttatcaagggatccattcaggcaattttatttgacaaatagcaaaat

SEQ ID NO: 36957 - DNA, 933 bp, Glycine max
  Clone ID: PAT_MRT3847_133374C.1
tccctattgcccttctagctttttcccagtccaagcagcctccaattcgtgccactctcttcaaaatggccgttaccttctcaaatctccacacagaatcaggtctcaagtccctcgacgacttcctctctgggaaggtctacgtttctggggatcagttcacaaaggacgacatcaaagtgtatggtgctgttttggagaagccaggtgactcttttcccaatgctgccaagtggtacgaggttgtctcatctcagcttgctgcaagcttccccggcaatgctcaaggggtgagattcagtggcaaagcttctgctccagcggaggctgctcctgcgaaaccggtgtgcatatacttttttattttttacttttaagttacttcatggttgtgatgtctgtatctttgaaattttaaacgtaattttagttatgtaatgcaattttgatatttagtaaaaaaaagtagaacttgattacgtagtcatgttcatatcttttgtgtatttggcacaacatagttgcctatcattacaaagtttaagttataaacaacctcatggtgtttttcagttgttttgttacgaatgcagagccacatttgggtatgaacaacaaaaacagagcagccagggtggattatgcaaaagagggggtgtcaacagaagataagcccaaaagaaggatcagaaaacccacatacctggatgacttcgtctgagaataacgacaacaccaggaaatgctgagtcattcacagaatcttcgaaaatcttcttccaacgacattcttgctcaacgttatccaaccggcatagcagcactaacaaattggtgattgtaatattcctaggatctttccgttactaggaggattataaatacctgtaaataaagagccagaatcaatgaaaagtttatgaatttctctct

SEQ ID NO: 36958 - DNA, 1547 bp, Glycine max
  Clone ID: PAT_MRT3847_133375C.1
aaggaaactgcttccgaatccgattaatggaaaactcagacgagcaacttcccttctctccaccaaaccctaacaatgccgaagaagacgacgaaatcgacgaaccagaagacgaagacgaagaagaggaggaagacgacgacgacgacgatgtcgtgtcgcaggagcaatccccgttgtcgcggctgcgcgagcagcgttcgaagttagaaaccctgtcccggcgattggcgtcggagctggtcccaatccgagtccacgacgtgctgattcgcggcaacacgaagacgaaggcgtggctgatcgaggcggagctcaagctcctcgaggaggccaccaccgtgcaggagctaattcgcgcctccgaaatcgccctcgccaggctccgtggcctcgagattttcgacaccgccgagcttacgctccaggccgggccgccggagcttcctcacaccgccaatgttatcgtcgacgtcgtcgagaccgccaacaaaatctccggcgatttcggcgtttacaccaaacccgcgactagttcttggtctgctgaaggtggtcttaagtacaaaaacttgttaggttatggtgatctatgggatgcctctttggcctatggtgccaaccaaacaacagaggtaagtgtaggagtgtatgcccctcgactgaaaggattgctaaccccctttgtagcacgactatccatgctttcccaagattggcaagagttttcttcatataaagagcagttgctaggcttgtctctaggcttaatctcaacaaggcaccatgacttagtctacactcttggatggcgtaccttgactgatccatcacaaatgtcatccaggagaaactcaccaattaggcctacaaatggatatgcttttctttctaccactcactttggtggccttacaccagatcatcggagcttgcgatttctgcgccaggaatttgatgttcgttgtgccatcccctttgggttttataatacggcacttaaccttgggatttctgccggtgctgtttttccatgggggcatggcttcatgaacaagccatctccgcttcctgaaaggttttatttgggtggtgatttctctccagtttgcacccttggaggaccaataacattgtggggatttaaaactaggggattaggtcctactgaaccacgaagacgaagtagagatggaattattgatgacagtgatgattcctctagatgggacttcattggaggagatctagctgttactgcatttgcagacctgtcttttgatcttccaattaggtggttgagagatcatggaattcatggtcatgtttttgctggtgctgggaatactgctaaattaactcagaatgaatataagcacttttcacctcggaagttcttagaatcctttcgaacatctgtgggatgtggatttgttgttcccactagactttttcgcctagagggtaatttctattacatactcaagcagaatgagcatgatcgtgggaaaactggatttaggttcagcttctcggctccttcttag

SEQ ID NO: 36959 - DNA, 541 bp, Glycine max
  Clone ID: PAT_MRT3847_133376C.1
cccgcgtccggccggagctgcctcacaccgccaatgtcgtcgtcgacgtcgtcgagtccgccaacagaatctccggcgatttcggcgtttacaccaaacccgcgactagttcttggtctgctgaaggtggtcttaagtacaaaaacttattaggttatggtgatctatgggatgcctcgttggcctatggggccaaccaaacaacagaggtaagtgtaggagtgtatgcccctcgactgaaaggattgttaaccccctttgtagcacgactatccatgctttctcaagattggcaagagttttcttcatataaagagcagttgctaggcttgtctctaggcttaatctcaacaaggcaccatgacttagtctacactcttggatggcgtaccttgactgatccatcacaaatgtcatccaggtctataaggaggcaacttgggcatggtttactatcatccttgaagtatacatttaaaattgacaggagaaactcaccaattaggcctacaaatggatatgcttttctttctaccactca

SEQ ID NO: 36960 - DNA, 755 bp, Glycine max
  Clone ID: PAT_MRT3847_133377C.1
ccacgcgtccgtccactgcaacttgtcttagagaagacgaaacactctctctctctgtgataataatcatatcttaagtaaacaaacaaaagaagaaaaataagtaaagaaaaagagaaccaaatgttcttcgctttttcgttctatcgccatgtgagttctgacacattctattcttcttctcgtgttccctctttacttcatacctcgctggtttcccctgactcaccaactcggtgagtcaactcgatggcctcatcctcacgtgcaaggagcagctcgccattctcgcaccgcaaaccctccactcctctctcctcagcttcctcttccacttcttccttcacgaacggacgcgtaatgcctcgctcctgttcctcttccacgtcatcgttttacaactccggtggtggtggacgatccatgactccgagtcgcggtcacagcgagtcagtctgctacgattacggtaatccttcgccgttggagttcgggatggacgaggaggtgatcacggagcctgtggattcgtcccgagctcgggatagcatttctgtcacgattcggttcagaccgttgagtgaaagagagtaccagagaggagacgagatcgcgtggtatgcggacggtgataagattgtgaggaatgagtataatccagctactgcttatgcatttgatagagtgtttggaccgcatacgaattccgacgaggtgtatgaagtaactgctaaacctgtggtgaaggctgctat

SEQ ID NO: 36961 - DNA, 461 bp, Glycine max
  Clone ID: PAT_MRT3847_133378C.1
acggctgcgagaagacgacagaagggccaagtcatttccaactactccctccgtgcctttttataagacattgttttgaaattttttttgtccctttttataagactcttttttacttgtccattagattaattatcttttactaaaatactgttagttaatttaggtaataaataatagacgctatgaattgtctctttctctctctctctctctctctctctctcttatgaggattggagaatggaagagtttagttttaaaaattaaaaccccactactattattctctctctatgcattaattacttaagggtaattttggaaaaataatacaattactattatgaacctactttcagcacaaggattgattcccacacaatgtctcacagaagcacttagagagtgatagagagaaagaatgaatctgtttgtatcaagcaagaactctgtaacag

SEQ ID NO: 36962 - DNA, 276 bp, Glycine max
  Clone ID: PAT_MRT3847_133379C.1
gaaaaaggaaatgaaagaaattactattttttctctctaccctttgcttgtatattatccagtgacaatcgtactacatgtaaaacaactttgttacgcacataaccataacgcaaatgttcttaaataatacaatagggacgagctacgattactccttgattaactaacaaggcatcaataatcgtttgccatgtttggccacagggaaatggcatatccatctcctcccaaggcgtatccttcctaccctgaggagttgtatgccatggcata

SEQ ID NO: 36963 - DNA, 263 bp, Glycine max
  Clone ID: PAT_MRT3847_13337C.1
tcaaaatttgagcttgttcgtggtccgtgaaggatctggttcttgatcgagatcctgttttgttaactttttccttgtggggttgcttcacaatgaaaaacacttaatcatatttgtgtatatttcttttaaaaaattgttgttgctggatgggaattggagttttattacctcattaaaaatgagtataagttacagataaaacttcaattctgattaaatagttatagaaaacaataattgttcaaaaaaaaaaaaaaaaa

SEQ ID NO: 36964 - DNA, 643 bp, Glycine max
  Clone ID: PAT_MRT3847_133380C.1
ctttatttgatttcttaatttctttgtcctagtaccattctcagcttcaacaagaaatgtcatctttgcgagtttggctaggtcaactcttgttttcaaacctgcgtcctttcttcatcctttcctttcatacttcattcatttttcatgtggcttctttttagtccatgataataccctcatcttaatcaccctagttcactagattggtttggtttcacccttaatctctcagaaccaacttctactagaggatctttccataggacttctacacatgtaggcttctctattttccctttgttgttgttgtttgccatatatctaagattttctgaaaaacaaaactatcttatgtttctataagtggtgaagacaatattattatggggactaacaggcaggagcatgaaatttcaggaggatctgaggcaacatatcaggagatgatagaaaatgaagtcaaggacactcaggaaggctcaacacacaaattaataactgagagctgcaaatcaaacagcatggttttaaagaaaccacattacgtgattcctgctcacatcataactgaagccatatcaactattgccgatcttgacattagatggtcagggcccatcacaccaaaggaaagggaata

SEQ ID NO: 36965 - DNA, 365 bp, Glycine max
  Clone ID: PAT_MRT3847_133381C.1
tgcaaacatcacaatgaggctctctaattaagactcttacgaacaaattagagcgccgtttaaaccgaacacagggggcatctaatcggaaattattaacaccactgaagatacaatggtctccaccacctttaaggtcgatactataccaaatgcatttacctcatacgctagaaatacccagaatattaacatgcagacacttgtctctcagtattacaacacgtggtgatacatcacaactaccaataacctgattacactcacagaccagatacataaaatactctggactgttatactataaactacattacacatgctaagctaccttgcatctgccctcaaacaaagaatgtcatact

SEQ ID NO: 36966 - DNA, 401 bp, Glycine max
  Clone ID: PAT_MRT3847_133382C.1
ggacacagcgaagcgcctctggctgacatagattgtcacttttacagcggtgctcaccatgaaacagggcctctggcgaattctctatggacagcttggcttggatactggacactgcaaagcaagcattgagattcgtgccttgtatgaaggaccctactacctgtcggctgccggacatcaagaagatccggtatgactactagtctgccgaacgggattgaaaggcccctatgccgaaccacgcgctctaccctgatgcaaatggtgctgcttagaccaccgtgcaaaaaccctcatgagtctctttgattacagcaacactatcgacacctcacgactggattcatgcacagcctactttaaaagggccttgctctcaggaactaacagtggcgaac

SEQ ID NO: 36967 - DNA, 734 bp, Glycine max
  unsure (1)..(734): unsure at all n locations
  Clone ID: PAT_MRT3847_133383C.1
gggagacaaaaatgataataatactagatatatattgtattttctcaaagtctagaaatgaaaaattgagagcagtgagttgaaattataaaaattgaaggggcaaaaagataacaacactaanatatatacttgtaacttcatcaaagtcccgcgcatctgcaccccctcaggacaacataggtccgtcaatgccttcatggcaaggaagttggtggccttacagttacagaagccaaactcagagatgacaaacatgttccaaaacgaactcttgagaatacttatggtgtaaaatccatggcaagttacttgcttcacaatttagcaaaaatagtcaaagctcttaatctgcaaacttttatggcttgatacaaaaaattatgtgtaaatgaacaaaatgatgcattatggattcacgaaaatagggaacaaatggaatgaacaactttccaaatagctacctgtgcctaccggatttcacttgcaaactagccatttcatcaatcacaagctcatcaattaagtccttaaatatctgtctctcagcatccaacacaaccccaggtaattgaactgagaaacctgtccagttttctgagtgacacatcacatcttcccgtagcatacttttcagttcatctccctcatcttctaagctacaatctggcttcacatattgaagtttttgtacctcaaagcaaagttctttaagaagcttttgtgcactgacg

SEQ ID NO: 36968 - DNA, 461 bp, Glycine max
  unsure (1)..(461): unsure at all n locations
  Clone ID: PAT_MRT3847_133384C.1
ctcgagccgaatcggctcgagtacggctgcgagaagacgacagaaggggtgctgaaggatatcaggacacaatgctctgataggatgtgacattggggtataggtttttatattaattgtatgaagtcttaggcggtcttgtttgagtcgagatgattttattatttatttggacaagtttgaatatgatgtaaaagaaagtgaatgtgagccttttaccctgttgaanggntccatttaaatgtgttttaaaaacttttaattaattatgattttttttccttttattagtacatatatgtatgaggtagagggtgtcacaaacccattgttccaactagctaagttgcttcacagaggcttgtaaccttggtccacactgaacacaaccacaaatgctttttattttttataggcactaacacaaacgctggcttaactcgaggggcccccatgccctt

SEQ ID NO: 36969 - DNA, 461 bp, Glycine max
  Clone ID: PAT_MRT3847_133385C.1
acggctgcgagaagacgacagaaggggatgaagaaggttgatcaaattgttataattttgaaattaaaaaatgttgggttaacctttttctttccttaacttatttcagaggtggacatttaaaagaataaagggaattgaaagatgagatttggggtatactcaagaatagggaaaaagagtaaagattaaatatctggaatctaatcattaagtaattgttctgcagtaagaacaaaaaataatttacattaatgtacaattgggagacaatactcatgggtcaaaattgagttcacaaaaatcatagagatgctctatgattagtgattgaagatgttgagaaggaaaactctgctcctaattagttttcttgttaggtgctcaactcctatgtcttgtgagttgctctatgattagtgattgaatatgttgaggagggaaactctgttcctaattag

SEQ ID NO: 36970 - DNA, 892 bp, Glycine max
  Clone ID: PAT_MRT3847_133386C.1
tacggctgcgagaagacgacagaagggggactgttgcttgcttaaaccaatttctctctctcctctctctctgattaataacttatggacggtttttcaccggaggcggaggcgacagcggtggccgtacggcgggcgttggagctgctgcagctgaacgaccccgttttgagggtccaagcggcgagggacatccggcgcctgaccaagacctcgcagcggtgccgccgccagctccggcaagccgtggcgccactcgtgtccatgctccgcgttgactcgtccgagttccacgaacccgcgcttctcgctctgcttaacctcgccgtacaagacgaaaagaacaaaattagcattgtggaagctggtgcattagagccaataattagtttcctcaagtcaccaaatccaaatctgcaggagtatgcaactgcatctttgctcactctatctgcctctccaaccaacaaaccaatcattagtgcttgtggcaccattcctcttcttgtgaatattctaagagatggaagtcctcaagctaaagttgatgctgtgatggcactgtccaatttatcaacaacacaacctgaaaacctcagcatcattcttgaaacaaatgcaatgccttttatagttagtcttctcaaaacctgtagaaaatcctcaaaaatagctgaaaaatgctctgctttgatagaatccttgttatgaaaagggaagttccttaacatctgaagaagtgagttcttgcgtgaacccccaaagtgacatgctgcattgctgactatatttatagaagaatcaacacctttttctcaaattgtaattttggaaccaaaaagaaaaaaatatttattttgtctcagaatatataaatattaaatggttatac

SEQ ID NO: 36971 - DNA, 375 bp, Glycine max
  Clone ID: PAT_MRT3847_133387C.1
tggggtaatgattaaatagtataatttccgaaatggtgtcctggcatctacttggtgtatttaattggaggttacgagttcaaatcatagaaacaccctctccttttctgggagtaaggttgtgcacatctaactttcccccaaaccccatcaagtgggagccttgtgcactgggctgcctctctctctctctctctctctctctctctctctgtctctctctctctctctatatatatatatatatattacttatatcttctactcacatattccatttttaaatatcacccttatctatattcttaatatatcttataaaatttatttttattaaaaacattttcaactatacttcctaacttcttacaacct

SEQ ID NO: 36972 - DNA, 430 bp, Glycine max
  unsure (1)..(430): unsure at all n locations
  Clone ID: PAT_MRT3847_133388C.1
natagggcaaagggctgggtacccgcctgggcagggtacccgggtcnnccggaatatcccggggggtcgaccccatcttctgtccnngatctattannacaaggcnnntctcaaatagaatattcagtgactgactgnngtcaggtaccgcggtggagggatntggggatttcccaacttacctgggnnntatggtnncaggagaatgtagannaaccgagcntnngctcgccaanatgaattcctcacagnggtgatggaccctgatgatggaaggtnngttgagcatnngtggaggtnntaatttttattatcccggnnggcccccanntgggcatggannaaagtatttgggcggaaatggttcaaagggcacctgaccaacggaatgggaaaagtttacttaccttgattgggttgagaattagag

SEQ ID NO: 36973 - DNA, 515 bp, Glycine max
  Clone ID: PAT_MRT3847_133389C.1
atagagtacccccattaacaccgacctcaatcacattcctatgtaccaccttcccttgcctcaaccaaatcgctgtccctcgaaggtattgataaaagatagtcttcccatacttccgctaattctcctctgacaccgcctccttccgtcgtcgtgttttgtcgcaccatgggcggaggcctcagccgcgaagtctgccagtggtgtcacaccatggaggcgcggagtgcgcgatatgtccagaggaattgcaagatggcgaaagatgaagatgattccatactgcaagcacgtgttccacccgcttctcttacccaaaccaaactttcaaccttgtggttcgaatcgcgatttgtgctatcgtggagttattcactgaaggaacaaatttgtgttgttcttctttgactcaattcgattgcgctattttgctctaattgttgctatggcttttctttggattttttatttgagagggctttgcttcgcctgattcggatttatttgatttgcat

SEQ ID NO: 36974 - DNA, 950 bp, Glycine max
  Clone ID: PAT_MRT3847_13338C.1
tacggctgcgagaagacgacagaaggggaatgaacccaacacaacacaatcccaacgtctctctgcaacaacactcaaaccccacactggacaccatctctctcatgaagcaaggcttcctcatgatggaggaggactttgagagaggaccaagataccatgcatacgctgcgttgagggaaacaaagcttcgcatgaagtacacgagacaacaagaatacgaacaagaagaagaaaaagagggtgttgttgaagcaaaggtcttaactttaaccccaccaagaaaaaaacaagtcaagtttcaagatggtggtactggtgtggtttctgggagaaaagggtcatcatattcatcctcatcttctcttgtggcacagtctgtgccggatttttctgctgtgctgaggaaggagaataggaagccggtgaatggtaacgtgttacctcctttgatggagttgacacctccttcttccaagggtgttctgtcgagtgcgagagggagtaagtcagcgaatgctggtgagaagagaagggctgttggtggtggtgttctcatgccgaggaagagctatgccagtattgatgaactaaagagtttgcctaatgccatcaatggtgagaacagaggaggaaggagtagcagggtcatcacaagaaagactgttttagggtataggcacatttgaggagtgtaatggtgtttccttaaaccctttgattttattttatttgttcatttttgttgtagctttgctgatagatctttacttttcattctttctggtttcaatttttttttttaattttttgttttttcgggagggacttaaagtattgtgtaagtgtaaagctagtatgatttgagcgagtattcatcaccatgacagttttaaagaaggacttggctaggtgtgttttggaataaaagtattttttttttttcatcc

SEQ ID NO: 36975 - DNA, 316 bp, Glycine max
  unsure (1)..(316): unsure at all n locations
  Clone ID: PAT_MRT3847_133390C.1
tntnngatgntcgcgcggtggannnnnngnnntnngnagnntnnnngnnnntacnngnnntcccnatncnnnnagnnncnnnantnnngannaggtnncctnnnnncnacgnnnncgngncngannccctcanggtcgnnngtggggtgnnntngngcngncagncgcncggngtcngtcggntntcnggtgngngnggagnggnggnttgntggncaggancttggtgtggntgcgggtntgtggngaggggtngtggggntncggtngactgggggagggnagtgtgcctnnttgggtangngggngnnncggn

SEQ ID NO: 36976 - DNA, 136 bp, Glycine max
  Clone ID: PAT_MRT3847_133391C.1
cgacgaagccgcatacgacctacagtacttcaaattccagcccatcaaagaatccatcgtgtcacggtaaatgactcgccgctacatgaccgacatgataacctacgccgacgccgacgtagtaatcgtcggaacc

SEQ ID NO: 36977 - DNA, 343 bp, Glycine max
  Clone ID: PAT_MRT3847_133392C.1
gccacgcgttcgaccactcgtccgctgagatttaggaaaaatctccatctctttctagttcaagctcgtcgatttgtgagaaccatgtgatcaactgtgtatggcttgtatcgaataatgcttcataagaagagttgagtattaagattactcattaaaccatcctgttgctacgaaaattcagggctaatcttttggcatacaagtatctgcggctactgcaaacaaagtcctatcttcactgggcttctgaagtcatatgactttggatgtatgccaaagtgtaagccttatggtttgtcagatgctattgcaaatgctgaaaagctgtcttgaatatctt

SEQ ID NO: 36978 - DNA, 1259 bp, Glycine max
  Clone ID: PAT_MRT3847_133393C.1
tactcatagttttgtaggcactagagtcttaaattttccagatgagggagatgagtttgacagtgacactgacatagatccaatgcatgctggtctcagccaatggatttctactgatgaagacaatgaagaggaggaagaggaagaagaagaagaggaggaggaggaggatagggaatgggaattagctgatgtttatgaagctgaagccacatcccaccttcaaatttttttcacctctagtccaagtgagagcagggatcacattaattctactgaatctgggggaatgtttagccagataatccgggagacctggcatgcttttgaggatgttgatttacctcatggagcaaactttggggattatcttgatgctagacgttttgaagatctgcttgagcatctggctgagaatgacagctcaagacgaggagcgcctcctgctgctgtgtctttcgtgaataatctgccacgtgtagtcattggcaaggaacatgagaaccacggcgaactagtttgtgccatttgcaaggatgtcttggcaccccgcactgaagtaaatcaacttccatgctctcacctttatcacatcaattgcattttgccatggttgagtgcccgaaattcatgtcctctttgtcggtacgaacttccaactgatgataaggactatgaagagggaaagcagaacattgatagtagaaatgtgatccatgagaggcaacgaatagatgtaacagatgatagttattctgatgtttctgatggagatgaggtgaatggtagtggtcaaggtggaatacggcaaagacttctgagctcaggttccactgtggattcttctgcaacaagaagtggtagaggaagatggttttttcttgctgcagctccaattgttagtctagtgggcattgttcttgtcttgtggttgggtaacaactctcagaatgaaggaagtagacatctgggcagtcactacttatccgggcaaaaccaacacgctgttcatgcttattcctctccaaaccagagggagggtagaagcagagggtggtggtgcccattttaagtgcttcttgatttgtttatcaatatgcctcatgatggccacttgggatgaaatttttaactgactcatggcgtgccttttgtccttagctctctaattcaagaagacatgtacagattttagtttgtaatatggtatctgcttttgtttcttgtttcatttctttcctagtttgtgcttcaaggac

SEQ ID NO: 36979 - DNA, 466 bp, Glycine max
  Clone ID: PAT_MRT3847_133394C.1
ggaattcggcacgagggcatggacagatgaccgatcgaggtctaaaaaagaagcacggctgcgagaagacgacagaagggttcctaatcgacatcatgcaaatttcattcagggattgaatagaaaactcaatagccgacatcggtcgtgaaatggccctgactgatatttttcagccgacattgcgcaatttttttataaaaaacgctcgctggccgataatgttttttcttacggcaggggaagttttcttgtttcggtgttgcataaaaaacttacattgcaggtcggctaagtttttccgtgcgagctcaaccgatgtttcatttcgcccgaaactggcatgttctgatttattcggccaggaaaacattagcccacctcggcaaaaaaaatattattcaccgatattgattgaaaaaaatgacagtcggcgtcggccaggaaagacgaccgatcgaggtgt

SEQ ID NO: 36980 - DNA, 535 bp, Glycine max
  Clone ID: PAT_MRT3847_133395C.1
aattcggcaccaggatggatggagatgctgattgggtatgctattggtgatattttgtaattggattagagcaaatgatatgtatgatggagttgaggatggctatgacagctcaagagatgacatctcatcagtttcttcttataaccccatgagagagagtctacacagaggctttggaagttcactgtcattgcgatcttcttctgcaagatcattgtccagggatgcttctactttagaaggtttccgaacaagtttatcttcaaatatggcacttcctaagctgtctgttgctgaagtgttgtctgattctggtgctgatgtcttgtcaacccagaagtcatttgcgattgtctccccaaatgagcaacagaagctgcgaaagacattttctgcagaagatgatgtgggagtatcctcttcacctgaagctggggctgtagaatctttatcatcagaaggctttattagaggaaggtcttataatatccgacttgatgatcaagttttgcttaaattttcccctagaaat

SEQ ID NO: 36981 - DNA, 444 bp, Glycine max
  unsure (1)..(444): unsure at all n locations
  Clone ID: PAT_MRT3847_133396C.1
ctcctgtctgatgacaccacatgcacgttgctaatgttggaagcccagggaagactcactacggatccggggagtgcaagacttacgctttatactgtaagtggtgtatgcatttcattgtacatgtcgtgctatgcggactcgggaatgcgcatctgacataaatacgaagagtccttatggtgtcgcattgagcatacagactcttgatcagcctataggggctgcctatgatgttcagcagttgaatgacatgactgttcgtaaatatggagctgcatcatctggaacaaatgaaagaggcagggactgacatggtagaacagatnctacaactgatgatgggtgatggatctaatgtaacctgctgaacccaatggatcaatcctgcttcgaggactcttggattcggctttaaaactatcaagatgccgggaggtctga

SEQ ID NO: 36982 - DNA, 268 bp, Glycine max
  Clone ID: PAT_MRT3847_133397C.1
attcatcaactacctttatcagggggagtggtttgttaataaataatatcatctgctatagacaattaaacacaccacccatacatttccaaatcattatttttgatccggtacaaatctttagtttaaggggccaaataacacattccttattggcctataactgaacactaggaaactgaccatcctgggcttaagagtatagcagggtgcgaataaagggaaataaaatcattcttaacactatgaagaggctgggatctgtgaa

SEQ ID NO: 36983 - DNA, 161 bp, Glycine max
  Clone ID: PAT_MRT3847_133398C.1
tacagctgcgcaagccacacaaacggggcttcacgcttatttccacatgccattaccctgacatcactgtctaactgaaggaggatgcgtactgtcttcacatgataatactattccttgcaccctcggaactgtgtttctatatagttcaacaggacata

SEQ ID NO: 36984 - DNA, 241 bp, Glycine max
  Clone ID: PAT_MRT3847_133399C.1
tttgcttcgcatttcactcctcgtcgtgccttgtgtccggtgacggccaatcactgcatatggtagacgaggagcaagctgcagaacatggcatccctaggcggtgacgggctttgacctccgtcagatctataccctgctctctcgcgctcgtctatctgcagattctatatcatgggcaaggaggttctacgggcgagagattgtgtcacccaacgcttcggtgtttcaacggctggct

SEQ ID NO: 36985 - DNA, 478 bp, Glycine max
  unsure (1)..(478): unsure at all n locations
  Clone ID: PAT_MRT3847_13339C.1
gctcaactaattaatatatccaacaaatttccacctaaagggaatgatacaacagttttagattcaaaatttggtcttttgatgctatctctagagttttccaatccatatgcatataatttcaaataatttataatctatagaatattttcacggacattcaataccaccttagcaagagaatgggagaataaaataaaattgttcaggtgcttttcgctttttatcagcaagggcttcccgttcaagacgcacgaaccgctggtagggttgaatgccagaatcatcattatcatcaacaaagtccaaaggattcatcccggttttgaacctgaaagtatattcctcttcatcttcttccatgtcagggtcctccatggatgntttcctatatatatatatatatatatataatggcctattatgaggggtctatagtttgaagcctataggtataatatctatccatggtttggaa

SEQ ID NO: 36986 - DNA, 548 bp, Glycine max
  Clone ID: PAT_MRT3847_1333C.1
accaaccagccgggagagggagcgcacgcactgcgagaatggccacggccggcggaggggccgggcatctgaagctgctgggcgcgtggccgagccccttcgtgaaccgcgtacgcatggcgctgcacctcaaggggctggagtacgagaacgtggaggaggacctcaccaacaagagcgacctgctcctcgcctccaaccccgtccacaagctcgttcccgtcctcctccacggcgacaagcccatctccgagtcactcgtcatcgtggagtacctcgacgacgccttccccggcgctggccaggccgtcctccccgccgacccctatgaacgcgccgtcgctcgcttctgggccaaatacgtcgacggcaagttgcacggcatgatggtgaaggcgctcatggaggcaacagaggaggagagggcgacggcgacagtggacgcgctggccgctatggacacgctggagggcgcgttcgccgagtgctccggcgggaaaaagttcttcgccggcgacgcgcccgggtacctggacgtcgcgctggga

SEQ ID NO: 36987 - DNA, 240 bp, Glycine max
  Clone ID: PAT_MRT3847_133400C.1
aaattctatattatctttaaaaaatcttataccactgtctaccgagccacataccacaatatctattcattcacttacctctaatccattaattgctatccatccatgaataccaacaatgacattacctatattgatatctactcaataataggcctaatcattgcaattgttacctccaaaagattatatgaaatttctaactttttaatatctaggagaccttaatgatatacacta

SEQ ID NO: 36988 - DNA, 167 bp, Glycine max
  Clone ID: PAT_MRT3847_133401C.1
ttccggtcattccctctgttttgtcttcaaatccattgtttcgtgcaaatcccgatatttaaccatgcttctccgaagcgccgcctctgccgcttctgcttcgtctctctccctcttcagctctacctccgaacctctccgtgcggttcccgctcgtggattcgtgg

SEQ ID NO: 36989 - DNA, 1939 bp, Glycine max
  Clone ID: PAT_MRT3847_133402C.1
ggctcgaggggagatcttcacggcctcaaagtgtgtagaggagcccctcttctcacacacttttttgctgaccatctcttcctattttgcagggctaatgttaattaagttgatatccttcacagtattctcggtgcttttgagaaagcctcaggtctttccatcatcttccagaaatctgaatttttttagcagaaacacaccacccagcatcaagcaacaaatctctggacaactgcaagttacagattgtctgggaacagggaaataccttgggatgccctctatgaatggtaggaagaaaaaatccatcttctcctatctgagggataaaatttggaggaagatccaacagtggttaacacctttcaaaggttggtagagaagtgctcatcaaatcagtatctcaagctattcttgcttactgcatgagtgtttttctcctcccttctacccttcaagatgagatccaaaagatgatgaactcattctggtggggtagtaatagaaactatgggaaaggcataaattggctaagttgggagcgtctaacaatcaggaagaaggatgaatgtatgagatttagacatttatatgcttttaatttgtctatgctaggtaagcaaggattgaagctagcttctgatggacattgggagatgggaaaactgccaaagtttggaaggacccatcgccacgatctactgatggttcattcgtcaccaaccccattattgatggtctggaggacttatcagttgaggctttggtagacccttttcaacaaagtcctggaacaaaattattctaaatgaccttttcacagcagaggatgtcactagaattctttcaatgccaacctatttcagggatgaactagacaagcttacatggatgtttagtagagatggattttacacagtcaaatccgcatactttcatgctacacagagtatggtagacaactcaagtctgcgtgaagaaggacggtagatggatatatggcaactgaagattccacaaagggtgttgataattatggagaatagcacgaaactgtctccctacgcatgacaggcttctaacaaagggtgttgattgcccacccacttgctctttgtgctcacattatattgaaaacgattggcacatttttgttggttgtgagcatgcgaagaaggcttgggaggaggtatcgctctggaacaaaatacaggaagttgctgtaactggggatgacatgaaatcacttatattcacatcattaaaagcattcaccactgttcaaacagatacctttggtttctttggaagcgacgtaacgagaaactttaggaaaatatacagaagcccctcaacatatcattgaactctccttccagtatactcatgattggaagtaactctgttaccgcagaccttcactaccctctgctgctaatagttcaacgccaaaatggtccagaccatcgctagagttcatcaaatgtaatctggatgcctcactctttcgcaattatcttcttcatggacttggggcatgcaacagaaactcacagggaacttttgttgctgatttatcttgctggttcaagggccttcttccacccatggaagctgaagatcgagctctatctcaagttataacttggttactgaacaacaacttcaccaaagtcatcctggaaattgactgtcagcagctagtggacaccatcaacacgagctatttccaaaaaaatgaagttggagatatcctaaagctctgtgtttctaaatgttcaagttttgaaaactgttcaatttagtttgttagtaggcaaaccaatcaagttattcattccttagcaagaacatctagattctatgtttgtcaacatgcttttgatcatagtcattccttagcaattcagtttgttaatataagtctctccttttt

SEQ ID NO: 36990 - DNA, 476 bp, Glycine max
  Clone ID: PAT_MRT3847_133403C.1
taagaatgccctacatacaggatcacagtgcagaaattccagtggtggaaccatgatattggctttttttagaatggttgtatttttgatgcagcctcttccagtgagattcgtgatgctttgaatgataaagcccttcaagaactaatttgccgtattgattgcggctcaaatgcagagaatgagcttgataaagctatggcagaggaggcatttcgcttgctcactgacaagattttatcaaccatcaacccatgactgcaagcaatggttactgaaagaaagaatttgttgaatatgaaaggaacagcagataagcctccaaaatttgcaggttttggttaatatttcttttacatttgtacagctttgccctgtgattcagcttttgatgtatgataaattttgtatcttgaggcattgtattggtaaaactcaaatctgtcaagtgttgcctttgggccatggctctcttg

SEQ ID NO: 36991 - DNA, 1331 bp, Glycine max
  Clone ID: PAT_MRT3847_133404C.1
aaaaaataatttttgggaatgaataaattggtaaaattgtaataactcctggttgcgcatggttgtggccttagcaatttaggggaagagaagaaagtgctgaaaagagaaagttgttatccacaagacaacgtcatcaacattacacaaggcgcagggtggtctctgtgatggcaacctctttctctccgacagcctctgtcggctccatcatcttccaaaaccctcccaaaggccttcttcttctctcccagcagcagcaacaacgctccttcgcctcttctgcaagctatgcaactctcaagctccctcgcgccttcgcactttctccaagacccctcctttccaaagggagaacaacacttgtgagggctgctactatcgaagaaattgaagccgaaaaagccgcaattgaaaaagatgctaaaaccaggatggataggactattgataatgtccgtacaaatttcagttccataaggacagggagagcaaacccatccatgcttgacaaaattcaggtggaatactatggaagcccagttagcttgaagagcatcgctcaaattagcactcctgatgccagttctcttttggtacagccatatgacaaatcaagcttgaaggctatagagaaagccatagttagctctgatcttggtatgactccaaataatgatggagaattgatacgactgagcatcccacagttgacatctgataggaggaaggaactatcaaagatagtggctaaacaagctgaagaagggaaggtggctttgaggaatataagaagagatgcattaaaagcttatgataaacttgagaaggagaaaaagctctccgaagataatgtgaaggatttgtcaagtgatttgcagaagctgacagatgagtatatgaagaaagttgacaccatcttcaaacagaaagaaaaggagttgctcacagtttgatgctttgttgcaaaaagtaaatgctgagttctatctaaagaaggtcaaattttgtgcctactttgctccagggttggatgatgaatgcgcatgttcattggttatacagaagacaaacttttgaattaaatagatgtttttcaaattggaaaggtgagttcatgtctgtaaattggatttatttcacgtaattcttcattgaaattagaccctcaccgaaccattgttgtcaaactcttgaggctatggtagactcttacaagtttatgattctaggtataaaaatcaagttagctgactgtcagactcatttatggaaaacagggtaaactaaagaaaataacttaattaagcacttagtgattaagtacttat

SEQ ID NO: 36992 - DNA, 562 bp, Glycine max
  unsure (1)..(562): unsure at all n locations
  Clone ID: PAT_MRT3847_133405C.1
aaatatgtcaggaactgcagatatggactctttgtggtgtgggagaatctgctcaaccacatcagttctgctccttcaaccatcctttcttccagtcttaagagggatatggcgccttcctagcgaaccaatgccatttcgggcagagagaccgaggatatcagcacatgacacnactccagcgcattctcttccaaacgcttcttgatgggtccaattgtacttgaaatttctcaaccgaaagtttctatttgtttctttccaagacaagctccttttggtggagtcaaccaccagtaagccatcccaactctaacaagccagttcatgaaatttgttcctgacccagaagaaaccagtgttcttgtggcgcttgtagagaagcttgacttgttctgagatgatgtcttcagcctgagggcatgattccttgtagaagttcataacaaggccattatcttgcccttcccccgcaacagaaggactcagtgacagtgctgaaatgcatattaacacagccagaaaggttaaacccttgggagccattctccggacgcgtggg

SEQ ID NO: 36993 - DNA, 161 bp, Glycine max
  Clone ID: PAT_MRT3847_133406C.1
gaggtgaagactgaagaggtagctagtactgcacacgctgcgacgtcgcttcggagaaggattttgggcgccaaataaatcgtctcatcatagactccatagtctgaacgctaaacgaaaccaagccccaaatacaaataacgttggtgtcaggtgtcact

SEQ ID NO: 36994 - DNA, 453 bp, Glycine max
  Clone ID: PAT_MRT3847_133407C.1
aagccatagaaattaagtgttcatagaagacattgattagaaagtatataaaccaaggggaagcagaaaaagaagcagcaccttaggaccagttgcaatcaacagttaagtggtatcttgagggagtccttgtttggagccagaaaatggccaagatgctgggcctcttgttcatgattggagcaatgttgtttggtgttggagctgaaccagttgaagataaacaagcattgcttgatttccttcaaagcattaaccactctcattatctcaactggaataagagcacttctgtttggaaaaaggtggataggagtgatctgcaacaatgaccaatcacaagtaatagctcttcatttgaccagaactggattgagtggtccaattcctcccaacactcttagccgtctcttggcactggaaactgtgagtcttgcatcaaatagcataact

SEQ ID NO: 36995 - DNA, 196 bp, Glycine max
  Clone ID: PAT_MRT3847_133408C.1
tgccaccttctcagatctacacactgaacagggcatcaaatccctcgatcaattcctttctgtgaaaacctatatatctcgggatcaattgacacaagatgatattagagtgtatgcaactgccgcgcgcaagccatcggacactttctctcctgctgccaagtggtacgatgctgtctcttcatcacttgctcct

SEQ ID NO: 36996 - DNA, 250 bp, Glycine max
  Clone ID: PAT_MRT3847_133409C.1
cgcgtccaatacagatgtgagaagaggagagaatgggaccacaaaggttgcaaatgaccaggtcaagccacaggtacctatctcagcgttaccaacacatgcatctgtctgtcgtcacacgagcgctaagttctcatcaattccaaggtcaggaacgaacccactgtctcggtggtacgagatactgaatctgaatgagtcaatagtcacgcggacgagaatgatgtgaccatgtatgacatcaacgcta

SEQ ID NO: 36997 - DNA, 925 bp, Glycine max
  Clone ID: PAT_MRT3847_13340C.1
aaagaacggtcccagagaactgttgagagagttcatcttctgaaagtcctagagacacgtaagtcagcattgcagaaaagcaaggcatggcatttgttcgtgctgttactgctggttttgaaattgactatatatcgcctttgatgtcatttgctgaatgctttggtgcatctcgcatgaaggatgcacgcacaaaattcaggaatctttggagaagaaaacatgaaactggataatggcttgaaattgaagctgctgaaacggtgtccaatcgctcagacttggagatggaagaaattaatgattctgagcagcttgatcaaattcttgttcatgcctagcaaaagtcacagcctatcctcattgattggttttgatggttgttttttgaatccaaaaaccaagtgaaaagaaagggcaaaatgatcatttttcctagatttcaggcatccattcgcccatgctagcaactagctcgtttgggctaatcaaatttcttcagacttaagcaaccaactcacttgggtgagttatagctcgcttgggagaatttatgccttcatcactaagtaacaaattttcttgggcgagctacagttcgcctggcgaatttgtctacacctcttgaatttttttctataaatagccatgcaaatgaagaagaaagggacatccaaaagcagaaagaaaatgtgagaagctaaggaagtgaagaagaaaatggaaaatgaagcccgggcgctacaaagttgtgaccatggatcgcatcctttgtcatttctcttgttagtcttgtgttctatgcaatgatcagttagtttttccaaaggattggatgcaatctttgtacccttatgtatctcttttgatattatatatatgtatgaatttttctactcattattggtgatttcattctgttcgt

SEQ ID NO: 36998 - DNA, 625 bp, Glycine max
  Clone ID: PAT_MRT3847_133410C.1
ggtactcttattggcatggaccaatatattgaagacatttcatttaatgaaatcctgaaatcatgtcacgatttgctaaaagaaaattacaatttagtcatttctcttttaaattaattataactaaattgtacatcatgcatccaacaaaatacttttctcgttctctatatagtctatattctataatatatgaaaacgcactgccgtcaacttgttatggtcaatcaacaaaagcatgctctcacacagaatcatggtcagtttgacaagaatcgaattttagaagttgagcccatttgcttgatcactttaccacagcttctgcagctttcttgcacatcattggatcctacaagctacaagtttacaactacccattattctcttgttacaatccttggttttcattgccccctgccgagagtggaaaggtagacttggtaccaaaagttcagggtataacaggaagttccaccttgtcaaaggaaaaaaaactgacccttccctctgtgaccaggcagattttcaaagggatgccaccacattgtttctcaagggcttcaatctctgctctagatgggggattttgaaccctagataagtacagtagaaaacttggatc

SEQ ID NO: 36999 - DNA, 217 bp, Glycine max
  Clone ID: PAT_MRT3847_133411C.1
tgtaaagaacaaggttgaatggaccctcaacaggcacactgatgtaaatatcctgtgccgggaaaatctaggggactttacctccaactttgcccaggggaagagcgggcaccttctcatcaaagggcttggtcaaaacggaaaatttcttatcgatcttggcggaaatattctccccccacaattcaatttgaggaaagacctggccggggaaagg

SEQ ID NO: 37000 - DNA, 456 bp, Glycine max
  Clone ID: PAT_MRT3847_133412C.1
tgttttttttttttttttttttgttttttttgacatctgttcactgtttacatacatgttttttttcttattttcattatttttgtttttttagaaaaaaaaaccagggggccgggaaaaaggctattacagaggcagggaaacaaaaggggaaaagggcccttgttccaaccggaacccaaaaaaaatgggtaagaccccggcccacaccaaaagcgggttaaaaaacgggggtaaaccggcaaaaaacaaaaggggggcccccgccacccggggggagccccaaaaaaactggcccaccgggaaaaaatactcaaacgccgccaaggggagggggcgacccccaaccccgggaacggttggcccaaagggggggccaaaccaggggggggggggcaccataaaaacacgtgaaaaacccaaagggggaaggggtcctttgggcccaaacaaaaa

SEQ ID NO: 37001 - DNA, 386 bp, Glycine max
  Clone ID: PAT_MRT3847_133413C.1
agaattacatgcctatatgtttaatcaggaatagcagaggaacttaaatacaggatttgtcaacaataaacatctttagtgcaaatagggcaaaaacttttctcaaaacaaatatagcaatcattctaatctatacaaaatcagtctcaggtgcatatatactctataggcatctggatgtcagccatggtcatgaaaggccaattcctaagtcataaatagaaaataatgggcttaggtttgtgtcacatttctttcttgatagttcatgttttcaggaaaatctgaaatgaaaaaaatttcaaatttaagattataaatactcatttctttatattggcttcctgtttagatattataactgggagggaactcgatattgactg

SEQ ID NO: 37002 - DNA, 294 bp, Glycine max
  Clone ID: PAT_MRT3847_133414C.1
tggttcctgtgagaatagacgtccgatcaagcagctatttttggacgtttcaaatttcatatgaatcctgatatttactgataagttgattaatggaagatttcaaatttcataatattcctaacattcaggataacaagattaaccacatttgttagtgaatatctttttggttttgattctccatgtaagccgtgattaatctctcttaaaatacttatttttaattcctcttacttctgttatgcttttgagttttcactcaacaaacaagtcactcggtaagcagtgatt

SEQ ID NO: 37003 - DNA, 153 bp, Glycine max
  Clone ID: PAT_MRT3847_133415C.1
tttgtctgatccgtggggattggccaccgtaattgcgatctacaagacaggcactttttcatcccgaaggaagcaaaatatcgaaatggtaatcgcatgaaccgaacacagagtgtggatattgaaaggcaacaggctcagacaaaaaaatat

SEQ ID NO: 37004 - DNA, 141 bp, Glycine max
  Clone ID: PAT_MRT3847_133416C.1
tttttcttacggcgaaaaccccatagtcagaaccgtgaaaggtttgcgcgctgcgcctgtaatagaccacgaaaggggcagaattgacaaaccagcggaaatggaggctgatatgacccaagttggctcacactatgaact

SEQ ID NO: 37005 - DNA, 442 bp, Glycine max
  Clone ID: PAT_MRT3847_133417C.1
cgatttttggatgttctgtgatgggaggatggtccatttgatgggttgcataccacgcatgccatgagccagatggcaccaatgatgaacagacggttgtggcgttgaggaactactgccgcgggaagaggacacacctggtgatgacttgttgttgaaggatggcaatgtgtaaaagagatgttgggggatgtggaatgaaggaatcactttcatggatcattggctgacagctgtttggaatagcgacagtagtgagatggtgattagatatagatgggagaaattactgggtcaggctaaagctccaagtctgttgatacaatccttgaaagataatgtttctttgtgtgtgaatggtgatgataacttaattagagttcatgaatatgacacgccttactttagtggatctaaattgaaatgctacatagctggtgat

SEQ ID NO: 37006 - DNA, 394 bp, Glycine max
  Clone ID: PAT_MRT3847_133418C.1
gcttgattatgtgcttggtgagcagatgatcagaaggggtagtcgtgaaaattcggcgtagtgcaagggccgcgaagtacggggagaagagttacggcgtatgccctccctcattgaaatcacgggaaaatgcctaagaagttctgctgctttcatgagaaggagtgcccggatgttgagccgaagtcggctggcgagcatgggtcctgtcgtaagagggagccacggacggcttagcatgtttcgagttgtacttgcaataatgttagaaattcaccgatttccgacgagaagaatttctgttgcactcctgagggcgaagtttcctcctgaagaacgccttgccatggatcttctgatgagatatacaataagtcggaccacgcgccggtct

SEQ ID NO: 37007 - DNA, 2004 bp, Glycine max
  Clone ID: PAT_MRT3847_133419C.1
aaatgaaatccctaggatactatataagttgccaaaatttctttagaaaacatatgtagctcttttccagctatgtatagatgtttgtatttgcattagaattattgtttccattacattctctatttcatgctacatggtttattatttttctaagggtttgtgtttggagatttggatgatctcgtagtcaaagaaggcttcatctgaactatatgttcttcattcactcccattttccttgcataacgacctgcttcaaagaaacttctaactgcatcatccatgtaatatttcccttgcttaacagtcatgtccttccctattgtacctgggaaactagtgaggatattatctcctttaatcaccgctgcgagttggatcaactcctgctgaaattcactgagcttggcatcttcattaggctctcccttcctaatcttttcaggagttggaagtttctccgggcaatcagtcctgggttctgtcctggtctgaacaatgccctcgaaggttcctgcccaagcatctctattggtcagaaatgaaggcaaattgaagagctttttcactgtagctggaatggatgagtgttcatattctgatgtaggagatggtgacccatttggcccatgaacaactgtacccttttcaatccaaggagagatagcaatagtgggaaccctcactcccaacctattaaacgtgaagttaaaaggctcggggcccacaatcccatcagggctcggaaccccacgcgcgggcgtgggcacgtggtcataaaaccctccatgctcatcgtacgtgatcaaaaacagggtttcgttccactgcgggctcgccctcagcgtctcgtacacctccttcacgaacacctgcccctcgtaaacatcatgcgatgggtggtcgtcgttcgcggggagcagcttagtgtccatgtaccgctgctccaccacagtgtagcttgggagcttcccttctttggcgtgttgcttgaacgacacgtcgtagatgtggaacttgagcacgtactttagttttctgaggttgcggtagaagagggtggccgggatgttctggtagtagatgccgaagtcgtggccggcgtcgtggaggctgtcgaagatggtttgttgcgggtagcccgccgtgagcttggccgccacgttgctcgtggcgccaccggaggtggcagagtgcacgaataggcggttgggctgggtggaggccggcacggatgcaaaccaccgatcaaacacggcaaactcagaaacgagtgtcttgtacacagccaccacgtcttcaccgaacccgttccatcacactctgggacatgtgggaggtattgtaccatagaataggccttgttgtacgaaccccttcgtgctggggcgtgtagtgcgaggaagcgtgcggaatgccccgatggagaaggaggcatttccattctcagaacacacaatttgaggagttagcaaggaaggggtgagtgagccgcttcgagtctgggtcggacacggacagcggattggactccgacccggtcacgccatcgatggccgggtttagtctcttcatccagcccagcatgtggtcgaaggagcgattttctggagacaggtgcttagagggttgtggtgttctttccccagcagcgatgtcaactcttgttcgtccgaaaacatgtcgctttggagcaagaaaggaggggacgcaggggaggagttgtttaggaaagctaatgaccgtagtcctcctctgcttgtcaaattcaccttcccctatccaattcggagcagtatagggtgtccaaaagggatttccggttggtgtggtcatgatggtggtaagccatcttggatgtgggacttttatggagagtgcggaatgccccgatggagaaggaggcatttccattctcagaacacacaatttgaggagttagaaaggaaggggtgagtgagtgaccactgagcccccttctgtcgtcttctcgcagccgta

SEQ ID NO: 37008 - DNA, 432 bp, Glycine max
  Clone ID: PAT_MRT3847_13341C.1
gcaccaatgcattggcaaggataaaagttctattcaagttcctgaaaaaacactcggacctaccaggggcaaagccgctgaaaatagaaaaaaccagccgaagcggctcgcgatataaacgcaagcggcgaagggaggaaacactaccaactaatgcgctcacgggaaaccattcacgacttaaccccctttcatcctatacacaccatttttctttcgagtcgcaatggctccgacatcaaaaaacctctccacatgtttgccctcggcgcacaagtaaactacgacgtagcaaagataaaactttcctcctttacacctggaaagaaaatataacttcacttttgggaataatatcaaaccattaactttttcaaacctaccctaggccgaatgaaaaaaaccccctcccctgccccctaagggcacccc

SEQ ID NO: 37009 - DNA, 275 bp, Glycine max
  unsure (1)..(275): unsure at all n locations
  Clone ID: PAT_MRT3847_133420C.1
aaaataaaaaagggcgcactaaaaaatccattatttantacatatagtttatccaaatacagtgaactttttaaaacccacatacattgtttctttcagcattcatgcattaccaaaacacactgttattctcacagaacttgcaagttggaataatccaagtttcaactagttcataacattggcacatattatcatctatatatcatacaatagtacttaaccccaaatacaaagttattataataattaaaccacaaacaatttatccactt

SEQ ID NO: 37010 - DNA, 445 bp, Glycine max
  Clone ID: PAT_MRT3847_133421C.1
gttactgtgttgaattactattgaagtaaaaaatagatggagcaaattttcaaaatgaaaaatgagagtaaaacactgaagaaaactataaattgattgtgcataaacccaaaagaccacaggtaagttatcttcaaaaaagaacagaagagggacataagcattgctgcaagtgtggagcagtgaggtgacccaatgcaaaagactcccacctagtggtgttttgagaggataaatgtacacattcttacctccacaagtgtagaagttgtttctaggatttgagcctgtgacctctaagccaataagcaacaaccctaccattgcaagaaaggcttgcccttttactggtgcaagtatgctgatgtgacaataaatttacaatcaataaactgtttatctaaatccaaataaagggtaataattaaatattcatcttcaaaat

SEQ ID NO: 37011 - DNA, 426 bp, Glycine max
  Clone ID: PAT_MRT3847_133422C.1
ttcatgattacagtcagtgaagtgtgcatattacactctgcagatggtgacattcatcttcaattcaggctctctctctcctttccaaatggccagcgttgagattgtgctagtgttgattatgtgatgtttcacttgtgtgtctctcccgtcaagttatttgcttctcatgtttacaaatccagctttcttaagcttggcacgagactttgttagatgaaattagaaatctcccaggttgcacatcatacaccaacaacagttccagaacatgaaacatccgatgtaatcaagacacaggaaacaaccccgggaccagtaccagccactgaggctcctgcaacagatcaggcagcagctgaggttcctgctcatgaagaacaacaagcaactgaggttcctgccgcagaatcaaccaccgaagca

SEQ ID NO: 37012 - DNA, 468 bp, Glycine max
  Clone ID: PAT_MRT3847_133423C.1
acaacctaaaactattgacccaccaaagcctaaagtggccgttaagcctagcagtaaaagtattcatgttgagactcctgcagtacatatcaacagatcagctaacccaactcctaaaaagttgtcccggaaggctgacgcttcactgaatgattttttgcagtcattgggtctcgaaaagtatctcttaagttttcaggctgaagaagttgatatgactgctctcaatcatatgactgatgaggatctcaaggccatgggtataccaatgggaccaagaaagaagatacttttagccttagagtcaaaaggatgacattttggtcttgtatcactgtaccctttttataacttatataacacattagtaggcttatgttttaattgtttaattgtttatactttggacttggtcaagctttgcctgtaatttttaaaaaatccttttggtgcttttattaccatttt

SEQ ID NO: 37013 - DNA, 244 bp, Glycine max
  Clone ID: PAT_MRT3847_133424C.1
cggtcgcgccggctagcaggggccctcatcaaggggtatcttcaacacgactgggtgttacatcatgggacggatcaagcacgggctcgctactggcttgtgcacgacgactgaggcacgagacataaatgaaatgggtccatacaaaacatagaggagcaaagaacatcggctttcactggttcatcactgccggcatcatcgtggccaacgtgaagaactatcagactgctaaaaacaaagg

SEQ ID NO: 37014 - DNA, 752 bp, Glycine max
  unsure (1)..(752): unsure at all n locations
  Clone ID: PAT_MRT3847_133425C.1
ctcttacagtgtgtagtagagagcgctgctaatgcagctattatatacaacaaagaatatatatatttgatggagggaaaactgaaagattcattttcaaaatgtttgaaataagatgtacaattatatttgatggaagttccatatttttgtttattgagcttagttgtatttttattctttctgctatattttattttattggatcaaaagatgaccttttacattatattttaaaatatacttaggagattggttagcagattctcgtatttgcctatgtttaagttgtcggtgccattgctttttattaaattgattggctatttgtattctactctatagacaggagtgcatggaagaatatattcttcaggcgatggaaggccattaccaggctctataactgtcagtggaataaattacacagttagagctggaaatacttttggtgactatcatcgcatactcgccccaagagataaatatgaaggtattctaatacaattcaaattattttgttatagtatggattaaagcctaacttgaagattttctgaattaattaaagaataagaatggaattctcatgatttggtgaaatcttggtgagtaggcgggttcttaagttgtctgaggacaagttaaataataaaattcctggatgggatatatagatttcataacaacccagatgacaatatcctctntctattattatttattggtattaaattacacaattttcagtt

SEQ ID NO: 37015 - DNA, 202 bp, Glycine max
  Clone ID: PAT_MRT3847_133426C.1
ccgccggttcccgtcgacccacctcccacctccccacctcgaaaagaaatgccttcactattctttgagcgaaagagaatactggtgtatttttactctgtttactatacctaccttaccacctgtgggtcatcgtggtatttttaaaggtcccattttggtgcgtcaggaacggggatgattgcgacggaaccctgcctta

SEQ ID NO: 37016 - DNA, 344 bp, Glycine max
  Clone ID: PAT_MRT3847_133427C.1
ggaagggggctaaaaaaggtccaaactttgtaaacaacccaagccttgggggaaccccaggacctaggggggccccccaccgggcctacccaacaaacaaatagaggggggaaaaattggaaggaacttgaacttgccctctttatggcacaattttgaaagagggccccaaaacggaaacctcaagttcccccctttgggataaaaagcccccttttaaccatgggggggcgggggctgcccaaaaaaaaccaagagaatttccttggaccccacttttaaacggggggccccgggtttgtgcgccccccgatgttttcaccagcaattttactaaccccggg

SEQ ID NO: 37017 - DNA, 229 bp, Glycine max
  Clone ID: PAT_MRT3847_133428C.1
aaccattgccgatatccatagcatgacctacttgaaagtgaaggagacatgaacagtaaactagtgtcccatcgtcgatggtggattggaatcatttgctcttgacctagggaaatccaatgccaagatgttctgccttgagcccacttcatttacagtgtatgcagagggtgtggccatgaacgcttcccctgagttccaaatcacacagctcatgacacgtttgact

SEQ ID NO: 37018 - DNA, 505 bp, Glycine max
  Clone ID: PAT_MRT3847_133429C.1
gggcccaaagggggtaaaaaagaatgtaccccctttttttttttccttgctaacccaggggggggggaaaccaccaccaagacgggggggggggggttccccccaaacttgtcattaaaaaggtaaaaaaggggttcccggaaggtttttcccccccaactttacaaaaaattggggctttcccaaccttagggaagggaaacatggttgggaaaaaaattaggggtagaactgtggggcccgccattttttggggaaaaccagggagaaaccccctggggcgttaaatttttcctggggttgggggggaagctaaagccaagatttcccccggcccctgtgattctgaggggggagaccccccccccttggggggcccttcccccccaaaaaccctttcaataggggggtttgggggcgggggggggttaaacggcccccccgagtcataagaagggtcttaaaagagctggggaaaaaaccagggggcgggctttttggggaa

SEQ ID NO: 37019 - DNA, 1671 bp, Glycine max
  Clone ID: PAT_MRT3847_13342C.1
actagggcacccctttgaccacgcctcctaaggcaatcaagcattttcaagataggtccaagcatatgcctttaaccaagtctccaaaacaagcacccccaagttctggagaaaaatctgttcatgtagaagttagtccagtaagtgaaccagatatagttagccagccaacacttggatgcaagccccctggtgatgacaaattcacagtgagggagcgactgtcaccggtggctgaaactgttcctgtggtcaccactactaaatcatcaagccagaaagtcttgcaagagaaaggaactttgttgcagaatccagcacaagaaaggcctgacactggccatcttcctccagcctttgatgatgttatccatgtcatacgccacagtagttaccgcgttggaagtgagcaaccagttaaggaatctgtggagatgggagttcaaaatgtagatgttggtaagttcatcaatgttgtgagggatgatttagaaatgaggaacataacctctcctttgacccccctcaaatcttcaagttgctctgatgctgcaagcttgaaatcagacatttctgatcagccgcaaacgaagaactcgaacactgctcaagtcctttaatttcaagtctcatctttgcctcgagtgataaacctcaaatttctgtttccttctagttggaaacaggatgtgcaaaacactgattttctagtttctaaatctgattcctccgagtatagcaaacataacacaacttaagcgtcagtagagacatcaatgttgggaatgatggttgtgaaatgagcaaggcaaccactcgtttgaccacacacaaatcttcaacttgctctgatgctgcaaccttgaaatcagacatttctgatcggcggcaaatgaagaacttgaacactcctccaatccttaaatcttcaagtttctctgatgcttcgagcatgaaatcaagcatttctgatcatcctggtcttaaggagcaagatgtgagtaacccttctcctatagtttcagaacctgattctgctgagctcagtaaatgcaacactcccatgaatgaagagaaaccaccggcggcaaaggaaacattggatgtgaaatctttcaggcagagagcagaggcacttgaagaactcttggagttgtctgcagagttgctgcagcaaaatagattggaggaacttcaagttgttctgaagccctttgggaaagacaaggtctccccaagggagacagccatttggttagccaagagtttcaaaggaatgatgtcttaggaaagtgggggaccctcttcatgatgagcttcctctcttcttttgcggctcgtcccgctggtatttgatatatttgaaaatttgctcttaaatagttattcaagtactacttgaattcataagagaacataatggctttgtcccttctttcattattgtaattctttcaggtatttcaatttttatgtgacaagtttcccttgtatttgataaatttgaaaatttgcttttaaatagttattcaagtactacttgaattcataagagaacataatggctttgtcccttctttcattattgtaatttctttcagggcttttatgctgttgtaaatagtgcccatccaaaataataacatccaattccgatcaattgtatgggcc

SEQ ID NO: 37020 - DNA, 251 bp, Glycine max
  Clone ID: PAT_MRT3847_133430C.1
attcccatggctcaaaccacagaaagttcaacactttgttcagtgagttagatgcacaatatggaagcctgttctgtgacatggaagtgaagtggctgagtcgtggtatggtgctaaagtagttttttgaactgttggacgaacttgactttttcatgtcctctaaaggacaatctgtgcctcagctcactagcaaaattgggtcaaagacttagcccttttgattaacttacaacacttctaaatacttg

SEQ ID NO: 37021 - DNA, 2244 bp, Glycine max
  Clone ID: PAT_MRT3847_133431C.1
cggccgctctatttggagaattcctactgccgtggtgctttctccactgcctaaaccgactctctctctctgcctctgcaagcttgttacttggctttgtttgattgattgccccaatggccgcgtgtggctatatatctgctgccaacttcaatcatcttgttggcgccagaaacttatccaaattcagttcttcggatgccacaatttcgttatcatttggcgggagcgattcaatgggtcttagtttgcgacccgctccaattcgtgctcctaagaggaaccatttctctcccttgcgtgtcgtttgcgtcgattatcctcgaccggagctcgaaaacactgttaatttcgtcgaagctgcttacttgtcttccaccttccgtgcttctccgcgtccactaaaacccttgaacatcgttattgctggcgcaggattggctggtttatcaactgcaaaatatttggctgatgctgggcataaacctatattgctggaagcaagagacgttctaggtggaaaggttgctgcatggaaagacaaggatggagactggtatgagacaggtctacacatcttctttggggcttaccctaatgtacagaacttatttggagaacttggcattaatgatcggttacaatggaaggagcattctatgatttttgctatgccaaataagcctggagagtttagtcgatttgattttcccgatgtccttcccgccccattaaatggaatatgggcaatattgaggaacaatgagatgctgacctggccagagaaagtcaaatttgcaattgggcttctaccagctatgcttggtggacagccatatgttgaggctcaagatggtctttcagttcaagaatggatgaaaaagcagggcgtacctgagcgagtaactgatgaggtgttcatagcaatgtcgaaggcactaaacttcatcaatcctgatgaactttcaatgcaatgtatattgattgctttaaaccgatttcttcaggagaaacatggttctaagatggcctttttggatggcaatccccctgaaagactttgtatgccgatagttgatcatattcagtccttgggtggtgaagttcatctaaattcgcgcattcaaaaaattgagctaaatgatgatggaacggtgaagagcttcttactaaataatgggaaagtgatggaaggagatgcttatgtgtttgcaacacctgtggatattctgaagcttcttctaccagacaactggaaagggattccgtatttccagagactggataaattagttggagtcccagtcataaatgttcacatatggtttgacagaaaactgaagaacacatatgatcaccttctctttagcagaagtccccttctgagtgtatatgctgacatgtcagtaacttgcaaggaatattatagcccaaaccagtcaatgttagagttggtttttgcaccagccgaagaatggatttcacgtagtgatgatgatattattcaagccacgatgactgagcttgccaaactcttccctaatgaaatttctgcagaccaaagcaaagcaaagattctcaagtaccatgttgttaaaacaccaaggtcagtttacaaaactgttccaaattgtgaaccttgtcgtcccttacaaagatctcctttagaaggtttctatttagctggagattacacaaaacaaaaatatttagcttcaatggaaggcgctgttctttctgggaagctttgtgcacaggctattgtacaggattctgagctactagctactcggggccagaaaagaatggctaaagcaagtgttgtgtaacaaaaacaggaattgaaaatgagtcatggtagaatacaggagcatcaattcaagattggtattctttatgtggtcaggactcaggagaccttctttattagttcatacgaataaagaaaggctcagcgaaatgtcaactgtgtgcaataagctatacggaacaaatgacatgtgtcgatacttgaaaattcagcgcattgcgacatgtgtcaacttaaagtcagcccattgttttgttatcctccaattttctggatcaatgtttgtattggaaagaaatatgtcattattcaaacttgtttatatccactttttttatttatcaacatttgtcacaacctttcgttgagtaaaaaaaaaaaaaaaaagaattcccagaaaggcacattacatatatatatatgcattggatatt

SEQ ID NO: 37022 - DNA, 127 bp, Glycine max
  Clone ID: PAT_MRT3847_133432C.1
ttccggtcgggcgcggggtctttagcagaggcgagagaaagagaaagagaactcggccttcttttggcattaacagtgtcaatcttggttagctaggacaccctctcctgtccagagcttcattcct

SEQ ID NO: 37023 - DNA, 1668 bp, Glycine max
  Clone ID: PAT_MRT3847_133433C.1
aaaaagggtccctctttgttcactctctttgtgttttctttttctcagtttataactttttatccatcgacatcaaaacaaggactcttgggaaaacgcagagttatggacactgtcctttgaaactccaaacaaataaaacagctcatagtagtattatagtaaaagatagccttcaaagttcgctaacccatttcttcttttcgcataactcaattggaaattgcttcttccttattagttttgctttcatctgcttgaaactttctcggatttctgaaggatctttttgtgtgacaaaaggctggattggaaaaaagggaaagtgaacccttttatgagtagcataagggcaaggctaagccagccgatgccgttgaatatatttccggacatggaaggattgccccggattatattgactgaggcaactggttcatcagcagaggtgcttctatatgggggtcaggttatttcttggaagaatcatcgaaaggaagaacttctttttatgagcagtaaggctaacaagaaacagcataaagcaatcagaggaggaatatcagcttgcctagcacggtttggtgatctcagttcacttgaacaacatggatttgcaagaaacaggatgtggtcattggatagggacccttcacctcttcctcccttagacaatcagtcatctgtggatctaatattgaagtcaacagaagttgacttaaagacaccctgtagttttgagttccggcttcgcatctctctcaatgctggcaagctaattttgattccacgagtcagaaacactgctaacaaagcgttttctttttcctttacactatgcaactatttatctgtatcagatatcagtgaagtgcgtattgagggattggagacactggattactttgacaatctgttgaacagatcaaggttcacagagcaggcagatgcactcacttttgatggagagatggacagagtgtacttgcatagcccaactaaaattgccatcatagaccatgagaaaaaaagaacttttgtactccagaagaaaggaatgccagatgcagtggtatggaatccctggggtaagaaggccaaggctatccctgatttgggagatgatgattacaagatcatgatgtgtgtgaattctgcagctattgatacccctattatcttgaagccctctgaagagtggatgggatatcaggaactctctacggtttcatcaagctattgcagtggacaattggatcctcctaaggttctttatggttttcactaaacacgatgatgcagccaatggagatttatgtggtcattagtatacatggacttcactgtctaattagtaggcttacattaccctaaacacagaagtgcactgtgcatgaatgtgatgctgatcataattcataacataacaaaggcctcagcaatatatatggacatctatttttgcaacttaacaataattgcttggtgtcatgccaattcttacaatattatccatcaggttgagagtcaagttgcttcgttatttttgcaatgtgtctgtgaagttccaatgatattcttctacatagaaacaagattttgttatgaacatatctttattgagcaatggctcagagtgcagtatttgagctagctagtattttatct

SEQ ID NO: 37024 - DNA, 528 bp, Glycine max
  Clone ID: PAT_MRT3847_133434C.1
ggaagaaaggcagagttattgccattgcctctgcctcttgcaacaccaaactgatacacacttaataatattatagtaaaaattagccaccaaagtacactaaccccttttttcatacaactcaatagctggattggagcaaggtgaaagtaaaatcatttgcaaccaatgccgttgaacatatttcaggacaaagatggattgccacggattatattgactgagccaaagggttcatcagctgaggttcttctttatggagggcagattatttcttggaagaatcatcgaaaggaagaacttctttttatgagcagtaaggctaacaagaaacagcataaagcaatcagaggaggaatatcagcttgcctagcacggtttggtgatctcagttcacttgaacaacatggatttgcaagaaacaggatgtggtcattggatagggacccttcacctgttgctgccttagacaatcagtcatctgtggatctaatatgaagtcaacagaaggtgacttaaagacaccct

SEQ ID NO: 37025 - DNA, 375 bp, Glycine max
  Clone ID: PAT_MRT3847_133435C.1
ggggggggtctaaaaaggcttggccctaccgttccaaacaccagagagacactgactgagccccaaaaggaagggggccataaaatgataaacggaggaacccgatcgacagggacccaaacggcaaagcagaaaaccataaacgaataaggggggactggaaaaccagaacacaggacaccgggccagctttagcaacaacgctagcaccaccgaaagttaagaagccatcaaagcaaggaagctgaagactccaaacctgccaatggccaattgggaaaacgatgtagcgataaaagccagaggggccacaaaacggcccatgagagaaggaacccacccaacgatcaagggggggaagaggcgaagcatcaa

SEQ ID NO: 37026 - DNA, 720 bp, Glycine max
  unsure (1)..(720): unsure at all n locations
  Clone ID: PAT_MRT3847_133436C.1
ggagaagaaaagacaatgcaataaatagttgcttatattttttcatagtatcaccatgattttgcgagatataattgattctaatatgttatctaaactcactaatcatgctgatgttggaactgtctctttacttgcaacatacatgtccaaaaattctcaaaagtaaacccaaaaaacctcacaaactccaccaacttttaggggctaatgaaactagcctcagaagcataactaggaggcaactgaagcaaaacactggttggtgaaaaagtggagctggggggggatgatcttaatgcctctgcaaggggtcctcccattgaggccgcgtggcacgcatcctctccatggccaggggacaatttcaacgacacatccgaggaagggattcctggggttgacataaaaagacatgttcctgagttgttgttctggcaaccattgctttcaccattgtcaggctcttgcagtgtccttggccaatcatcaaagaaatgcctcaagacatggccatcagatttggctgaatttccatccccatccacatgatcatggttttcnnngaagctcttnnnnncactcttggccccagaggaactttcactgagnngaaggagattaaatgaagaagagggtgaagaannaacggaggctatagcannangagatccatcacgttgttccacaggcnnncttgaacggtttcgnnncgatgct

SEQ ID NO: 37027 - DNA, 507 bp, Glycine max
  Clone ID: PAT_MRT3847_133437C.1
gtctaaagtgggcccctggttgtaggcaggactcccctcaaatagactggatagtggatattgtgccaccaagcagagttccttttgtaatatttgcttaactctgccagccatccatccattacatccttatctcctttatccttaccatagtaccattctttttctctttctgtcacatgttgactcactcgtggtcccactagagttaccaaggaatacacacaagaaattgacctgaagaactggcgtcacagttctctcctttgaggcactatctatccaaaagaaaatctacttgactgcacaattctttctgctcagagtattgttgaatgtctaaaacataaatactagatgtcttatatctagccactttatgtttgcatatccaagatgctaaccatgtaacatgtctatactgaatgcttcctgtctgtcgtcttctttctcaagtgtattttgttactatgtcttttaattgtaaaagtatacaactctattctc

SEQ ID NO: 37028 - DNA, 610 bp, Glycine max
  unsure (1)..(610): unsure at all n locations
  Clone ID: PAT_MRT3847_133438C.1
cggggaaaggtgtgggtggtgcgacgaggagaacnagcggttatcggcgaagacggactgcacggagaggttgcgggagaggaaggaggggtgacgacggaggagaaggtggtgnaggggtgggtggggagggaagggggacgccacgtggcggagatgggatcgaaggtgtggaactggatgacggcggaagagtgggagtgggagagaatggcgtagagagaaaaaaagggagggaaagaaggggagtatatgagacggcgccaagagtgggagattgagaataacaaacaagggttgatggatgagagacataattgggctatgtggtcagggagacctgggatcaaaggttgttcttcttgttgatgaatatgttgttcttgtttttggcgtttggttgtggaagaagaagaagaagaagacgactcaggcatggctatggccatgggatgggactgtggtgtgtgtggattggatgcttttgttgggtgtttgtttttatgaaggggaaaggaaaggatagaaagtggggttagtttggttggtgtcgtgaggaagacagttactgtaatgttggattttgaaattaaaaactaaactcgagccc

SEQ ID NO: 37029 - DNA, 149 bp, Glycine max
  Clone ID: PAT_MRT3847_133439C.1
aatgaatcgaaaaaaactcatacctacgtattccagagcatctataaattagtgttatgggtagaatctagttacacgtgcatgcgatgtaatggattttcttttctggcacgtctgtgcagacaatcggctgacttttaacaacattc

SEQ ID NO: 37030 - DNA, 1367 bp, Glycine max
  Clone ID: PAT_MRT3847_13343C.1
ccacgcgtccgaacgaaatgcaggtttcttatcaccctttggatattcagctgccacaattgcagcagcagttgatgctgtgtgctcaatggagtggtattggcttctggctttgaaaaatcagaaaaataatcacggaatacactcaacacggatatggaaatggaaaggatttcttatccagttgctggtgaagatggtcctgctattcttcttgtgcatggttttggtgccttttgggagcattaccgtgacaacatacatggtttagctgaatctggaaatcgagtttgggccattactattttaggatttggcaaatcagaaaagccaaatgttgtatatactgaactcttgtgggctgaactattgagagattttattgttgacattgtgggtgaaccagttcaccttgttggcaactcaattggcggttatcttgttgctattgttgctcgtgtttggagtgatttgatcaaatccattgtcttgatcaacagtgcaggcaatgtcatcccaagatattcattcataccattgtctacaattcaggatagacaaacttcaggggcttcctggttgggttctcgcattcttgtattctacttgaggctaagaactcaagaattacttaagaaatgttatccaactagggttgaaagagcagatgattttctcataagtgagatgctaagagcatcatatgatcctggcgtgcttgtggtgttggaaagcatcttcagttttaatctttccatacctcttaactttcttcttgaagatgtcaaggaaaaggtcctaattatacaggggatgaaagatccaatttcagactccaattcgaaggtggccatgctaaaagaacattgtgatggagttatgattaaggagttagatgctggtcattgtccacacgatgaggtgccagaacgagtgaatactatcatttgtgagtggatacttggtgtggaaagtaacaacattttggcagagtgtgcagtgtaaattttattggtatgtagcaactgccaacatggtaattgtccagcgcatattaatacaccagtactacgctttgttggcagttaattggtaactggattcagcacaaagttaatccaacagctgacaagactgcaaagaagacatgtacatgttgcgctgtaaatttgtagagttagcattcctgcattttgttatgtaatcctcccatttatttatttatttttggttctgttccctttctgtgttattagtatgttgttataatgggtgtgaatatccagactaaccatgcagtgtaagtcttcgcacacaaagcctagacacttaaacctatcccaaattttatacttttatccgattgc

SEQ ID NO: 37031 - DNA, 334 bp, Glycine max
  Clone ID: PAT_MRT3847_133440C.1
agagggtgacgagttggcgaattgcttgtgcgaagcagaattacctgcaaatcctgatacagtgggaatcgtgaatttcattcgagcacagtttgatgtaaagagacgggttccatgagatgggaattcataaacacgttttggatttggggaagagaatagtccttcacattaggcagatgcctgctgtgagaagtggtcatgccgctgtttctgaatataaatgctgcgaatggaagaaaatgcaaccatcaactgtatttactgccgtaagaagttatgttcctgctcctaccatagcacctgtgcaagtaactacctttaccaaacctct

SEQ ID NO: 37032 - DNA, 591 bp, Glycine max
  Clone ID: PAT_MRT3847_133441C.1
aaaaaaaaaaatggtttaaaatttacatggggaaaaaaagataagcacctaaaagacaaaaaatggggggggcccaaggacccaacactttagcgccaaaaaacggccaggggggggaatttatgggggggaacaacaaaatttgggaatagaaaacaaaaaaaaacccattttaaatttacacactaatttttaatttaaaaagttaaaaggcgattttctttaaaaaaataaaaataaatatatatatataaaaaaataaatagaaaaaagaggaaaaaaaaaagtgggggccaaaaaaaattcaaattcgggggtgcacccccaataaacaaaaccggggggccgccccccggccaaaaccccccaccggcggggaaagggaaatggccccctttggggccccgggggggggggggtcgggggccgcagcaaaaggggcgcacgagggagagccctgaaacgccgcaaacggaaagcggggaaattcaaaaaggcccccaaaaaactcttcaagcccaaaaaaaaacggcgccccaaaaaaggcaagagacccgagggcgggggcccccccccccccggggggggccc

SEQ ID NO: 37033 - DNA, 290 bp, Glycine max
  Clone ID: PAT_MRT3847_133442C.1
cataaataaagcttaaaaatgatctctcttataagggtagcgcgtgcggaatactacctaaacgtacctagcctgctcatacccttgctacgactaccgaactggccgtgcctagctacctcatgcatctcacctttcagagccgctatgatccggcttaatatgcccctcagccgaactttgaccacctacgacgccaaaacttactctcctccgcaggatccgtcgctgtgttccacggaatatacgttcttatcctcccatttcctccaaacttccaactccaacta

SEQ ID NO: 37034 - DNA, 148 bp, Glycine max
  Clone ID: PAT_MRT3847_133443C.1
ttcttgatcgagaatatcactccccaccagggcggttaatcgcaggaatggaggtcgcaacaaacacaaacgtgaccacgtaaagttcattctatgctcccacattcgacaatgctttcctaaagacaatgctatcaacaagtttctc

SEQ ID NO: 37035 - DNA, 165 bp, Glycine max
  Clone ID: PAT_MRT3847_133444C.1
gatagaagttgtgtaatgaagggcctctttcattataattccagttaatatatgaatgcaactgagatgaaaagtaacactgcagattctgagccggtatagtcgcattcattcttaactggcaatataatgaacgaggctctgtatgtctcaactagcatagaa

SEQ ID NO: 37036 - DNA, 429 bp, Glycine max
  Clone ID: PAT_MRT3847_133445C.1
aatcatttttaatagctggagcccaatgatgccaacgagtactgttaatgattcaatgcaatacagtgttgcatatttactttttcactaacctacagggtatgatctttacaagcaccaaagagggaacagggcttcaaaggacgatcatttctgcttgatgtagctggaccaacagaaaccacaggacgtgatctatgagtgcctaggaagcatgtggaagataacattagttgtgttgatacagctggaggaggactttgaagcctcaaaaagacccttcatttgggtcattagggaagggaatcaattgatggaattggacaagtggattaaggaagaggggtttgaggtaaggacctaatatcgaatccttgagattatgcctgagctcctcagtactgattcttttaacacttctattggagg

SEQ ID NO: 37037 - DNA, 344 bp, Glycine max
  Clone ID: PAT_MRT3847_133446C.1
ggttaatattaactggttgccagagtgggtaacattgataaaatgctttttgtttttctgtttgtttttaaaagccccaaaacccgttgtgcttaaaaaaaatggatggggggggtttcccaacccccacttctttaacctacatgcgtgagggggttttgtcccccctaattcaaaacccaattctggtgccaaatggttaagaaattgggtgggaccattaaaatgtctcacaaaaacagccttatcaatactcatgcacccggggcaagaaaccaactttttttgtgccctttaaaaacgccctgccctgtttgccccaaccgggcggttgattttttttt

SEQ ID NO: 37038 - DNA, 369 bp, Glycine max
  Clone ID: PAT_MRT3847_133447C.1
gggcggaattaccggggcgaccacgcgtgcgctgagaccctgggacatctgcaaccctcagcataggtgaggcttgctgggggttgcacaaaaagctggcccagaggaagcactcaacttgtgggaactggctgatggcttatggaaaatgctgaagggggctgggaaccttggatgagcggtggggtgcaggatggatgaacattgggacaaagggtggggaagacctggagagagaagatgacgcgggatgaaatggaggaggtgggggagaaggatgctgcagctgagggagatgagatgacgctgagaaactggggagcttttcagagaggattatctcgcggaggtggggggggggatatgatg

SEQ ID NO: 37039 - DNA, 440 bp, Glycine max
  Clone ID: PAT_MRT3847_133448C.1
gggagaaagctttccaagggaaaaaaccacctaatcatcccaaaaaccccagtttatttaggggtacaacaaaaatgtcccaactcgaaaacaagtccaaaaaaatactaatagttaaacaaaccccttttaacgggaactggtaactcactaaccctaccaggaagaagggggggaacacataccccaagaaatacaggaaccgaaaccaacacaaaaatagctggccgaaagggaaaaaaacccctggccaaaaattgacgcccggattttttagggaacttttccaaacccaataaaaaaacccctttaaaaagggggattctttccattttctcaataaaagggggactttttacttttagaactccccactttttatttggttttgaagggaaaccctgggtggtaaatgcaaccgatagcttgttattttggga

SEQ ID NO: 37040 - DNA, 380 bp, Glycine max
  Clone ID: PAT_MRT3847_133449C.1
aaaggatccacattcccaggaaaattgcgcacagatgttacagaatgactctattcttgggagaagcagaggcctaaccaccattttaatccttagatataaccacattactcccaggcgacagccaatccttctgctgcccctccaagggcaataaaacttctcgccgattctgtaaaccaaaggtgcttaaagcctgaatttcacctttttgcttacccttgaccactaaggccaattctctccacccaaccagggctctttttgacaaaatcctccttaagcaagcccttgccagactaataatcctgctcggtcatatgcaaccaacactgctcatgtttatggacttggcccaaaaaactaggcccaacccaagc

SEQ ID NO: 37041 - DNA, 213 bp, Glycine max
  Clone ID: PAT_MRT3847_13344C.1
accgaatgactttattgaatgagtaatacgggcaaaaattcctccatgtgtacatgatcaggcctaattataaccaaatacaatattattcaatgacaataacacagcacaacagtcaccgatttgtccttaggaccacggactaaaggaactctgactatcaccacgttcagcaccagccaactatggacactctacacctgattgcagctc

SEQ ID NO: 37042 - DNA, 120 bp, Glycine max
  Clone ID: PAT_MRT3847_133450C.1
cagaagggggcacacgggggtttgttgatcgagatagctggaaacagagtgatgaaaaagaaggttctcgttttcttcgctgctacaatctaggtagcatggcaaatgccactgacattc

SEQ ID NO: 37043 - DNA, 191 bp, Glycine max
  Clone ID: PAT_MRT3847_133451C.1
acctagtgccagcccaagacttgatggtggaagaactaacctacggatcacagaccgtgaatgattcaataattacaccctctttttgttgctgatgtgcatcctcatgccaatgatgatcatgtgtagctctttctaagaccctttaaccacatagagcatgggtggattacagcaggccttacatgggg

SEQ ID NO: 37044 - DNA, 411 bp, Glycine max
  Clone ID: PAT_MRT3847_133452C.1
tgttcgttttcgcgtacgaaaacacttggacgagggtgcaactgtttgctaggacgatcctctctggagacaacaggctgactgagaaaacaattctttactttgatgagattatcgacatgctcggttggttattaaacatttttgaacttactttaagaacttacccacgtacaacaattggggcgaccaacgtcccacgcaaattgtagacccttattctcttccatgatcgctgaaattaaattcgccgtcggccccgccaccctcccggaaaacgttcttctccgcgcccaattcgagctctactccgggtacagaactgaaatatgctttttggagatgagccaccgcggcagacagcttttttacatatttcaaatacgtcgtatcggatttccaagccctgct

SEQ ID NO: 37045 - DNA, 226 bp, Glycine max
  Clone ID: PAT_MRT3847_133453C.1
ctgtgaaaaagacccatgaaatacactggatcggtagccaaataataacatgcaccagtttaagtaccccaaaaaattcatttagaagccgggtgatctggcacaatacaaccaatgaacgttaaaagggctgaagctaaaaaagctttattaagtaaccatagacctaattatacaaacaaacaccacataaggcgacttgaactttcacaccaaagctaaatcc

SEQ ID NO: 37046 - DNA, 795 bp, Glycine max
  unsure (1)..(795): unsure at all n locations
  Clone ID: PAT_MRT3847_133454C.1
gcgggaaggagttcgtaattcggttagtctgctctggtgaggaaagtgccgtctatcgcgcagcttccatccctccgtccgagcagcctctcggagtccaacccttcacatctgacagtcgtctctgtcccttcttcgcctcggagctgctaactggtctcgaacctctcagcacttcagcttctagcggcgatgcatgtgatcaagcgagatggccgccaagagcgagttatgtttgacaaaattacatcacgaatccagaaactctgttatggactcaacatggactttgttgatcctgctcagatcaccatgaaagtaatccaaggcctatatagtggggtcaccacagtggaactggacaccctggctgctgagacagccgcgaccttgaccacgaagcaccctgactatgccatcctggcagcaaggatagccgtctctaacttgcacaaagaaacaaagaaagtgttcagtgatgtgatggaggatctctacaactacataaatccgcacaacggcagacactctcccatggtggccagctcaacactcgacattgttatggccaataaggatcgcctgaattctgccattatctatgaccgagatttctcttataactactttggctntaagacactggaacggtcatatttgttgaagatcaatggtaaagtggctgaaagacacagcatatgttgatgagggtttctgtggggattcacaagaagatattgatgctgcaattgaaacctacaacctactttctgagaagtggntcactcatgccta

SEQ ID NO: 37047 - DNA, 856 bp, Glycine max
  Clone ID: PAT_MRT3847_133455C.1
ccattccccacgcgtcggggcgattcagatcttagggtttcaatttttttttctgtggagccccattggccatagccgccagccagagaagagtagaagccttcgatcctaggttttctttccccccctttctcccaaatcggacctttttcgcttctcgattcgcttccgtagccgggcgatttgaggacccagaaaagaacgaaccgaacgttttatattttttcggataatcaatcgaagatgtctcgttgcttccctttcccccctcctgggtatagggcacgtggcgacgccttgatcgaatcgattaagctccgagaggagatggagaaagcagagaaggaccggaaggagaagagggagaagaagagggagaagaaagagaagaaaatggaaaagaaagagaagaaaaaggagaagaaggaaaagaaagagagaaggaaagaggagaaagaaattaaacttaaagaaggaacagcaacaacctctcatggcactgatgatggcaaaaagttcaagctcatcagcaaattgaaggaaaccaaagcagatgggaagttgcaaaagggtgaagactgtgagaatgaacaacttgagaggagtgggattacagaggaatttgaccaacctgttacttctgtggagccttgctgtttgtctgacagtactcaaagcagcaagagaaaaaggagctccccacaattaactcatgatcatggacctgctattaaaattcgacttcctttgaggaagcatagagaaccttgagaaacgaaatccaaatctaaattacaattggggtcttcttctggaagtgtgggggcaattgcagattccttcactaaaactaccc

SEQ ID NO: 37048 - DNA, 288 bp, Glycine max
  Clone ID: PAT_MRT3847_133456C.1
aggcgtgaaaacaccacagaggggtatggctagaagaacacgactgctgggcatcgatgggggggccttatctctgtacctaattccataggcttgtctttacaccgtgacaaaacagctaccggctggggagtacagacaaagaacggaaacatgccgccgatctagacgatccaagcttacttcctcttacatgcgaactgataggtgtcctatactaacaactaaatccaaatgactgaccttatttaacaacagggtgactggaaaaccatcacttcccaactt

SEQ ID NO: 37049 - DNA, 495 bp, Glycine max
  Clone ID: PAT_MRT3847_133457C.1
agtctaaacttctgcatgttgatatatgctaaaaataaaatggtgtccaaacatttttccaccaaaccaagagactttagtaggagtaacaagagggtaacataacaggaaaaaaaatgtcctacttattctgtgaaacgaacatataataggcaacacaacaatgaagcattatctctaccataattacgatgattttaggggaaggctacctaggctcttggtctccaccatgtccatgactaaacataactaccacctacaaattctgactggacatgccacgtcccctccctcgtccattatagccataccctcctactcttccataataaccacctcgggtacgtccaacacggccagggccacggcccctgcgaccaccatggtgcctcacaaaatcaccaaacgtctcagtatcaatcttgatttgttcagagtatctagtccttccattctgtgaagcattaccatgcatgttggaagagagcgagt

SEQ ID NO: 37050 - DNA, 624 bp, Glycine max
  Clone ID: PAT_MRT3847_133458C.1
gcaaagcccaatttaaaatcgttcttttctatttatcaattttttaaaaggctttatcaattacttataaaaaataagttagtgaaacaatattacgtatttattattttatttttagctataataaggaaattcattgggaaaataaatatattttaaccttcaaaattaaaaatcaatatgtcggagttcttctgttgatataacttcttaaagaaagcatgcacctgagtgagtccaacatataagaagttgaaaaaacgttgtatatgattatgctcgaaaggacggatgtcttaagaaagcttatgaaacataagatcaaaatcgtgtcattaatccaacaatcaagctatttcgtttttttttttttaatttaatcttggttattacgggaagaaaagggttttcgcataatatgtctgggtaggccaatttcttgatattgccatgcatgcttttagctttatgaaatatgttactatgaagtatgaactgactagtttgcttattgcttcttacgacaatgttgatgctgtaggaacagaccctctcctttgaatttgagggattggtattttctatattatctattaattttacttattttttatccattcctat

SEQ ID NO: 37051 - DNA, 448 bp, Glycine max
  Clone ID: PAT_MRT3847_133459C.1
gcgagaagacgacagaagggtcccttgactttgtcacctccaaagatggtgtagtgattgtgactgtagcatttacggattaattacctcgctatcttcatgtagtagggattgggaaaggttgtttcgtgtgggagggtggcaatggtagcaatggcaaagcaaataaagatggaataatgttcgtgttatatgttattggtaagttgtaaacaagaaacgtagctttacttccgaaaaaaaaatcatattcggttgtttaatactatcaaacatggttatgtctttaaaattaagtttgattaaagcaaaaagccaaaaattaagaacgtaacttttgcaatttgtgaagaattttatattaaattttattataaaattggttttgaaataaaatatttttaaacataaatcattttactttagtttcaatttttattcacactaa

SEQ ID NO: 37052 - DNA, 379 bp, Glycine max
  Clone ID: PAT_MRT3847_13345C.1
acgaggttaccttggagaaattcaaactcgatatgtcgcaaaagcaaacaagtgtctagccatcgagctatacattgggggaggtgggggagatatcggaaagaaaatcactcatggaggtggtgatggaggtgatgatgatggcgactatggacctccaccacattcctatgtatgattgtatccacgtggaggaatttatgctgatccatacatgcctacgggatcttatccttttaatccttttgccatgccttctcctaatggcattgctgaggcttcatgaaacactcctggcagcatggaagctgatggcaagccttctgaggtgaagggaaaattgccaatcgaaagatcaaatatgaagttggggtcggtt

SEQ ID NO: 37053 - DNA, 1544 bp, Glycine max
  unsure (1)..(1544): unsure at all n locations
  Clone ID: PAT_MRT3847_133460C.1
cggctcgagaacttttgtttatttaatagtaaatggtgagtgtaaatagcaaaanctggtaaacggggcccaagaaacccagataatgttcaataaatcagtggccatgcgaggtgatcaaattcaaatgaaaccaaattgctaagaagcttcagatcactaatacgacgacgcattacggaactaagggttgtgttgtgtcgtttcgttttcactctcacgttctcaaattttgtttgtgtatcgcaggaattaggatccgttatggccccagcggcaaccaaacattccaatcaattaactcgtattttaaattaccaattttaattcgccttaggaattcgttttctctgatccgatctggcagggaagcgaatcgacatgggtttcttagtgacgttgctaatctgcttaaggacaggaatccgccggtgcctgatgcagcagagagtggtgttgttttggtctgtttgcaatctgaagtgatcttattttggtatgggattctaggtatccacgctgattttcgtagtcattggaatcatcgcgaccctctgcaccagtatttgtttcaacagtaggaccgttcgaatctaattctatttacaccacttacctttgatttatttacagctaactaattttctctcttcggaatgatgttgggcgattgtatatcttgcatagatgaaaccactcattgtgcctatactgaacgagggtgaataagtctctgatcagatttaactccttgtaagttagagaatatggaacgcagattggctgctggatagaattaattctttgctatcatgagtttttcagtattttttcagggtggaactgtatttatttcttgttggataatggcattccagttggcatttctattgctacgtggcatttgccgtgttacggatgttgtatttagcactcattcatttctcatgtccgaggataatggtatcaaatatgttcttactgcaacaacatgctgctggatgatgtgggcgattgtatatctagcacagatgaaaccgctcatagtacctatattgagtgagggtgaataactttctgtataaacagatgcaactcttaagaatgcgaatcactagttggacgctggagaggagatgatttcagctctcataaatctttcagtattttctctggctggatctgtatgtattgttgttggataatgacgtttcaattggatcatcttccattgtgggcattaccccatgttgttacaattgttgtattcaacccttgttcgttccataagtattttggttaaataagttgatacaagaaaattatatcttggttttactatattataaaaaaaaaaaattgatgagagggttttttcatgcaatcatggtcttatgtatgatcctgtagaaaagaaagaagctctggtcattaccaattataagaaacgtgatggatgaattatgagacgtcacatggattttttatttatttatttccggttataantgttttccataagagccaacatacatacagatggt

SEQ ID NO: 37054 - DNA, 195 bp, Glycine max
  Clone ID: PAT_MRT3847_133461C.1
tgcgcccgcgtatgttccgcccccgcgcggggcgccgcaacgggggggctacagagcagagaccgggggcgcacgccaggggacaaaaaaggaagcagaccccggggaacagaccgcccaagaccaggcgcgcggccccaacaagggcacccgacaggggagggcccagcgggcacaacaagccacagggcaccg

SEQ ID NO: 37055 - DNA, 803 bp, Glycine max
  Clone ID: PAT_MRT3847_133462C.1
tacggctgcgagaagacgacagaaggggggtaacaaacaaactaattacattattccaacctttttttctcttttcctatttccattttctcggcaaccaaacattccaatcaattaactcgtattttatattattatttttaattcgcggtaggaattcgttttctctgatcgggatctggaagggaagcgaatcgacatgggtttcttggtgacgacgctgatcttcgtagtgatcggaatcatcgcgtgcctctgcaccagaatttgctgcaacagaggaccttctaccaatctatttcaccttactttggtaattactgcaacaatttgctgctggatgatgtgggcgattgtatatctggcacaaatgaaaccactcattgtacctatactgaacgagggcgaataattctttaaacagatgtagctccttgtaagttagagaatatggttcgcagattggctgctggattgaatttgattttggctatcatgagttgttcagtattttttcagggtggagctgtatgtatttcttgttggataatggcattccagttggcatttctattgctacctggcattggtcgtgttacggatgttgtatttagcattcattcatttcaaatgcccggggataatgatcccaaatatgtattttggtgaaaaataagtttatgaaaaaaaagtacgttttgtttaaaattcaaaatgggtcatgtttgtgaaactcttgcgcttatgtacccaattcgctttggtccctcccagctgaatgaaatattaattcaggtctgccc

SEQ ID NO: 37056 - DNA, 316 bp, Glycine max
  Clone ID: PAT_MRT3847_133463C.1
cccacgcgtccgctagaactgaaaaagaatttctttttgaaaatggcctaagacggccaagtgatctgtatacacagcgtgtaagattggaacgaacatttcacgaagggtgaacagtgcaaaaaattgattgtgggggctcttacagcttcttggtgcgggccatgccatttcattaccccaattcttgcaaagtttgcataaaaagttgcctaatgtcaccttcctcaatgtggatgtggatgaattggatactgtttacaacgagtggggaattgatgctattccaacctccctgtttttgtaagaatgcaag

SEQ ID NO: 37057 - DNA, 460 bp, Glycine max
  Clone ID: PAT_MRT3847_133464C.1
ccacgcgtccggggagagagaaaataacatgggtgagttggaaaaaaaatttctctccaaagggacatggggtaaaagacatcatttttaatattgttttcttggctaaatggacatggtatttatttaacaatagaggtgacctttggaataaagtgcttgagtcaaaatatttcgggtggatgggtttgggggaaggaggggctagatccttgggagtccatttggtggagagatttgaaattagtatgtgggggagacaagacaagtggtttggggatttaattgagtggagggttggtgatgataaaaatattagattttgggaagatagacgagttagtgatttgtctcttcaaaattcgtttttgagaattttctcaaactcgggaaaaaaagagcggtggttgggaatatgggggagtggagagatggtaagtgggaatgagatattttgtgg

SEQ ID NO: 37058 - DNA, 381 bp, Glycine max
  Clone ID: PAT_MRT3847_133465C.1
ggggtggggttttttttttttttttttttttttttttttttttaaaacaagctttatctgcataacccctttttaaccttttagcgaaaaagttgagggcatatccctcccttttacaaaaaaaatcaccccctttttaccctttcttttgaatgaaacagggaattccccccggggtctcctgggcccaaaccttacttccttttatccaatgattttgcaacaaaactatggcacttccttcctcttccctttgattttgcatcaaaaagataaaacttgggcttttttttccaaattgggggggggggaccacttccctttttgaagggcctccccctaaaacccaacaatttgggggctttttgggcggttttaact

SEQ ID NO: 37059 - DNA, 272 bp, Glycine max
  Clone ID: PAT_MRT3847_133466C.1
atggcgtgtttgaagaaaaatataaatattaaaaaaaaaaaaaaaaaaaaaaaaaaaaaaaaaaaaggggggggccgccaaaaaagaaacgagggtaccaaccccggaccgcaacttacaaacccctccaaacggggccccaaaataaaaaaaacggccggaagttaaaaccacgggcaacgggaaaaccccggcgggaccgcaaataaccggccgggaccaaaaaaaaaccgacggccagcggccgaaaaaaccaaaaagcccgcaacaaa

SEQ ID NO: 37060 - DNA, 268 bp, Glycine max
  Clone ID: PAT_MRT3847_133467C.1
gaagtaactgtggatgttcttagttcgggttgaacaccctaatcaagaaactttaaaatcgcttcgtgagtaacaggacttgtcaacataccgtaattcaagctgggattgtacaaccgtcttaaatgacagtttgaagcgaattcctagaaaaaaaaaacaacagactgaattaggaacgccggactctgctgtttatgccttactactatacccacaagtttttttgaactctgatgtcccggcaccattatccacattaacctcg

SEQ ID NO: 37061 - DNA, 194 bp, Glycine max
  Clone ID: PAT_MRT3847_133468C.1
agattatacagactcgtttcaccacttactacatcttgttttcttctctgcttcatgcccccacaatcgggtgatcttgttgcttctgcatataagttgacctaaggttcgatggtaacaaggtgggtgcatatgacctttttgcttactggtcaagaaagaatgctacataagcatcccacctatgatttgga

SEQ ID NO: 37062 - DNA, 414 bp, Glycine max
  Clone ID: PAT_MRT3847_133469C.1
ctagctcgggggccgccctgtctttttcattctttttcaattttaacaccatcaaatgaacctagtggtatgactgaaacccgaggagaaagcaagactacagctacactactggagatcttaaactaacccacgaaatataaactaattgtaatgtaggaaagcacgggatacctgaaatctcagacagagaaaagggcatcggtaaatcctgtaataattattgaatggaatgcagaatgtacgactaattctggacatactaataatagttgacagtcatagtatcatgctatggatcgtttttggggtcactttcagcctctaacttagtgtcattttccttctcgactggtggttgacgactgatgtccacgctcctgtaaaatgaatcagaacggcgggaggcagaat

SEQ ID NO: 37063 - DNA, 150 bp, Glycine max
  Clone ID: PAT_MRT3847_13346C.1
acgaaacattctgggaatagaaatattctagctcctttaactattcacgtcatgatggggagacgtgtataaactacacgcatcctatgtaccttttccaaatgaaaactggtttggcggccgctctacaggatccaaacttacctactc

SEQ ID NO: 37064 - DNA, 1721 bp, Glycine max
  Clone ID: PAT_MRT3847_133470C.1
tgcgagaagacgacagaaggggacactttttttttctttttaactttatacattgtactgattgtagagagagagagatgatagatgcaagactttttagcatatccaagggaaagtgaatcccaactctctcgagagccacgaaaccagaacttcgagtgactcaacctcaaaaaagctaaatcctttgatgaagaaaaagcagcagaaaaagaccgaagaatctacaacagtttcttgatccctcttatagcctttgagcattgaaagggattacctcaaattgccatgatttgattcctcaacaccccacacacacgtagttaaaatgggttttactaggaaacccatgtttcctgtgttgctggttttgttcatcacaagtcttcttgagccgccccatgttgcagaatctacttcttctgattactccactttggtctacaagggctgctcaaaggagcctttcacagatcccaatggggtgtactctcaggcactttcagcactctttggctcattggtttcacaatccaccaaagccaagttctacaaaaccacttctggctctggccagaacaccataactggcctcttccaatgcagaggggatctcaccaattctgattgctacaactgtgtcagcaggctcccagttctgtgtgacaaactttgtggcaaaaccactgctgccagagtccaacttcttggatgttatattctctatgaggttgcagggttctcccaaatctcaggtatgcagatgttgtacaagacctgtggggcaacaaatgctgctgggagggggtttgaagagaggagggacactgctttctcagtgatggaaaatggggtggttagtggccatggcttctacactaccagctaccagtccttgtatcggacggcgccgtgtgccacgcgtccgggtgactcagattgtggggagtgtgtgaagaatgctgtgcagagagctcaggttgaatgcggtagctctatttcaggacaagtgtttttgcacaagtgcttcattagttatagctattacccaaatggggttccttctagatcatcttcttcatcatcagcttcatactcttcatcttcttcagggcaaaatccagggaaaacagctgctataatattaggaggtgcagttgcggtggcttttctggttatattgttgctatttgcaaggagtttgaagaagaaacatgatggtatgagttatgtgcggcaataagaagtgctgtccagggaaaacactcactttgttattatttatatatactttatgctcttactaataattttgtgttttgattctctcatttactcattttgcattattattattattatcttgcacagattattgacagcagaaaatgaattctgagaaggcaaaattattctttgtgatgcattgtttttacaagattagttgatggatgaggggtggaaaatggaagttttgtggtaaatagagtttttgcttgatgcagaaacaatactacaggatggttcactgtaatgattgttgtagctaggtagttaagattttgttgttgggaagagcaatataattagaacctgaaagtgagattttttttctgactagggtgtaactgtaaattacccaacagaatgaatgtttgtcaaaattttgggtcttaccctttagccatgtgggttatttctcttttccctattttctatac

SEQ ID NO: 37065 - DNA, 205 bp, Glycine max
  Clone ID: PAT_MRT3847_133471C.1
gtgagtgcacacacccaatcaaacatatgtgtttatttaatcgagtactcatgacatcggacgaggttgccgatcatacataatgcacaattacaccatccctttgaaccgcctaatcacgcacaaccagatgcaatgttcgcataggtccaaacacgaagagggacttgtgccatgcctgaactcaatcattcaaggttttaag

SEQ ID NO: 37066 - DNA, 211 bp, Glycine max
  Clone ID: PAT_MRT3847_133472C.1
gaacgatgcaatactggctctgggaccctcgggaaccatcgtaagacacatatttagtgcaggtgttgaggcagggaatcctgctttaatctaggatagggacactgctgcctgtgctaacactcccatgcttggcactgttgctgatcctgtaacccctgaacatctcattgttagcttccatgattatgctattgctcttagtccaggg

SEQ ID NO: 37067 - DNA, 448 bp, Glycine max
  Clone ID: PAT_MRT3847_133473C.1
gctacgagaagacgacagaaggggtgatgtatatatctcagtaatatcaataattgaatttttatcaacaacgagaattactcaccttgctacttaaagtaaattacttattttagagaagctagatctcttaagctaatgtcttaaaaattcatgtaaacttctgtacataaaaatgtcttgtaatataaatttctgtacagcagaatgtcttaaaagtttatatataaactttttttttttacaatgaaaattttcaaaattgacctctaatgggttgataaaaaaaaaggctaataaaagataacagagtgattctccattacctttcattaactctcttaaagttacatttgaagtaaatatataagaggttctcaaacccgattgcaaatttgatactacaaagctcgcaagcaaaacaacaaaattcatgaaccattcatga

SEQ ID NO: 37068 - DNA, 1083 bp, Glycine max
  Clone ID: PAT_MRT3847_133474C.1
atgaacataggctatactataaggaaagacgaaccacttgcaatcaatgatgaaagtagcctaattgttgttgtgctatatgagtggtgggagcgatccaaccggcttagcgtgatgttcattaagatcaaaatctcggctgggatacgtggttctgtcgaccaacatgaaaaggaagaagaagggattataatggagataggtgagagtgcattgctaacaattgcttgtgggaagaacaaaacaacaagtcttaagataattagaagaggaatgagattaggacatatctccattgagaggattaaaaggttagtgaaagatggggtactcaatactcttgattttgctgactttaagatttatgtggactgtattaaagatatagatgcacatggtcagaaatattttatcacctttatagatgattattcacgatatataaatgtttatttgcttcataacaaaaatgaaacattggatgccttcaaagtctttaaggccgaagttgagaaccaatgtggcaaacaaataaacatagtgagatcagatagaggtggagaatattatgaatttgactataatattggagttgaaaatgatcctgaaacttttgatcaagccatgagttgtaaagagtcaaatttatggtatgatgtcatgagggatgagatgaattccatgctatgtaacaaagttgggaaccttgtagagtttcctaatgggacaaagcattttgaccttgagttgcaaaaaatggatgtgaaaacaacctttcttaatggtgatttagaggagaaggtttatatgaaacaacctgaaggattatcctctagcagtgatgatagtttacttgtagccaatgataagggtttgctacatgaggtgaaacaatttctctctaagaattttgacatgaaggatataggtgatgcatcttatgtcattggcattaagattcatagagatagacctctagttgttggaagcctcatgtatgctcaagtatgcacaaggcttgacattgcttttgtagttggaatgttaggaagatatcagagtaattcgggtattgaccactga

SEQ ID NO: 37069 - DNA, 559 bp, Glycine max
  Clone ID: PAT_MRT3847_133475C.1
cacgagccgcgttttctcttcttctcatcataacctaatcccatcaacacaattcaacgcattcccaatttctgcaattcgagggaattagggttcctacttttacatttacatggaccaacaagacgaagaagcgattctcaccaaaccctcgaattcgttgacttttccgtctctaacccactccgcctgcctcgaaatccgtctcttctatgtcagaatctccccctgcctcgtcgacacgctcccggagcacctcacgctctgccaccctcgccgccacgccgccgtctcccttgtcgtgaacgccgcccccgtccccgcctccgaccccgccacgctccccctccgtcgcggccgcgtcgaccgccacgccgccgaggtgacctacgtcgccaccgacaccgtcagcctcagcggcagcgccgacttcgaggtatacgagaacgacaagctcttcctctgcggctccttggagcgcctcgacgccgactgaagagccggctcaccttcggctcacacttgcgggtgggacatcgactgtcatgtggctctcggc

SEQ ID NO: 37070 - DNA, 267 bp, Glycine max
  Clone ID: PAT_MRT3847_133476C.1
tgctcgcgtcctttaaattttctgtaagatatacatcgcttttattaaacatctcatttttgttgttcatccaaagtttgcttcacgatgccggttcgagtttcgcttttccatttcccccctttataaaaccatatagtcattgtagttcaaatactctgcttttttagtcaatacaccgtatttacataacgtatttgtgtttagaacgtcttaggctgactaccgattcttattggaaggcctacatacgagtctctcactttt

SEQ ID NO: 37071 - DNA, 260 bp, Glycine max
  unsure (1)..(260): unsure at all n locations
  Clone ID: PAT_MRT3847_133477C.1
tatctaacttaaacaaactgaccacttaaaccttcatcactttatcatcacttttttttccctactcaataaaaatccctcctacctattcttctccaccacttaatcaccatattcataatattcttatatctctgacaccctttcntcacatctcttacacataatattttataacacaaatttttcttatcactcccnttttatcaccatcacattttacaaaaacctctttctatatgctctcttcttctcaataa

SEQ ID NO: 37072 - DNA, 142 bp, Glycine max
  Clone ID: PAT_MRT3847_133478C.1
acacgcgacaacctaagcctagacctgaatttgaattgctagcatggctagttgcaactcatatacaggtctcaggcttaggttgggtccttttggaattttattgcgagcttggcgaactccatctaataaatgtcttatt

SEQ ID NO: 37073 - DNA, 321 bp, Glycine max
  Clone ID: PAT_MRT3847_133479C.1
atttatattgggtgctagggaggggtggccataaggtgtgaatctaaaaggaagacagctactgtcagaaaatcaggcatatcctgggttgggtctgacaaaacctacagctcatctggcatccattcaccttacctccacttttttctgccatttccctcaatacagatgaccttcaattgccacaaccggcgtgacagcggacacttcgaagcctggggtacaaggggaatgagtctgggcgagcatgccagcccacttatatacatgggcttagacaaccactgcggcacgcgtgcgcagattaactgctgtttatct

SEQ ID NO: 37074 - DNA, 384 bp, Glycine max
  Clone ID: PAT_MRT3847_13347C.1
aggctcccctaccgtgtctggacggctgtctctcaaacctctcccatctctttgtaatcccaacattaatgtgtccctttcgactccatttctgaggaatgggagatctcccccttcacatatctccttcctattccagtcccaatctcccacatattcatgcttcaggttccactttcataaaaacacaaatacctacactatcttttccaatctctcaatttaatcaatttaaaccctatactctttcctatgatagtaacattctatatgaaagctccaatttctttgtttactgcataacgcataatacttcaagggattttcaatgctctgatttccatggttgtgctttttttcttttacaacctttaattcatcatt

SEQ ID NO: 37075 - DNA, 413 bp, Glycine max
  Clone ID: PAT_MRT3847_133480C.1
taaacataatctaacgccaaattttttccataaaatttcaagaaaaggatagctcacgcctatttcaaacaccggggaaaagctatccatccccaattgctgttacatgacgacttctaaaactaaatgggtcgaggtctcaacatccattagttctgaccatttcttcccgagacaaaactccaccagatctgcccacaagactctttgaatggtgatcccatatcactaataaaaatatccccatcatttaaagggctccttgggaatattaacaggttaaggggctacctaccgcctccaaaaattaccctgaggtgaaaggttccggccacttgctcttcttacaaatggagataaaacatcctatgagttgctgacgttccgcggaacagattatccagagtgacaat

SEQ ID NO: 37076 - DNA, 447 bp, Glycine max
  unsure (1)..(447): unsure at all n locations
  Clone ID: PAT_MRT3847_133481C.1
acgagtgatgttgggatgcgtaaaatattggacaagatagtagttgataaaattgctggaattgaagttaaaaatatttttaacaatttagatagtcaaaaggttgttggtcttgtgaaacctgatttagacaacaaagaagttagcgggaacttcatggcaagcaagtaaatctgctaatgctttgcatactatttccaacaagaagactgtgcctcaagccaaagttgaagaaaagaggggttgtaaggattctttggttaaacaaaaatcatttgctaaactatcacatggtttgatagctggtttggaaatgaaggaaataactaaaatggatgatgggagtggaaaggatctattgagaagaacattntgatgtctaggggtgattcaaaaagggatgatncgcaagatggttgtggtcccgattggacaaattaaaaaggg

SEQ ID NO: 37077 - DNA, 725 bp, Glycine max
  Clone ID: PAT_MRT3847_133482C.1
gttgtctatgaagtacttgaggaatctacgttagtctcatcacgatcgtgtgttcttttttctaggtagttttctaagactcttctctttattttaatctttcactctcgtggcgatttgtcaaaagaaacttggttccttgtgcttgaagccacaagcaataataactggtatatttttggcttcggggttattacttcacgacttttgtgttacttgcgttggtggatttagttataattaacgagtcgttttggttatcgtgaagcttccattttgttcattaattacttgtcgcattgaacaagttttcagaagttgcttggaaaatggaaactgcaacctcaaggacgatacactcatatcattttatatagcatttggaagaattattggttgtgttcattgcttcatttttaatcgtcctcgtatttttgggttttctgagaagtgcgtgtgttgatggggggtcaaaattctaaggaggaaagttggaggcagagttcatctgtcaggtcttcttcttcttcttggagtgcttacttggatccactatcgagttatggtttcaatgaaccgcaaccatcatattcttcttatggctatgaagcttatggtggcgatggaatggtacgctatgatagtacaaagctagagaggaggtactcaagaatttctgatcattacaggtccatagatcaggttagtgaggctcttgcacttgc

SEQ ID NO: 37078 - DNA, 424 bp, Glycine max
  Clone ID: PAT_MRT3847_133483C.1
agagggcggtgtctttgtatctttcttttagggggcgcgccaggggtgatatttacaccatctgttctcacagaccgcgaattgtggaatcctgcttgcacaaaagcaatgactatgtcatttaacaccaaacccgtgatctgatgcatggagtgaggaatgtctgaagcgtactggatttgattgggatatcatttgggtgactggatggactgccaccccaatgcaggatgttcaggtcacaaccgatcggtttattgcctctgatgaatgtgtgcccaggacctattgtgttgtaaatgcacaaaatactcttgtgccaaataggtggaggggacaagcgactgtcccacagggcacttacgcgagtgtctagagaaggcctgtatctatagggggaggagctggggcacaaaatgctatt

SEQ ID NO: 37079 - DNA, 573 bp, Glycine max
  Clone ID: PAT_MRT3847_133484C.1
gggaatctcccatcttgctaagagactagttattatacaataatgatatcatttcaaactaacaataattttaacagaaatatgtgtgtgtttgtttctttttaaagcaaaccaagaaatgttatgcccaaattacatagtaaacacatacttgatatattcaaccaaaagaaaaaaaaaatcatgttaatattgcattaacgtacaagctacatagcaatttagatgtgtcaaaccaatagctaatttcctatattacatcaatgtacaagtttggttaattaggattgaagggaagaatttggttgcattaataactatgaatttggcacaagtttctaacaacgattaatatatattgactcatgtgaagattcgctaataaatgaacaattgaagtaaacaaaatctattgtcattgaacaaatcatttttatcttaatataaatagatccaattacttctgtagttattttttctgctcaagctgaggggtaaattggaattttcattgctcatttatgtgggattcttggaaatctataattaattcctacaataaattaccattac

SEQ ID NO: 37080 - DNA, 914 bp, Glycine max
  Clone ID: PAT_MRT3847_133485C.1
tttcgaacaagctattcctcttaagcttgttactgaatatccacactgcataccttaggccttccgaattcgaagcaagtttgcttccacgcgccgacccacgcgtccgacggctgcgagaagacgacagaaggggacagcatatatatcaataatctattttatactatacctacattttgataattttctttgtagttgatagccatggctacccgtggaaagcttgaggttgacattgatctcaagtccaacgcagacaagtactggcaaacccttaggaattctactgaaatattccctaaggccttcccacatgattacaaaagcattgaggttcttgagggtgatggcaagtctcctggttctatccgccacataagttatggtgaaggttcaccacttgtgaaatcatcctttgagaagattgaggctgttgatgaggaaaagaaggtagtgtcgtacactatcattgatggggaactcctccagcactacaaaacattcaagggagacatttcagtgactccaattggcgatggatgcgaggtgaagtggagtgctgtgtacgaaaaggttagccatgatatttctgatccaacccttgtcaaagattttgcagtcaagaatttcctagaggtcgatgcctatgttcaagccaacgcatagagaggttctattctatgcatgcctcttaattaataatggctaatgttttaatctgtgcatgtattatggactattattaaataatatggttgtacttgtaccataccttatctaatataatgttgcagtatcatgtgtctttcgtccttgcttgttgttggactaattaaagagtcatggtgttctatatatgtggtagttctgatcgagaaaccatttatttagtttgagcattagtatgtaaa

SEQ ID NO: 37081 - DNA, 256 bp, Glycine max
  Clone ID: PAT_MRT3847_133486C.1
ggttcttctacgaagctccaaagttcacagagaatgaccctaactacctaatcctcagtcggcgctcattctacagcttcacttaacggtctcaaataactgaccatttatcgaagggatttgccatcagtggagtgctgtgttgaaagtgaaattaaacattaatgtgttgggatgctatgagaccgtattgtcaagctagtggtgcgccttaattactgcgttgcgcagatatacattgccatctaattacttt

SEQ ID NO: 37082 - DNA, 151 bp, Glycine max
  Clone ID: PAT_MRT3847_133487C.1
gtagaacacggaggaccggtggttaatggtgttaataaatttaagacaattcaaaacacgaaaacgtcttaggtggggttgttaatgcaagaaccaatgaaaacgggtgtggggaattacggttgggggttggggcgaccccagaaggtgt

SEQ ID NO: 37083 - DNA, 825 bp, Glycine max
  Clone ID: PAT_MRT3847_133488C.1
ggccttttgttccgtccctcccgtcctgcttcccgtggttccctttgatttaatttatatgtagtgttaaaaaatccatgtcatatgggtagagccttaatttccttgcttgctattgtaattgtatgctatgctttgactttatcgttctaaatctcttcttctataaaccttgttattaattttctcaggccttcaatgggttactattattgtaaacccaggccttgtgatactcgtactcccaatgttgttctgatcttggccgtggccttgcttcttctatgtgcaccaaagctcttctcaggtgaagcagaggaagaagaagaaacgaataacacctcaccttttgtggtgccaataatcgtagtactcatcctgcttttgttgtcctttttgggaggttcaagcagaagaagggtttgtgtcaagccaccatattgtcagtgtacgtatgcctgctactgttacagatagtgctatcgccgtgatcacggatttgatctctaagtttatatgtgtgaaattaaatttttaaataaattttagtattttaaagaattagtcgttgactattcgctagagatataaaaaaaataaaaaaaattgtccaataccttgctgatcgatgaggataaatggtattgtgctctatcatctttgttatctttactattgtcttaataagacaatgatgaacatataatttattgtttcatattgtcggtgcaccaaaattttatgttactaatgtattacgggacagtaattatatataatgttcctatttcatatattcttatcggtcaagtcacattataattt

SEQ ID NO: 37084 - DNA, 303 bp, Glycine max
  Clone ID: PAT_MRT3847_133489C.1
aaaaaaagccctagcaccccattaaagaaacatctacaaacatttgtacttctgccaaggcttccatggataataccaaggccactgtccaagataatgcataaagaatgacatcactttatccgctgcaaaattatttaccaacccaaaataaatatgcatacatcaaccattcatatcattacaaacattctactcgtcatcataacacagttaccaaacaatccaccaccactgcttaacacattttacattgccaccacaccaccataacccttacttgaaaccacactaattccacca

SEQ ID NO: 37085 - DNA, 802 bp, Glycine max
  Clone ID: PAT_MRT3847_13348C.1
cggattcgcatcgtgattctaacgttaacttctatttccattttctttgctgcgatgcgaatatgcttcctccaatccgtccttctacaaatgctatctgctgacagatactgagtaccgatctattttctctcctttttcacaatttctcaagttaccattagaaggaagccatggaatctgagagagaaagttttgacctctcaggacctttgcatctaacttatgtcttatgggacaatgcatatcatcgaatgtcagttgctgctagtttggtccaaggagtttacattctagaaagggacaggcaagaaaaacgtgaagggcaaaatgctcttgcaccaccttggtggacattctttcactttaagctgctccgtcccctagtagatgatgttgattcctccatctttggtgcaatatatgagttcaggcctccatcatctcaatataatgacactttatatagaagtccacattatgtaattgcctttagaggaactctaaccaaatcacattcagtttctcgtgatattgagctggatatccactttatcaagcaagggcttcatcaaacttcccgctctgaaatagctattcaagctgttcaaaacacagtagcaactgtaggtgattcaaatgtttggttggctggacactctctaggatcagcaatggcaatgctcactgggaaaaccatggccaagaatggcatgtttatcgaatcttttcttttcaacccaccatttgtatctgctccaattgaaagattaaggatgaatttgaaagattaaggatgaga

SEQ ID NO: 37086 - DNA, 488 bp, Glycine max
  Clone ID: PAT_MRT3847_133490C.1
gtcatcactgtatgacgtcctccttctttgggggggggggggggggcagcaccaagatagggacaggccagaccaggcccgtcaatggagaatgagcacatgagagggaaacaaatatcacggaagtaagtaagctaaatttcgcaccgtatgtcggcaacagtagcgattgaagggtgaggcaagggaaaaggggtacgtggaaaaagactttaaaaaagtataggataaaggaagagaaggttacacctgcgaggtggataaacgggtattgcgtaacgaagcgagggaaaggcacaccattagcaatggaatgaccgatgccgatgccgatgccgccgccgtcaccgccgccgtcaacgccgccgccatacagccaatgggcgtaatatagcttggtaccatagtggtaggtgcttaaatgtccacaacatgtggtggagtcggcctggggtccgccggcgcacggggaggtgtggttaaatgac

SEQ ID NO: 37087 - DNA, 451 bp, Glycine max
  unsure (1)..(451): unsure at all n locations
  Clone ID: PAT_MRT3847_133491C.1
aaccaccgacatcttaatcaccaacgaccagccaccttcccgctactacataacggcacatacgtaccaatccgcccaaaacgctaccttcgacaacaccagcacaaccagcagactcgaatacaaatgaccgagtcaccacagtaagcattctgaccatgataccaaaagagtaaagaacagaaccaaacctataatacctgcactccctacttacaacgacacaagcgcaggcgctacctgcagcaaaagcttcagaagccctagaaaagtggaantacccactgaaattaaccagagcctcttcttcactaggagtgtagagatcaagaagtgcgccggaaacttctgaccagagagatgtcaaggacccaggaatgaaacgaagttcactacgaacatgaacaacgtgtgggtcgttcgcccgagcaagcggtccatcttgcagact

SEQ ID NO: 37088 - DNA, 343 bp, Glycine max
  Clone ID: PAT_MRT3847_133492C.1
gattgataaactgcacatggaacaacttaaagattgtatggaaggatgcgttctgataacctaacatgcagcaagcattttagcactagatactttgtactaaacacagtgataacggatcctctttatttctaagaatatggggccagggggacatcacgcttcacagcgatgacgttaatgctacttgtgctaaagaaaaccttatgttctgggagggtggaatccgtggctgatgatgttttaatgaccatgattatcacacttgccacgtttttttgtgtggatgcagttataaaaactttaaggaagaagacctgcactttttatcttgaatgtataa

SEQ ID NO: 37089 - DNA, 553 bp, Glycine max
  Clone ID: PAT_MRT3847_133493C.1
agaatatggagagcattgggccacttgtgcccatcttgggacccattagtcgagaatttgacagttgcaagacttgcataaaaagggaagagagagagtaaggtgtaaacagattgaacgtattcagaaagttatgtttgggaatgggtctttggagagaaatggaagggtaggtaattgttttaataaatatttgttatgttgataactttttaaaataaaaaaatgatagattagcataaaattaatgtcctaatatcttctttatttttacaaatatatgtctcttaatttaaaaatacaaaatctgtccttccttccttttcctcctaaatttcaaatcctaaaaatactcttaggggagggagagctaggactcttgatattcctgggaaagagagacctattgcattttgctggttcatcttctttgtatttgagttctggtaaactttgattgaagaaagaatctagttcagtaaaaattcctttattccattccaattttgttctcttttcataatctgaactagttcttaccatccttttcgaa

SEQ ID NO: 37090 - DNA, 423 bp, Glycine max
  Clone ID: PAT_MRT3847_133494C.1
ttttatttttaagatattttccttaacatataatgtcatatgggggtacaaagtacttatgatatgaactgtgaagcattagaattttacggtgcagacactggctcgttgcaaatatggggaatgcttgctaaatcttgaccggatgaggatgaggtgggcaaacaatatgcacctatcatgaatgagttctggaagacatcttgagtcccgttgacaatgtttgatccttcttttgatccccgccccatatgaaataaggtcttgcaatttaagagaacggattctcccatgaatcaccaccgcgtgaaagcccatgaaggttcccatacgtttatctggagggatagaaatttgcccaatgattacatgtcaaatgctctaagcgcgaaaaacactggggggaataggacccctgccttg

SEQ ID NO: 37091 - DNA, 692 bp, Glycine max
  Clone ID: PAT_MRT3847_133495C.1
cccacgcgtccgggttaatggaatgtgaagagtgacgggacggtgatgatagtattgttacgcgtgtatggaattcgatgccgcgattcccgtgtctcgagagcacttacctcaaggttttttttttaaagaacctggagtatagagaccatggcaacgttggaaaagccttgggctcatagcaaaacggattttcaatgtggtttggacaaaaatatcaaactgaagaaaatgtccttgaaagttgaaatttcatacatattcataagtcaaagccaagtttgtattacactgagataaataaaatgcaatgtggcaaattaacttgaggtcaagtgaaacaatggaatcagaaccttatcctgagcatccaggagaaccagattgttcatactacattaggactggcctttgtagatttggagcaacatgtcgatttaatcatcctcctaacaggaagctgttacctgatagttttttctttgaaaactatcaggctattgccgctgcacggatgaaaggtgaattcccagaaaggataggacagccagaatgccagtactatttgaagacaggaacttgcaaatttggagccacatgcaggtttcatcatcctagagacaaggctgggattgctggaagagttgccatgaatattttaggctatcctctccgcccaaatgagcctgaat

SEQ ID NO: 37092 - DNA, 421 bp, Glycine max
  Clone ID: PAT_MRT3847_133496C.1
gctgccccggcgggtgccgccgcgccgtaaccgccgggacccaccccgccggcgtcattggatggcgaaaagatgacattgaggggggggtccagttgctgaagaggctcacaacacggtaattgttggacttgagaaaagagttcctacattggaaggcattgaatgtgccaaggatgagaatcttactcggcgtaaaattttagacaaacgtaaaacgcgctggtttactgttctccctatggagtaaaatgttgagaccacgacacaagtatataaatgagaagaggctaatgatgaataaaaggtacaagcttaaaatgataaggcgcatataacccatactcaatggaagggactggttaggacaataaattagctgccatgggctacaatggtctgcggcgcgacctggctagac

SEQ ID NO: 37093 - DNA, 284 bp, Glycine max
  unsure (1)..(284): unsure at all n locations
  Clone ID: PAT_MRT3847_133497C.1
ctcccccatcagacatggctantgcatattcagatcctgttcgtagtccatattacaatattgctttgaacgagatacacgntgctgggaagcgactgcctctaaaagcaaatgtttttgatggaaaacatgggactgtcttggatagtggtccaacttatgcttacctaccngaagcagcatttcttgcatttaaagatgctattgtgaaggaacttcaatctntcaaganaatcagtggtnnagatccanattataatgatatatgttcccctngtgctggc

SEQ ID NO: 37094 - DNA, 215 bp, Glycine max
  Clone ID: PAT_MRT3847_133498C.1
gcaaactgataataaagaccttcatctgagctcgaaatacttttatcttaaaattctaagctatgtgtaaaattccatcactcacagacatgtcctctagctctatatctatctcagaggacatagatctgtgctcggtaccaaccgcagcttgaggcctttcacgctagttacgttggcggaagagtcttgcagcgcttagcattgacaccggt

SEQ ID NO: 37095 - DNA, 236 bp, Glycine max
  Clone ID: PAT_MRT3847_133499C.1
ctcgagccgattggcttccggattttaaaactcgaagttgtataaaaaattaatcctcagaatttaatttctagaaatatatattttcagagttaatttcagaacataattttttctacatttagaaaccgagtttatcggatgatgtagacatgttgagattcaaattgattaatatttttaggacaaatatcacgataatcctttccttgccaacaaaggctttgaagtttcta

SEQ ID NO: 37096 - DNA, 423 bp, Glycine max
  Clone ID: PAT_MRT3847_13349C.1
cgcatcgtgattctaacgttaacttccatttccattttctttgctgcgatgcgaatatgcttcctccaatccgtccttctacaaatgctatgtgaatttcaaatcttctttaaatttcaattatagaatctccagtgtggaatgcaccataatattcatgtgaaattgaattgctttttcttcttcaaaattaaactcatattgtcaaacatgccatttatttgatttgactgaatatcattatgctggccaattaattgcttttcagctgctgacagatactgagtaccgatctattttctctcctttttcacaatttctcaagttaccattagaaggaagccatggaatctgagagagaaagttttgacctctcaggacctttgcatctaacttatgtcttatgggacaatgcatatcatc

SEQ ID NO: 37097 - DNA, 562 bp, Glycine max
  Clone ID: PAT_MRT3847_1334C.1
atacccacaacctctccaacatcaacgtggcggagcctataaaccaaacaaacttacattccgcaccctgtatgcgcaggttatgaccattacacctaatgtactaaattccttctgttgggacacgaagaaaaacctgccttaaagggccaagcgtatccttattctgggggagactccaatcgcaggactcataaacaagaaattttttttgaaccgatccaactcagatttctatccgcccttaaatagctcagcacccgtaggcctggaggtggaggttttttgcggccccttcaccaatctttgagctaccaatgccagtcttctaaacttgtctcttggcatagcctcggctattaccagaagggcgtcctgaacttaattcacattgagccgctttagcctaattgcctgattgctgacccgtgcaagcgaccttccaaaggttaaatagagtgacctaggcttaattcacatggacctggttaatgaccttgaggacagggaaaaccttgtccttactctgcccaccagacaagaaaacgatagcccgtttctg

SEQ ID NO: 37098 - DNA, 496 bp, Glycine max
  Clone ID: PAT_MRT3847_133500C.1
gatcttgtccctttttttttttttatttagacaggaacctttcaccaaactcgtgattttttggctgttctaaacagaattcctttacactggaataattagccgcgcaactaatcctcttaacaaagagtacttcttattttcttctcctaacaacatgggttcccaaacacctgaacttatagattgaaatatcggcctgaaacatgcaattcttttgtaaagggatctgtgttcctgacaggtgcctattggggcatctatttccctgtttactacggggaaggcgacgggaaatttcatttttgcaccgggctttctttccactctggctttccgcttggggataacacccactgctaacgatacttctgcagccccttttatactgctgggcccaaagattctaagagttggcttctactgggcccagaagatgccaacctctttaaatgttgggcccaacacaataaaaggggcttgaggaatttgccta

SEQ ID NO: 37099 - DNA, 385 bp, Glycine max
  Clone ID: PAT_MRT3847_133501C.1
ggggcccttcaaaaattttaaagattttaaacttgggctaaaacccgtcccccttgaaaacaaaaaatgctaaaacttcaaaattttggccatcgggggggccttttttggcacaaaaataccaaaaaacctttaattttgggaattgccctaaattcccttaaaacaaaaaaagaaaatggggcttttctggttaacaaaaaaactaaaagggggatttgggtgaaaatttaaatccccaatatttgcttgatttggaaaaaaaggaaaattttccccttccttgccacctttaaaaacctgaaaagccccaaattcaaaattttcaaaatggtccccccctccaacaaaaggttttaaattgttttccttaggggcccggggg

SEQ ID NO: 37100 - DNA, 431 bp, Glycine max
  Clone ID: PAT_MRT3847_133502C.1
cacatcacctcggtacattcggcccgacctctttttcactttttccctcaccgccatctgaccggtaggggttagggctagggctacggttatgtcccatacttctcctttcattcctacttcatcttgcgaacgtccgctctcttaactcgcatctaactgtcgctgaataattgaaactcatcgccgtgcacgttcactcccagaccgaaccatcttgaataagcgctctccgtgtacatggcaccgccctcgtgggcgcgatcttcgccgtagcagattcatattcatttgcctcgcgtagcatcggggctgcctttaccgtttgggactggccctgataccgagcattacaattcattgctttaagcgtgctttggtacaacatagggttctgttctactgacacaattgaccaacgtccccagcgg

SEQ ID NO: 37101 - DNA, 255 bp, Glycine max
  unsure (1)..(255): unsure at all n locations
  Clone ID: PAT_MRT3847_133503C.1
ggcngatggttatcannctcacttnattgccccagagcaaggttacaggcgcttnnttgaggganctctcggttactttagangcccagctgaagcttcagtanangntnttaactttgntttnnnagaactcgtnaggaaatcaatagctganacaaaggaactgnagngcgtcncaacatttcaagccgaactagctgcagcngnnaatnaggctttagaaaggttccgtgaaganngtnagaagacaactgt

SEQ ID NO: 37102 - DNA, 270 bp, Glycine max
  Clone ID: PAT_MRT3847_133504C.1
gattcggcacgcgcttcgatcgatctctcttccatctgctatgtagatgtctgtcaccgtctagggctctggctttggggcactatttgaagaaacaaatgtgcattctgaagacagcaacgcatcataagctgcactatgcagtgcctggcctggacacaggcagtatgatcgatttaacaacgtagcgatggtagtggtaggcatgctcgttgagcaatggggtgaagcgccttgtgccactgggtctaggtgatgatgatcaatgca

SEQ ID NO: 37103 - DNA, 479 bp, Glycine max
  unsure (1)..(479): unsure at all n locations
  Clone ID: PAT_MRT3847_133505C.1
accggtccggnnaattcccgggtcgaccccacgcccgtccnnggcgagaagaaacgacagaagggggggcgcacncnnactctctanctttgttcatttctacggtatcaagtgtgctcgtctttttgacggtgcnngtgctgtancagcattgacccctcagctttgagcccagtaaaaccatgcatcagcacctacctanncggtannncatggcttgtgcatgcaatcnntttcgtttcggtcccacccacgatgtctcacttgtccccatacgnagaacctccctttacccggagtcttcannagccccaatccccgctttcgcctccttcnngtcccggcgtcgcccattcggcgaacttcgtacctcgaccctctccagaaatatacttccgcatggtctacttcgacgggtcgctctcctcannaaaacatccgatgcttttcttccacgccctaatactaaatannagttt

SEQ ID NO: 37104 - DNA, 458 bp, Glycine max
  unsure (1)..(458): unsure at all n locations
  Clone ID: PAT_MRT3847_133506C.1
ccggcgacccagcaaagcgcaaagcaccccccaccacgacccgcccccccagaagcccccagaaaaccccagacggcgcgcacaaagcaaacagcccgcaagccgaccggcggcaaggccccccggaagcagccggcgacaaaggccgcccgcaagccagccccggcgaccggcggagcgaagaagccacacaggcccaggccaggaaccgcggccccgagggagaccaggaaccaccagaagagcacggagcgcccgacccgaaagcccccgacccagcgnaaggaccgcgaaaccgcccaggaccccaaaacggaccagaggccccagagcagcgccgaaacggcgccccaggaagccgcagaggcccaccccggaggacaccccgaagacaccaacccaagcgccacacacgccaacacgggcaccaaaaggcccaaggaccaacaacccgccac

SEQ ID NO: 37105 - DNA, 198 bp, Glycine max
  Clone ID: PAT_MRT3847_133507C.1
tatccattctttctttcatcttttcgtacggctgcgagaagacgacagaaggggatttctgacgtttttatatcaagtggacatacgcctagacggaaggcatcaataaacttattttattttaacttaggacttgattgcgtcaaaccaaagctataattaggccctgttacacctgggttgcctattctgacaaaa

SEQ ID NO: 37106 - DNA, 1028 bp, Glycine max
  Clone ID: PAT_MRT3847_133508C.1
aattcggctcgagctcgagccgaatcggctcgaggaaagacctactgaagaatttactgatatcggtggtctcgaaaaacaaattgaagaacttagagaagctatcgttttgcctattgcccataaagataagttcaagagtcttggtattagacctcccaagggtgttttgatgcatggacctcctggtgtcggtaagactatgatggccagagcttgcgctgctcaaaccagtgctactttcttaaaattggctggacctcaacttgtccaaatgtttatcggtgatggtgctaaaattatcagagatgcctttgctcttgctaaagaaaaggctcctgctgtcatcttcattgatgaattggatgctatcggcacaaagagattcgattctgatacttcaggtgatagagaagtccaaagaactatgttggaacttctgaatcaattggatggtttctcatctgctgaagatataaagattattgctgctaccaatagacctgatatcttggatcccgctcttttgagatctggtcgtctcgatagaaagatcgaattccccttacctaatgaagaagctagatctcaaatcatgaaaattcattccagaaaaatgaatgtcagcaaaaaagatgtaaacttccaagaacttgctagatctactgatgaattcaatggtgctcaactcaaggctgtttgtgttgaagctggtatgagtgctttgagaagaggagctactttccttactcacgaagatttcttggaaggtattgctcaagtgcaagccaagaagaagaatgaacttgattacttcgcataagagtttataaataataatagtactaaaaccaataaatcaaagttcaacgagatttttacaagacaagaatctctacgggattttggttattatctattatataatatagaaggtttgttgtgcatatatcactaaacatttacaatatatgtacgctaatataaatatacttatcattttaaaaattcacctcttttcttttatg

SEQ ID NO: 37107 - DNA, 306 bp, Glycine max
  Clone ID: PAT_MRT3847_133509C.1
cggctgcgagaagacgacagaaggggtttttcagttttttctaactgtttaatttaacatgtgggtgcctacattttttggaattgggtgtaaacaattctgactgcctaatggttctggaatctttggatgcatactctggggtcttcggttttgatggtatacagatataaaaaaataaataacttttggaattaatagctactacaataggttggctttgggtactattatgggtattcaaagatctataattttaaaccccaatttcgacctgggtatttaaaacaccaggatcttcctttt

SEQ ID NO: 37108 - DNA, 342 bp, Glycine max
  Clone ID: PAT_MRT3847_13350C.1
atgaaaaaccacaggcatgacagcgggagcgagaaacaattaaattatcaagagacccattcaaagatcaccctaaaacaaaacgggggacgagacccaaaaaacgtcactaaaaaggtctggactcaaaaactgagctcagttcctgaaaaaacaggatcccctctttcatattgcacgcaaaagtcatcaaactgaggtgtgcacaataacttgcggggcccttagcttgggggttaaaggaaaaaacagaattgcactaacactttttgtaggaatgcttaaagacaagaccagctcccaacatatatctttataccaaagatgaaaggtcattactga

SEQ ID NO: 37109 - DNA, 478 bp, Glycine max
  Clone ID: PAT_MRT3847_133510C.1
gagagaactagtctcgagttttttttttttttttttgttttagttggtcaatctcctgttttagaataagtttagattctcgtatgttatattctttataatgtccattttgtagatagatgccgcattaaattcatacattaaaaagatataaaatacatgattttttactgtaagaaatgaaaatcgttaacattaaacattagataatttgtgtggttaatatcaaaagataaatatacatattttttttaatggtcatgtaatctcttattaacaattaatattgatcagttgattgtcaatatgattatatttttggggttaattaaattttaagtttctcaaattttttatattataatttttggtcctcaaaataattttgacaatttttagttttttttattaattttttgtcataatttttagctcctttaaaactttttttcatttttagtctttcatttatttttat

SEQ ID NO: 37110 - DNA, 306 bp, Glycine max
  Clone ID: PAT_MRT3847_133511C.1
cgagccaaaaaatcgagaaaagggggagggctaatgaatcgggaatgtagactgttgggtctaaaatatacttgaatggagattctggattagggagaagggaatgatgtgtgaaacgtttggaaggtggtaaaataaataaggtggaatgatatcagtaaaattggtcagaagattatttgcttaactttgacgatggatcatatggggatggtatgaatgggccaagttatgaatctgttaacaagaaggtgcatggaaaatgaaattggatgtgatccaccttcgggtcataatatttaatgg

SEQ ID NO: 37111 - DNA, 618 bp, Glycine max
  Clone ID: PAT_MRT3847_133512C.1
aggaaaaaaaattgcgaagcctggaaacgaagcgtttagatttagaagaacagaagatgcagcttcgtcgatcttgcttcttctttcatcattttgcatcgcgttagggtttgcagattttcaatttcccttcttttcgctacctttctcgcatagaatctcgcaattcctccgttgttccgtttccgcaactcatcaattcgaaagttattgcttcacaaggaggtagagcatgtaataaaggaaaaaaatggaggtcgaggtgccaatctcgcttgatttgaataatcaacttcagccagagactgtagtttcagttcaaaatggggatcctggtgtttcctcttctgttgcaaatgctgttaacccgcagcagccagctacaaaaaaaccgaccaggcagtgggctgcatggactcgacaagaggaggaaagtttcttcaccgcgttacgacaagttgggaagaattttgagaaaatcacttcccgtgtacaaagtaaaaacaaggatcaggtcaggcattattactaccgacttgtgagacggatgaacaaacttcttggtccaggattatgtttggatgccaaaaactctaaagatactaatgctgcaatgct

SEQ ID NO: 37112 - DNA, 405 bp, Glycine max
  unsure (1)..(405): unsure at all n locations
  Clone ID: PAT_MRT3847_133513C.1
tagaagacgacagaagggatgtatgagtgtccacatggatgtgtgtatgatcagttttgcataaatttctaatcgtcattgttatatgtgtgacatggaaatgatttggggcattcacttattcttgaaccgctcgctaaacaaatataccgacatgcgtcatgtccctccatccgtaggccttttgagccaaacctcaacattntgtccagaaccttgacctaggatgtaaattttcaaccttaccattggaagaaagaacagaaacgatttggggcattcacttttatttggaaggatcctcccaaataaaaggagcttcctttaccttgggttataaatgtgcatcaaaagaaaagaaagaaagtcaaccaatcaaagattggagaaaagaagaaaagaaaa

SEQ ID NO: 37113 - DNA, 138 bp, Glycine max
  Clone ID: PAT_MRT3847_133514C.1
tttggtctctctttagaaccaaacaactttaatacagggcaattgacctttcaaggggtgcatacagatcacgaaaacaaaaatcctttgtgtaactatataaaccactggacaaaaaaataggttgtgcttaaaaat

SEQ ID NO: 37114 - DNA, 1544 bp, Glycine max
  Clone ID: PAT_MRT3847_133515C.1
gtccggaattccactcaattcgaattcattctctcttttacaccacttcaacttctagtgaaatatctgatcaattaatggctcagtatttctttttgtttgttttggtgtttgccagccaactgatggctggattcaatgcaccgctaccgctaccatctccgtcatatggaaatcatacaaccattctcagcatagacggtggtggtatcaggggcattattcctgcgactgttcttgaatacttagacaaggctcttaaggctaaggatccaacaacatctttagcccattattttgatgtgatatcaggaactagtactggtggcctcatgactgctatgttagcagccccaaactcatctaatgccaatagtcctctctttactccctcggaagtcgtgcaattctacaagaactatggccctaaaatatttgaacctagagcttggtatgatcttgacaaatgtcccaaattcaatggagagttcttacatgatataactcgtcagatattgaaagaaacacgactgaataaaacattgacgaacgtggtaataccaactttcgacgagaggaaaaccaagccagttatattctcaaactataagctcaagacggaaacttacttaaatgccaaactctcagatatatgcatcgggacttcggctgcaccgacttatctaccgccgcaccaatttcagaatgacggtgttcaatttgatttggttgatggtgctatgtctgctaataatccagcgttggttgctgtgagcgaagtgatacaacacaatgagcataaagaaatcctgttgctgtcattaggaacaggaacaataaaagctgaggagaagttatctggcatctttgatggcttgtgtcaacttgagtggctagttagcagcactaacgtttttagtgaggctctatatagtacaaacatgatccactactatcttgccacagtgtttccaggtgttttgcctgcggataactatcttcgaattgaggagtataacctggatccatccatggaagaaatggataatgctgacaagaaaaacatggataatcttgtaaaggtaggaaaaaacctcttgctccaaaaagctttgaggatgaatgtgaatacttttgtcccagttgaactagaccaaacaaatgctgaagctcttgacaggttgtctgagaaattatatgcagagaggcagttgcgtctgaaaaggaaatctatggaaaaaggaggaagccgaattattgaatctgtcaaagtcccttctggccgaatgcatgcaacttaagcaatattgttattagacgtatttgaataaatgtcatgtatatgaccttatattatcctgtgtgttttatccatgtctgttgtaataaggttcattgcttttcgggttctatgtaactcctaattgggtggaccatatatggatcatgttacaagtttcaatgcttttgagttctatgtaactcctaattccaagctctattggaattaaatatcaatgtatccttgtttgttgcttttccat

SEQ ID NO: 37115 - DNA, 662 bp, Glycine max
  unsure (1)..(662): unsure at all n locations
  Clone ID: PAT_MRT3847_133516C.1
cccgcgtccgaacacgctcaaattcagtagcaatatgatttaaagcataccttgaaaccattccaagaagccttttgtataaggtttttttgaagacatgtctaacgacatgtgtacttgtttcaaaggatgctctaattttattgtgttgcagcgtcatcatgttgttcatggcatcccagacactacataagtctccaaggctattctgtaacactttttttaaatcccagtgagtagattcaaccctacatttcaaatacacaaataacaataaacatatacaacaataaaaatccatcaattcatcaacgttaatagaaataagtgaacagtttcatacctttttgttgttgtgttccctaagtgcatcaccttattcgtccacgcggtaacaaatttttccttgtgtgggattatccaagtatccttgacataatcaacaaacatttgccaaggtgaacaaaccatttcaaacctctttaggcactcatcaaactgctgctccgaaggacaatcaacaagagttccccagacactcatgacatattcccaagcattttttgaccaattaacgatttacatttggccttacattcttgnttatgtganagctgccaacaaatgtgtacactcaggaaatacagttttcactacattca

SEQ ID NO: 37116 - DNA, 119 bp, Glycine max
  Clone ID: PAT_MRT3847_133517C.1
gcaactccaactgtgacaacaacaatacactctgccacagtgtagagttagcgtacttagctgatgaatggtgaaggtacccttctggagttctcaccaacgaccacagttggccaaaa

SEQ ID NO: 37117 - DNA, 197 bp, Glycine max
  Clone ID: PAT_MRT3847_133518C.1
aatgttcttttattccttataacgtttttttctcgacactgagctaaacaagccgaaacagattggaactttacttcattctctctgaggaactgactaactgtgctaatgtaatccatacgttgatcatgggtgcaaaaattaacgttctatggattatatgtactttaataacgggcgggcccaatttagagatt

SEQ ID NO: 37118 - DNA, 1017 bp, Glycine max
  Clone ID: PAT_MRT3847_133519C.1
actagatggagtccatcttccagtgatcacatcaaggcatgatggcttgtttccctgtgcttttttttttttttttaaaaacacacagaccattttcttcgtgctcattcggtataaaaggggatttgataaattgccaagaaagcaattgtcttctgaacattcattcaatgacattgctagcgtaaatacgtaatattcgagatgggatacataatatttatacaattattttgctgtatatatcccaatgtggaaacctatacaaaatagttttattaacttggaaagtaatactcggctcgggaatttgctgttttgatgctgagtggcccttctttattgctttcatgcacggcaccgttcagaaggaggatatttcccctggcatcaccatctcgaggtggatctatgaagaacttcctgctgatttcaaggacaggcttcagactgtgtatttcgtccaccctggctttcggtcccggctagtcatcgctactcttggccgctttttcttgagtggaggattatattggaagatcaagtatgtaagccggcttcagtacctttgggatgacataaagaaaggagagattgagataccggattttgtgaaaagtcatgatgatattctggagaatagaccactcactgattatggcattgaacctgacccctttcacttgactgggatgccttcaactacctactcatttggaaagtacgaggagagatgggcgggaaggaattacgtgtcttagtatgtgtattgtcttattacatgatgaacccaaaccttttgtacagaatgactctagtattgtatttgtatttcctatactctcatctttgagtttctttgtttgttgagttaaacttgactgtgtacgaataggaggactacatgttttctatgccataagaaacttttatgtaagttgtgtgctgtgtactgcacgattaatcaccttcctgagagcttttgaaataagaaacatgcagcttgtttttactggc

SEQ ID NO: 37119 - DNA, 425 bp, Glycine max
  Clone ID: PAT_MRT3847_13351C.1
ctttttacatgtcccccacatcaaataatgtgttgtcagtcctttgtcgttagttctttctgtttctgacactgtgttaattgttgattaacaccacgtttttttgtttcgttagtcccagccagtcctttttttattagttaaacattgttatcatatcagattgttggtgtacaatattcatacaaaagtttcatcaggtaatcgtactcattaatgtacgtgaaaagtatgctcctttttccttttcaaatccttataaataagctcccttttgtttctctaggttggatgcaattgaaaggctttcacgatattttttattcctcttttaagaaggtgaaatattgttgattcatttccatttggttctaggagactttaatctgttgaaattggatgcttaagtccctctttttttgttg

SEQ ID NO: 37120 - DNA, 290 bp, Glycine max
  Clone ID: PAT_MRT3847_133520C.1
acgagaggaaaagggttacctttagtcgatttcagccatgaagtttaaaaattaaaattgtccaagttgattgttagttcatactatttcaaatccctggcaaagatgcctcatgacatgtactgatgtacaccatttaatgcatgatgtttttcttaataaatcgataagggaaataatccttttcgtttgtctgaaaaaaaaaaaaaaaaaaaaaaaaaaaaaaaaaaaaaaaaaaaaaaaaaaaaaaaaaaaaaaaaaaaaaaaaaaaaaaaaaaaaaaaaaaaaaa

SEQ ID NO: 37121 - DNA, 498 bp, Glycine max
  Clone ID: PAT_MRT3847_133521C.1
gagaacacataaaacatctttaaatagatatacaaggtatttacatcaagtacctacaaggaagaaccaacagaggatttagctctccatatttgggaagcttcctttacaacaaagagaagagaaaaatgaagtattgaagaaatacaagtagtggggatgtctcctccacctctagaacctcacaatcactcacaaactcatctcatgctctcaaaatgacttcctcttctcgctcagttctctgccagtctttctttctctaaaaatctctaaacatgcaaaagcttcaagaattgcccaaaatccttctccatttatgattttaggcttaaataggtggccttgttggtgcttgtgcgcttagcgcaactctagctcgcttagcgtgcattagtgaatttcggcttagcgcgcgtcttttcgctcagtggatgggcttaagcggtgtgcttagtggaattagcccttgctccgcgaacatgcacagctcatcct

SEQ ID NO: 37122 - DNA, 274 bp, Glycine max
  Clone ID: PAT_MRT3847_133522C.1
cgttgctggtgacagcaaaaatgacccaccaatggaagcagctggcttcactgctcaggtgattatcctgaaccatccaggccaaataagcgccggctatgcccctgtattggattgccacacggctcacattgcatgcaagtttgctgagctgaaggaaaagattgatcgccgttctggtaaaaagctggaagatggccctaaattcttgaagtctggtgatgctgccattgttgatatggttcctggcaagcccatgtgtgttgagagcttc

SEQ ID NO: 37123 - DNA, 167 bp, Glycine max
  Clone ID: PAT_MRT3847_133523C.1
gtttggaccaagccatccatcaccagggttttgttgataccttttccgcttttgggaatattctatctttgcagattgcgacagatgcttctggcgggtctaaatgccattgttttttgcaatttgagagggaaaaatctgcacaaaatgcaattgacaaggttaat

SEQ ID NO: 37124 - DNA, 214 bp, Glycine max
  Clone ID: PAT_MRT3847_133524C.1
cactctttgaattaacatttccgcgcagcgcgaccactcattgccatggctatctctacttccccggagtccggcgaactgccgtgcaccacggagcaaaccatacaatataaccgggtaagagtactatcagttcttgcgatggccaggctggactgttcgctattcaacaccgctgctcctacgaggtgcgcttcatggttcactcaattac

SEQ ID NO: 37125 - DNA, 462 bp, Glycine max
  unsure (1)..(462): unsure at all n locations
  Clone ID: PAT_MRT3847_133525C.1
aattcggctcgagagaaaacctctccttttactcacaaaatactcttttctctctcattcttacctccgtgacgaggcaaccatagggctatcaatgaggtgtctctaaggcaantaacacacaactctattcatccccacctacctacacatccatttatacgtagagattaacttcacaacaaatcctaagactcaaccattataaaacatcatcatctctagtcattctctcacattgttacttcttcaaaacaaccacaccaacaacattgtttattattacacacactatcacatatttcactctctcaacaaccgcatcaaacccttcctctacttcgttctcacaggaaaaaggtcaacttattcctttccaaaccccattcttaatctcaaggatgcccttaccgtttaataacaagtccaacaacaaccctattgctttaattgacaactatc

SEQ ID NO: 37126 - DNA, 197 bp, Glycine max
  unsure (1)..(197): unsure at all n locations
  Clone ID: PAT_MRT3847_133526C.1
tcganntanctanananagtgtgatganaatganggtccttgttttcntcgttgccacaatttncgtagcatgncnntgccatgcgtacgatatgttccctctccgaatgaacactggntatggtgcccgnactccggangtgaaatgcgcaagtnggaggcttgntgtggaagcanacaacatntttggctttgag

SEQ ID NO: 37127 - DNA, 943 bp, Glycine max
  Clone ID: PAT_MRT3847_133527C.1
agggtgcacttgggatctcatcgtgctgcgtccgtttttttttttttttttttttttttttttttttctaggaacttgaacattgtgttaagactgatatggtacggcaaaattccaagggatagtatgattacagtaagactaatgttctcctttaacaacttgtgaaataaaaaactcatgctagagaaggcttttacggtctatcttaaagctgaaaccatgaaaaacaaagggaaccgacagcaccgtcattaaatagtggatgtcatgcaaatctacaactcgtccttggcatcatcaacatcaccatcatgaaccgcatcagcttcaggctttgaatcactttcagcctctacttcggtgtcatcttcctcctcaactgttgcttcaggactgatgtccaagcttacccaggaggaccttttttcaacccccttggctttggtaaggatgagaagtccttgaagaatttgaagctcaaggaagtgaagaatggaaggttggctatgttggcaatcttgggttactttgttcaagctcttgtcacaggtgttggcccataccaaaacctcctagatcatttggctgaccccgtgcacaacaacatcttgaccagtctcaagttcccctgaatgtattatatcatattctttccccccttggtcttgggttttgttcgcttccccgtttccaaagctcacccccccttttaaatcccctctttgctctttggggctctcccctcatatggacattttgttccttggggggcccctgtaagaattgccctgttaaacccctagaacccttcgccctctttatctttttgctcggtagattacccggcccccatttttttttttaaaaaaaaaaaaaaaaaaaaaaaaaaaaaaaaaaaaaaaaaaaaaaaaaaaaaaaaaaaaaaaaaaaaaggggcggt

SEQ ID NO: 37128 - DNA, 438 bp, Glycine max
  Clone ID: PAT_MRT3847_133528C.1
aataaaaaaacaacttcagttcatttaaaagtttatttgctgttcaaacctttttttttggggggaaaaacaattgcaagaaggggcatttccctccccccgggaagatccaccgtttccttagttttttcaaatttggggggaaaattaatgaagggcaatagaggctgttccgtattctaggcaaactttttttaataaacatttttatttggaaattcatttttttaatttttttgggaatttgattccaagcaatacctaacggttggttttgaatttaattccaagtatttcctagggggaatggccttttttgtccctgatagcaagtattttttaagggcttcacggtattcggcggggtcgcccccccaagttggggtatccaaaatggccttttccaaccaaaactcattttcctttttttggtgggcc

SEQ ID NO: 37129 - DNA, 248 bp, Glycine max
  Clone ID: PAT_MRT3847_133529C.1
tcgttggatctggggctggcgatggggctgacacgacgtcgatacaatgaaccagtggagataaggcttacagcaagataaaagctgttcttgtaaaaagcgtagctacatggataagtcaaggatgatgcaagggtgagattgtatctcgtctcacaatcttctatataccttagaagcgctggtttagaattctctccatggagcctaattttgaggctcttcagaagactgaaaattatgggcgg

SEQ ID NO: 37130 - DNA, 754 bp, Glycine max
  Clone ID: PAT_MRT3847_13352C.1
gcacgagggactttcttttttctttttcagatcaaatttcgtcggcaccacccaccgccacgccgacgaccttcattcgctgtcggcaacacatcccttctgctgcgtcttcgtcgtctctgaccactcctccctggtcaagcttcgccgacctcatctagcccctctccccgtcgccatagcgagatccgtcgtgagatccagtccgtttctctctatcatttttctgattttttttccagatctgagattagctcctcccagatctgagattcgttcctcccttggtgtcctccttttccgcctcgtcctcgtcggtaactccattgacgtcgtcactgcgagatctagacccgctcctcgctgccgcctccacacgattgcttcaggaaccgctttccctttatttgttgtggaggtatttggctgcctttgggtcttggctgccgaggcgagtgtggtcgtgggttggggagtttgtttgtattctgttggcgtagacgcatttcttggtggtaaacaaaggtagaatccagttgagcagagaagagcctggtggtggtggccggtagggaccggagatgattgatgaattaaaaaaaaacagaaattaaacaaaaaatggggatgagttcacataataaaacaaaaaaatatatcaaaaaatttggttatgttctttttgcttagaatcatgaaaattgagttgtaggatgactagaaaataataagtcaaattgagtaataaaaaaaa

SEQ ID NO: 37131 - DNA, 370 bp, Glycine max
  unsure (1)..(370): unsure at all n locations
  Clone ID: PAT_MRT3847_133530C.1
tccggcggagaagaagccgaaggccaaaaagaagcttccgaaggaaggaagagccggcggagaaagggggaagaagaaaaagaagaacaagaagagcgtggagacgtacaaaatatacatatgcaaagtactaaagcaagtccaccctaacattaatatctcaagcaaagccatgggaatcataaacagcttcatcaacaacatcttcgaaaancttactcaagaatcttgcagacttgcccactacaacaagaancccaccatcacttcaaaggaaatccaaaccacgatcaagcttatgcttcccggtaaattaaccaagcacnccatgtctaaggataccgaaaccatcaccaagtggaccagctca

SEQ ID NO: 37132 - DNA, 367 bp, Glycine max
  unsure (1)..(367): unsure at all n locations
  Clone ID: PAT_MRT3847_133531C.1
aaaatgaacaaggcggattgcaagaccttgactcggcaatgcacgttcccaacttttgataattttcgcactttgaatgcctataagtacatacttgagcataacacctgggaaggacccggcatagctgagaactaaggggtgatttattgcctaattgtagtatcactggcactttgtctcgtatactaataaatgatgaagtgagaaaaacagatatgcacgatggtgtcattgcggctatggacttaagagcttggacttatcgatagctaatagaaagaaaaaatatatattatatcgtgcttggccgatnctttgccaaatgaagcatccgttggggttgatccctggtgcatatcaattg

SEQ ID NO: 37133 - DNA, 402 bp, Glycine max
  Clone ID: PAT_MRT3847_133532C.1
agaaacgaataatatgctctataatttgttacatgaatttgtattaattcaatttctacaaaacttggcagccaaccagtttgaatatatacgacataataacctttaggagatataaggttggcttaatggttaaaaaggggcttaatgggggagggagaggttgcaggttcaaattcttaccaccatattcctacaaaactaacaaactaatatttgccgataaaaaaaaaacgacataataacctctgccaaactggaaggattaaagattgcctaactttcatggtgtgtatgcgtattacatcattgacgcaacatctgttgtagctgcagcacttgatttctttgttctggaggcaggagatttatctgctctggtgtgaggctcatgacctgctg

SEQ ID NO: 37134 - DNA, 1330 bp, Glycine max
  Clone ID: PAT_MRT3847_133533C.1
tacggctgcgagaagacgacagaagggtccggctgcgagtagacgacagaaggggattttggttgggggtttgtttcaccgaggataggacagtgaggactgagaactactacaatactcaaacgctgttgaagcgaccgacgagtcttgtgtgtgacctcaaaaccctgccgtctatatccgctgttgcagcgaccgacgagtcttgtgtgtgacctcaaatccctcccttgagtcaccgtctgcgctgccgccaatgagagtgttcagagcgcagttgagtctccatcttctactcagtatgaagctagtcaggtttctgatgaagttgaccaatcaaaccgtgtgaattgagttcaagaatggaacaattgttcatggcaccattacagatgttgatatcagtatgaacacacatttgaaaacagtttaactaacgtctgaaagggaaaaatccagtaactctaagatcatctcagtgtgaggggtgaaaaacatccgttacttatattcttcctgacaggcttgaatcttgagactttactggttgaagaggctcaccgaagatcaaacccaagaagccaactgctgggaagcttttaggatcaggacgaagaagcggacgtggtcggaagcgtgtgcgtggtggggggcgttgatgagctggtctcttcattgttgtggggtgttgttgtaagctatacagcaagaatttcttggtgttgttagtatcttctacggagcatattttttattcctgctattttcttgcaagagcttatcatgctttatgtacaaccatcttccttctgaaactgatgtaacatgaatttcctatctgctattgccttatactagttgttaatggggatctattcattgagcagtatgccaaataaacaaagactttggttatacataacacagtaaataggcccaagagttgcctaatgagtttgaaatagatgatggatttcctgatggcacatatggcctttgggaagagggcgggggcgaggacgtggacgcggccgtggtcgtgggcgttaagttgcacatcacaaaatttgtggcatttgcttgtacctttattgtagggaatttttcggagagaagttttaaagacgttgcaggagtgctgttgttagttagtcatgcagactttgttcatgttgccattttcttgcatcaataatttgaagttctcgtgtataattccttcctgttggataattgccatatctctcaagtctccactgaaagaaactgccctatgtatgtgtagtttctcaaggtgttaattgaagagtatttttacatatattggcct

SEQ ID NO: 37135 - DNA, 241 bp, Glycine max
  unsure (1)..(241): unsure at all n locations
  Clone ID: PAT_MRT3847_133534C.1
tttgtgtttattttttttttttttttttttgcaagcctagagggacgacccattcattcccattgcaagttggaggtttctgacgttaacaagtgttccggaacaaataattgattgtaatatgaagtatgaacaatagaatggaacaaaaccctccaggggagggttgntnnnnaaaccacactttcttgcatgaataatccattcctatcccgggttctgtgggcttctaatattcgta

SEQ ID NO: 37136 - DNA, 410 bp, Glycine max
  Clone ID: PAT_MRT3847_133535C.1
cgttccaaggaaggtttcccgtcatcactgtatgacgtcctcctgtctttgggggggggggggggggggggggggggggggggggggggggggggggggggggggggaaaataaatgggccataattggttaaggggcctggggcaaagttgtcggggcaaaaagcccaatttgggccgccgtgccaagggcgaaaaaaaaagcccaaaccggaaattttcctaaaccaagttttaaattaaatggtagggggtaaacaggggataaagcgacccgaaaactaccctggggggttacctttgggggatgatatatccccttaggtcgtttaacccaaaaactttcccccaaaaggaggggtaacgagccctgatggcccaagcccaggtaacctgtcccaacgggccccc

SEQ ID NO: 37137 - DNA, 422 bp, Glycine max
  unsure (1)..(422): unsure at all n locations
  Clone ID: PAT_MRT3847_133536C.1
cggggtgtgtctttggtgccacgttgacaagcataagcaatgtgggtgcatatgggctcaatcctgctatttcgagttctctgcttttgggcaccattgctcagtccatttcacagcacactgtgtggactcaaatggtaacagtgagaacaccattgaattttgattctagcaagcacaccttttgtgaattttctattgaccttctccggggaggaatcttagtggacaaaactggagattggatcacacttatacaaaattctccaattaggaacttgctaagagttgctgcttggacaaaaggctntttaatggtcaagattgagatggctgggaatgccacacttcaaaggagtgattggccctaattggtacaagtggttttaacatacagccacagtacctagcattttgatgca

SEQ ID NO: 37138 - DNA, 511 bp, Glycine max
  Clone ID: PAT_MRT3847_133537C.1
gtgctgctctctgcggttccttaaatttgcaacaacaagcaaaactcacactcgaagcgtttctcgcatcgcttcttgagaataatggaaacttctaagaagaaagcgattacgatgaagaagagtttcgatccctgggcttttctggagcatattgaagcacctatgtgggtggatttgactcttgaagttaaatctggatgtgtagacacaggtgatgatgaatggttcaacacaagtcacccgttccaccagatgtctgctagagagttaaaatctaggttttctcacggcgaggagatattgacatcaggggttgattcgccagagcttccttcttcggtctcgagatctagaggcaaacactacaacaacaagaagtgggaaggtattgatctgaatagtttgttagataaacagaagggtttaagtaggagaggtttccaacaaggttccagctttggccaggaagtgaaacccaaaccaaattcaaatgttaacaagccaaaag

SEQ ID NO: 37139 - DNA, 596 bp, Glycine max
  Clone ID: PAT_MRT3847_133538C.1
taaaaatagccatgagccgagcacctccaaaaacctaaccataaaaattcatgcattacttaacaccttataacagtacacattgcacactttgacagagtttccttctttagtcatctcaaaacctcttaaatagcatatgacatgagaaagtggtcagaactaagtctagaacaatacaacatctcgagccgctcgagcggctcgagcggctcgagaatgactagctgcatgaatatagaagagctggagaagggtaaaacatcaggagacagttatcacgatttaggctgattttggtggtaatcttattaaatatttcagtacaaatgaagacttaaacttagttaacaaaatggaggttattcttgtttggagaatagttacggaagtggaaataagatttacgctaactgactgtaagtctttacgttagttgtgcctaattaatttttttgtatgattatgtctattaatgacaagaagttgtttgcatcattacgaagctgaaagccctaggattgtattatagatgtgttaattttacgtgctttaatgtccacttcagcatccactcagttcagtcggggatgatg

SEQ ID NO: 37140 - DNA, 267 bp, Glycine max
  Clone ID: PAT_MRT3847_133539C.1
aaaaaaccctgaaaatagtgatgtcggagagtggtaggggacaccacggcgccaccgccgagactggcagaagggaacagttcatgacggagaatgttgccggagactcgtcgtcgtcattgtcatggagactcaacgtgaaggagtttcagttgccacgcttaagtcatagccatgatcatcatcatcaacacctccctagttacttcactttccgtgaccttctacggaaaccaaagaagcaacgcaaggttgcagaatactaca

SEQ ID NO: 37141 - DNA, 307 bp, Glycine max
  unsure (1)..(307): unsure at all n locations
  Clone ID: PAT_MRT3847_13353C.1
ggattntgaaagggttntnaaagatntnanntttggnntagatnagaatggtgttgatttnaaaaaagttgatggtnatgtgnannagttaaagggtagnagtttaaggataggggngnaaagggtgaaaaatggntggattggtttnngnaanttttgtgaggagnagaananagatgggtggntnagatgtttgtaaaaagtgaaaaaagagtaatggatagtnaagaataagtttgaaaaaatgtttaggtttgagnaagagattgtggnagntggtggatnaatnnntaaggaaatgagtttt

SEQ ID NO: 37142 - DNA, 513 bp, Glycine max
  unsure (1)..(513): unsure at all n locations
  Clone ID: PAT_MRT3847_133540C.1
tccaggaaggtttcccgtcatcactgtatgacgtcctccttctttgggggggggggggggggcgtgttggtagaaggtatagccggcggtagggaggttaaaaggaaaagtagaaggaacgaccccattaaatacaaaccaaaacaaaccaaacctgagagagtgactgaagggcaaacgaacgggaagtagtaataagggttgtacgcgtgctacacgtgaaaagaacgtgccccggtggtttggttaatggtatatcggttagtaaggctaggcggttgttttaatgttggtaatgttaaacgacattcttggtcgtttgcgagagtagtagtcttttaaatcgctcatttagttggccccanttagtaagggtgcttattgttaggttccgcataagtagcttccctataagtgtttgcgcacttgtataagctagttgtctactaggtagagttaacttggtaggttacaatctgagtaagtagcgttagatgtgggaattgcggaatt

SEQ ID NO: 37143 - DNA, 466 bp, Glycine max
  Clone ID: PAT_MRT3847_133541C.1
gtgcatcaccccaaaagggatgtgggacattatagtgaagcataagagtacgagttgggtcaactaaatgaagatttttcctttcagcaacacgattttgttgtggtgtttgggcacataaggtctcatgaagaattccttgcgaggttagaaaagaacgaaattgggaggacaaatattcatgggcattattagtgcgcaaagtcttaatggaaacaacaaattgattttgaaattcatgtgcaaaatcttgaaaaatgaaaaacacaccagaacgtcttttcattaagaaaacccaatacatttgaaaaaatcatcaataaaggtaacaaaatagaaataacccaaggttgaatagacacgactaggaccccaaatataggagtgaactaaagcaaaaggtgacacaacacatttattgacatgatgactatcagtatgacggacatgtttgcctaattgacac

SEQ ID NO: 37144 - DNA, 306 bp, Glycine max
  Clone ID: PAT_MRT3847_133542C.1
ctcgagccgtgcccttctgttcttagctctaggcctaattgcaaacccgggtttgtctctccttgcaactcaaaaagcaccattgagcttgtaaaagctgatgatagactcaattactttgcacttgggtttgttccaccctcttcaaagactgatttgattggttgcaaaacctcttgcagtgcatattgctcatgccttgctatgttcttcaacagcagttcagggaactgttttcttgttgacaggattggaagcctgtatgaatcttgaaaagattttgttttttttttctaaattaaggtg

SEQ ID NO: 37145 - DNA, 458 bp, Glycine max
  unsure (1)..(458): unsure at all n locations
  Clone ID: PAT_MRT3847_133543C.1
ttgatgcgtgggtagatggtcatagaccgtgatggggttctttgattctttctattcgcttgctcaatcatgtgaattctttaatttctctttctgggatcaaggtccctgcaaaaaaagaaaaaaaatgtaagacttttggatcaggggtcatcgggtatgttgagcttaggtgaatatacccgaattctgttgattttgtttaggttacttacttcgttgtatgtgcttagtttagcggcttatttatgatgatcccacttgtttgttagcgacagtaagggaatctctctttgttcatttaaatttgaatttcttgaaggagattgatgtgtgtggggaggattttntttnggttgttngtatctatnaggggaacattgttgctgtcaacacgtgttgcagatcaaatcctccttggagatgttcgcaattttgcattagatttgaaattggga

SEQ ID NO: 37146 - DNA, 431 bp, Glycine max
  Clone ID: PAT_MRT3847_133544C.1
ccactcttccgcccacgcgtccgcccacgcgtcctcccacgcgtccgggaacacttttaaattacagggactaaaaaagaattaaaatgtaaagtataaggactaaaaataccactttcaaactataagaactcaaaaagtaagaattatgaaactatagggaccaaatgagtaatttaacctaaattaattttgtacctgcacaattttcaatggctacagttccctttccttcaaggatgataagatcaccattgtcaattctaacttttgatacatatgatttgtccaattctctgaaaacctcttgatcgtgggtcatgtggttggtacaaccactatccattagccaacatccccttgagctgctgcttgtaaaatatgttgctacaaacaattgctcttcttcttgttgatctgcaaccaccttt

SEQ ID NO: 37147 - DNA, 314 bp, Glycine max
  Clone ID: PAT_MRT3847_133545C.1
cttaactattaacacttccttagttcaatatgtagaagccctgcactctctgtcttaggtacatttgcttgctactcgcgtctagtgcatgctctactattagctccagcaagctcaacgggcgccatctcaacaacctcaacgcgttggaacccgaccaccgcgatgagtccaaaggtggtgggactcaaacatggaactctcaacaccctgagccgaaatgcgccagtgtcactgttatcaaactcaccctcatccgaagtggcctacacttgccatcttactcacctcatacccggatgaccatcatcccc

SEQ ID NO: 37148 - DNA, 1066 bp, Glycine max
  Clone ID: PAT_MRT3847_133546C.1
ctaaccaaccaggtaagaaaatttctgtaatcctagattacatcattttgaaaatcggatcctctctcaactttttctttctcacttgcaaatatttaaactaaattctttcttgcacgatttgtgacagtttttgttttcattttcttgcactgttgccacagatctagtttcaattcgatgccataaattctctctctatgccgagacgatttgaatcttcgttccaaaattgtcatttttttacaaccctatttccctcaatatcctatcttctatctaccaaagtatcatctcgaacaggatctatctgccattgtttcgaacaagattgttttgaataagtttgccttaaaccagaaaaaaaaagactgtcttctcttctccaattcctcagctgtgttcggacactcctaggtagctgtcggtttccgcgaaccaccctttcctcaaaattttccgaaacctgcatctccgcggaggtacagaacaaaagacagaactctgaggtcaaaatctggttagggttttgcctcgtttgcgtcaatggatttcgctcgggacggcaacgtggtgcaaataatcaccggcggtggaggcggaggcggaggcggagagagctggtccggcgaccaagccgattgggcgacggaggacgagtaccggttctggaacaacaacaacagcggtggggactcagaaacgacgccgtcgaactcgaattacgaggggcggtcgtcggagccgccgagcaaaaagtcgcggaattcctcgcaggaagggagctcctcgaaccggtcgaaggcgatcgggaagatgttcttcaagacgaagctgagctgcggcgcccgccgcccaattggcaggagatcgtggcggcccacgaggaggagaaggcggtgatgatcgagccgccgagggaggagtttcagattcccacagtggggtctaccaccttctcaggggaaatgatgcagaggtcctacaaggggaggcatttgtagaagttttacacggagggaagggtgcccctatggagatagttgcccctttctttacgatgagc

SEQ ID NO: 37149 - DNA, 148 bp, Glycine max
  Clone ID: PAT_MRT3847_133547C.1
cattgggaagactataactactgacacagtagatcgggctactgctgaacatgcagttgatcctagaactcgtatggttgcatataagcatgctggacagaggtgtcgttcatgatatcattggatgcatctcagctggaaaggaagc

SEQ ID NO: 37150 - DNA, 736 bp, Glycine max
  Clone ID: PAT_MRT3847_133548C.1
accaaagacggcgatagtcacgatggcttggacccacgcgtccgcccacacttccgtacggctgcgagaagacgacagagggggaaccattattccatttcattccttctcgatggctactactcaaggacaagtcattacatgcaaagccgcggtggcctgggaacccaacaagccattgtccatcgaggacgttcaggtggcgccgccgcagaatggagaggtccgtatccaaattctctacactgctctctgtcacaccgatgcttacacttggagcggcaaggatccagaaggtcttttcccatgtatacttggtcatgaggctgcggggattgtggaaagtgtaggagaaggagttactgcagttcagccaggtgatcatgtcatcccttgttaccaggctgagtgtggagagtgcaagttttgcaaatcaggcaaaaccaatctgtgtggcaaagttcgagccgccactggagtaggggtcatgctgagtgaccgcaagagtcgtttctctgttaatggaaaacccctctatcattttatgggaacctccacatttagtcaatacactgtcgttcatgatgttagtgtagctaagatcgatccacaagctcctttggacaaagtttgcctccttggatgtgggggttcaactggcccttggagctgtctggaacacaacaaaaggggaaccccggtcaattggtggctttttttggccttggaactgtgg

SEQ ID NO: 37151 - DNA, 844 bp, Glycine max
  Clone ID: PAT_MRT3847_133549C.1
ggccccctgaaattctttgtaccctcccccgcccgttcatgactgtacaatcaatatcactgttcttagtttcgcggaaaagattaaaaactacagatacgcaactcattcctgtgctgtacatatatgaaaattacttatggagtttaaactttttcctttttttttgtgtcatgagcatagcttgggcaaagattttgctctgctatgccctgaggctcttccttttgtgaacgactgcacaatcaatatcactgttctcggtttctcggaaaagattaaaaactacagacacacaactcattcctgtgctgtacatatatgaaaattacaaatggaaaataaacaaaatccaaaaaataaagtgtcatgagcatagcttgggcaaagattttgcataactatggcctgatgcttttgattttgtgatctttgccatttggatttgcattttcctacagaatttctctaattccatgaccctccactgcattccttgtaaatcgtgcttcgagtttctcattgtctgtagaaatatcaaaattgctagaatacaacacaacttgttcactggttttgtttttctttcccttttgagcagcaccactggagttgcaaggtgaatcatcgcaagatacatgtccatgacatggtagagagcatcttaagaatctcttgcagaatcgggaattgctgtggcaagagccaagaactttgaagttttcaaacaaggatcaggggctatttctgctatatacaaatctattaagctagcaactttccgaatgggagtggctagaccttttcctcgccgcaagaatgccttcaaaaatctcaaaataag

SEQ ID NO: 37152 - DNA, 114 bp, Glycine max
  Clone ID: PAT_MRT3847_13354C.1
gtattactagtcatcgactagatatccgaagcagtgctgtttatagacctttctgtggaacaaacagtgggggctccctaaaaagatggaggcgccctgtgcttctatggaaca

SEQ ID NO: 37153 - DNA, 1703 bp, Glycine max
  Clone ID: PAT_MRT3847_133550C.1
ccacgcgtccggattattttcgctcgtagtttcccagttccacagcgttccgcgaaacaaaccagagaccaagaaagagtgcttacctgaaattgaattcaatggcgacgagaaatcgaacaatagaatttagaaaacacagagacgccgtgaagagcgtgcgcgctcctctatcctcctcggcatctgcctccaccggccccgtcatcgaaatggttaccacttcgcttcttcctcccaatcgatcctcctcctatgctcttctaagcacacaggaacctgctccatccacttctagggatgcgtttactgtggggttgccgccatcttgggtggatgattctgaagaaatagctacgaacatacaacgtgctagggttaaaatttctgagttaaccaaagctcatgcgaaggctttgatgccatcctttggggatggcaaagaggatcagcgtcatattgagactctcacccaggaaattacgtctctcctcagaaagtctgaagtgaggctcagaagactttctgctgctgctggatcttctgaggattctaatgttaggaaaaatgtgcagcgttcccttgctacagatcttcagaacctgtcaatggatctccggcgaaaacagtcagcatatttgaaacgtttgcagcagcaacagcagggttatgatgggattgacttggagatgagctttactgggagcaaatttggatcgcaaaatgatgaattcagtgatgtgggttttagtgaagagcaaatgacaaagctaaagagaagtgagcagttctcagaggaaagggaaagagagattgaacaggttgtcaaatcagtccatgagcttgctcaaatcatgaaggatctctctgtccttgtgatagaccagggaacaattgtggatagaattgactacaacattcagagtgtttctacatccgttgaagagggtcttaagcagttgcaaaaggcagagagaacacagaaaaaaggagggatggttatgtgtgcaacaacacttgttataatgtgctttgtcatgctagttctcttgatactcaaggagattctcttctagtcattactttactgagcactttactggccggcatcatgttgattcttccgttcgatgtgaatcaaattgtattctgtataaagaagactagtatcattggcactatgataatgcacttcaggtatggggatttgcttttgaagttcctttggctaaaatgattggctccttattgagaggcaaattggggatggcactgtacagcatcccttcgtgcaaacattggtattagttttaacaaatcctgtaaagaggggattttcagaaagttcatctcgcactggccaattttttaagaaaaaaaagaaagtagtgtagacttaatttcgtgttcaaagatagatcctgtataaagacgaagacgaagtagaagggcaacttgttgtatacatcccaagagtcatcaaacatgttgatattttgtaaaactgttttttctttttctatttacccctttacatgaaagcacgttttctaccattgtttatattccgctactaggagagaaaaaaaaaaatcaaagttatagtgtgattcagccttattttcagctagcattgatgaggtttatcttttatcagaggattttactgcaacaaagttgaccattgattttattcatggtgc

SEQ ID NO: 37154 - DNA, 464 bp, Glycine max
  Clone ID: PAT_MRT3847_133551C.1
acggctgcgagaagacgacagaaggggaagagactcgaggtaatattcataatccactctaaacgacttgttcttctaagccacaatattggtttaagaaatttcagttcatatgatgattttagttaacatctgtcttaatttagtcaaataattagttaggtttgattacttttttatcttttaatacattttttaggtttagtttaatttttcattatttcaaggtttaattaggtctttattttaatagtttaattaaatcttttacttttaaaatgttgaattaaatcttttatttttaaaatggatttaatatagtctcatttttttttaattttttccaatttttttaaaagataggaccaaaattgataattttaaatgaaactaaaattaaattcatttaaagaaattagagacttaattggactttaaaaaaattaaaaaatctatttattttt

SEQ ID NO: 37155 - DNA, 132 bp, Glycine max
  Clone ID: PAT_MRT3847_133552C.1
ctatgatcatagatgtgaaatcttgttaccgacaattggccttaaatagactgcgatgatcctgagacagttgtgaatcgtatcacaagctggattgactctgtcagagtccatggcgcctcggctgtcaag

SEQ ID NO: 37156 - DNA, 157 bp, Glycine max
  Clone ID: PAT_MRT3847_133553C.1
aggcaaggggataacgaaagggggaaattagggtatggtcaaattgtgttacatcttgtcttgcgcagttcctcggtctgtcgtttatgtatacaaacaataccggatttcagcaaggcaacaaatttaataaggcaaggtggaaaagcaagacatt

SEQ ID NO: 37157 - DNA, 811 bp, Glycine max
  Clone ID: PAT_MRT3847_133554C.1
atctaacccaggcgttttctgggttgccaaggagtaccaatttcatacagcatagcagtcaattgggttggaaattcaataagagagggaagccaataatcatagatccggggctttatagccttaataaatcagaaatttggtgggttattaagcaaaggagtcttccaacatcttttaagctctacacaggttcagcttggacaatactatcaagatcttttgcagaatattgcatagtggggtgggaaaatttgccaaggaccctcctcctctactacaccaactttgtgtcatccccagaaggatatttccaaacagttatatgcaactctgaagactacaagaacacaactgttaaccatgatcttcactacattacttgggacaaccctccaaaacaacaccctaggtctctagggcttaaggattataggagaatggttcttactagccgcccgtttgccagaaaattcaagagaaatgatccagttcttgataaaattgatagagaacttctgaagaggtatcatgggaaattttcctatggaggatggtgctctcagggtggaaaacacaaagcatgctcaggtttgcgaactgagaattatggtgtgcttaagcctggtccatcctcaagaagactgaaaaatctgctaacaaaacttctctctgataaattttttcgcaaacaacagtgcaggtaataaccatttgcatttctccatattgaattggtcactcgtaaagactctactgaaattttggttataatacaataaacgatctttttttttttcttcttcttttc

SEQ ID NO: 37158 - DNA, 170 bp, Glycine max
  Clone ID: PAT_MRT3847_133555C.1
cgtggcctccctcgttctctcccttttgatatccaatttcatcattatttgtcggtaagccctaacaatctatgtgttgttcttcgccggagcctagaggggctcgggtttcgtttctaatcccctattttattccccttcgtattttctcgattttatcttgttctttc

SEQ ID NO: 37159 - DNA, 443 bp, Glycine max
  Clone ID: PAT_MRT3847_133556C.1
aagagctatctcgtaatatgcacgcagtctttatctctggattcgattacagctatgacactcggctgaaagctctcacatcgggttgactgaactattatgatccacacctcgagaccggtgatcttaatatcaacaaccaataccccatctctgacctgactcttcaacttttgcaaatgaaaaccgctctttccacaaaggatatacatatccttgtgccacatcataagcctttcaatacagacgcaattcctaataaaaggacctacaccatctcctctttatactggtgtgagactcgcgaggcacacaattcgaagagaggatatgagacttttgtgttgaactcccgagatcccccatctaattattacgcgtatgctagctaatccgctttagccaaacaagattaaactgtatgcacacgataaaaagccttc

SEQ ID NO: 37160 - DNA, 365 bp, Glycine max
  Clone ID: PAT_MRT3847_133557C.1
tctcacgcgcccggccttgcgtcccgacgggcgggaagaggaccccagggggggtgaccaacaaagtccggctctgtcaatccggaagcgggaaccgggccacgacccaaccgaggacgaatggaaacctgacggcacggatcagggctgagccaactgggtgggagaacctcagggcaaagagagcgacctggggagtccgaattagacgagcaaagaccgaccgccttcgagcctgaagatgatgcaaacgctgaggactcaggaacgggctggaaagacatggcacgaacacgacgccaatgtctaagggggaaaaccaagacggggccgcaaactgtgatgaaatccttgcaaattcagat

SEQ ID NO: 37161 - DNA, 608 bp, Glycine max
  Clone ID: PAT_MRT3847_133558C.1
ggctggaatcttggccttcacaaagcttactccttatactgctgtcagtgctatccgtcctctgtctattatcattggggccaccatggtgaaagaaggtattgaagattggcaccggaaaaaacgggatattgaggtgaacaatagaagagttatattgcttaaagctgatggcaattttgaatatactgaatggaagaatctgagagtggggaatatagtgaaagttgagaaggatgagttcttcccagctgacctcctgttactttcatccagttatgaggatggagtttgctatgttgagaccatgaacttggatggtgagacaaatttaaagttaaaacaagggttagaggtaacttcttccttacaggaggatctcaacttcctaaagtttaaagctacagtcaaatgtgaagatccaaatgcaaatttgtactcatttgttgggagcatggagtttgaagagaaaaattatgccctttttcatcagcaacttattctccgagactttaaactttgtaatacatactacatttttggagcagtcattttcactgttcatgacacttatggtaatcaaaattatactgacccaccttaaaaag

SEQ ID NO: 37162 - DNA, 363 bp, Glycine max
  Clone ID: PAT_MRT3847_133559C.1
gtgcgattatacttctttaccgtataggtttttgagtttactattttacggggatttataaaagtattttttttggatattgaatatttggcaaaattcttttgggtaatcacaaattttaaggtgccttttggggccaggaaatatctatatatcttaagattattatctttttatctaacctatgtaaaaataatttccaaaaaatatttagggacctttattaggggaaaaatttaaaaattgtccatgaaatggtttttgtgtaaaaagataataaaatagggtctttttaattttcattgtttttaataggtggttttttaaggttgggggttacataatggttttgtgtatctttat

SEQ ID NO: 37163 - DNA, 194 bp, Glycine max
  Clone ID: PAT_MRT3847_13355C.1
gtcgagctgaatgagcctcgagacctattgaagagatacctgtatctagaatcagttaatgccgcgaacaggaacttgattttagtcgagatgctgcaacatgacacatgctatgaacgattctggagcttcactatttgaaagcgtatatgagagggtgaaacacattatattcattccataacgtgaggagc

SEQ ID NO: 37164 - DNA, 143 bp, Glycine max
  Clone ID: PAT_MRT3847_133560C.1
tttttattttgaactgctttgtgatgcatatcgctagtgttgaattacgcttatacgttaatttaaattatgccgtttgcaatcacaattattgaaagtcagattcatgatcagggataaatgattagtgagagcatgtgttt

SEQ ID NO: 37165 - DNA, 646 bp, Glycine max
  unsure (1)..(646): unsure at all n locations
  Clone ID: PAT_MRT3847_133561C.1
agaatattaagttgtgtaagtgcatatctttcttacttgtccatttatgcatagccacttgtagcagatcatttatgcagacgcgtgtgttattttattaatatttgatggaacaatcaagaaagtgattaacattattgtgaggattgttagttttgtgaaaataattaccatacattactaggtgatgcttaactgtattgtttcagcacgtagtggtgatgatatatatattttgagaccacgagttttgaaaggaaattggtagcttattagcatttttaactagtcaaggtattgctactgccttgatcttgaacaagataaaaaggagttgttttcatctataggtttcctgacctggattctgtttttaatttgtatgaattatgttgtgcttgtcaagtgtttcgatacctaatgttatgcaaattgaattttcagccaggcctggctttattagataatattctacctttctcaaatctcaatgactggtgtggaatattgtttttttctgcttgcattctttttcttttgtggaggcttccattntttctcatcttctctcactttctccatataattgcatctggcatcttctaaaactcattttattacctgctagcttgtgagttcgcttaat

SEQ ID NO: 37166 - DNA, 570 bp, Glycine max
  unsure (1)..(570): unsure at all n locations
  Clone ID: PAT_MRT3847_133562C.1
ggagaaatgtaatacttcactcgctgcaacttgggggtatttggatctcttcgcaaaggcccaaacccgaggagactaggaagtcttctcctcgtaaatttcaacacatgaaacaaaacaaacccatatatagcagctctgacaagaaaccaaaaaaaccatggaacttcttcatcatcatctgttgttgtttgtctggatctaaaattcaattctgcctctgattgccatttcaagtaccatgtggagtcaactgtctgatatatttcctctggccaagccatccccaattgtatcctcaccgggtaagggactaaaaattccacaataggaaacactatcaccaccattatgtcatcagntgtatccttaatattcttaaagatccaatttctcacattcgtgacaactccagaactccacaagccactcaaaatcccacgagacactcttaatatcaatagaaactgttggcggatattcaattctgagaaaggaatccacatcagatgaaccgctgttggaataccacaggcaagcattttcatatacagcccatcaaatcccccc

SEQ ID NO: 37167 - DNA, 428 bp, Glycine max
  Clone ID: PAT_MRT3847_133563C.1
cccttcctccaccactagtactaaccatgttcacccaattcctcatcttctccctcttcttcactcccttcatcttcaccgcagcccatgacacccatgattttgtgcgcaccttataccgcaaaatgttgggtttggacgaaaagcaagaaaagctcagccatttcagattctattggcatgacgtggtgagtggacgcaacccttcttcaattgaagttgtgccaccacccttgaagaactcaaccacatcctttggatcggtgaacatgattgagaaccctttgacattagaaccccagttgaactcaaaattggtggggacagctcatgggttctatgcttccacgtcacatagtgagatcagcttgctcatggctatgattttcgcaatcactgatcggaagtataatggtagcaccattgca

SEQ ID NO: 37168 - DNA, 324 bp, Glycine max
  Clone ID: PAT_MRT3847_133564C.1
ccggtctcaccgacatatcttgtattcgcttcacatttccgtaatcccatttcgttccgttgacttaactttaaatgggcgcttataagcaaccaagtcacgatgaggcacgatgctcttctccaccagtcccaacccaaacacgaaccagcaacgtcaactaatactctggaggtccttctgcactgtaccgatactgggctcccgattggccaccgcgacttgatggaccctcccatgggaacatgcactttgaacttcctgcataagctcctgtctgtgtcaaacatatcgctgatgcggtaacgggttgcaatattgtga

SEQ ID NO: 37169 - DNA, 376 bp, Glycine max
  Clone ID: PAT_MRT3847_133565C.1
ttttagttattttttttttatttatatattttattaatttttacaacctcattctttttttttattcttctttttttcttctaaaaaaattgaaattaaaaaagggggtacctctctcccccaaatcaataatccatccaaaaatttcccattattagccacactccccgggctaaaaaataaaaatttaaattgttgggacacaaacccacaggtgcccccctttacccttttttccaaactaaaaacgatgcccggtgcatggatttcccccccgcgggaaaaaaaacaatctttgatggaaatttttttcccccaccatgaccactaaaatatccaaccctggtgggaaaaaattttctcccgccgcctttct

SEQ ID NO: 37170 - DNA, 461 bp, Glycine max
  Clone ID: PAT_MRT3847_133566C.1
gctgcgagaagacgacagaagggctatgcaatattctcagggaaggaaacaaattgaatctgagttatcctacagggatacacggtccaacacaccagatgaatttcaagcaaatacttttgtgaactggatgacttatggatagatactttgccattgaactttgcatatgatctctttcattaatatataattgacatttttttgttggcttggtttgaaaatgcttaatagaagaaactagagagaatgaaccaggtaaagaaaaagaatcagacatttgggtaggcttttatttatgtagtgctaatataagaactatcctgaggccaatcttggtatgcaacattgattttgttgtgaagatctcaaataaatcctcgtgaaaatagtacaaaatagttcaaaacaagtgtttgtaaaattcttcgatgtcttttcctttctttttttcctgttgt

SEQ ID NO: 37171 - DNA, 121 bp, Glycine max
  Clone ID: PAT_MRT3847_133567C.1
ccacgcgtccgaaggtttccggcggcggcgcgcaaataaaggtgagggtgactcccgggttgggtgttggagggactgagcaagaggggatggtgaaggatatgggggatggaacttatac

SEQ ID NO: 37172 - DNA, 345 bp, Glycine max
  Clone ID: PAT_MRT3847_133568C.1
cacccgcccaccttaaattcactcttacattttttatatctaattaaaaataacttaacatacatataaacatttttatcgttatttctactcaaccaaatcttactcttattcccactatcaaagacctaattgaaaacactctctcttctcaccataacaaactcatttctctcctctccacgtatttatctcaacacaaaacatttttcaaccccataatttcattaatcaacttgacaacatccttttcgatgatcaatcaatatttgatcttaaaaatattctcttttcttaaatctttaatttcttaaactaaaccatacttttacctcctttttttac

SEQ ID NO: 37173 - DNA, 743 bp, Glycine max
  unsure (1)..(743): unsure at all n locations
  Clone ID: PAT_MRT3847_133569C.1
ggggaacatggagtggacaagaaaaaaacaagatggttctgctgctgctgcagggaatggttctgatgatttctatgatggaatcccacggtttactgattctttttcccacaagtctaggtcagtaaaatcaaggcatgctgtggcgaaggtctcagaggtgagtttacgcctgggcagagctggtattgacgtgtcggacactctggggagcagtatgacaaatttaagtgctggtgggtttgtatctggagctgtgacaaaggggaatgaaattggaattttagcatttgaggttgcaaacactattgtcaagggttttagtcttatggaatctctttcaacaaaaaatattaagcatttaaaagaagaggtgcttcaattagaggctgtgcaagatttagtatcaaaggatacggatgaacttctaaagattgttggtgcagacaaaagggatgagttgaaagtcttttctgatgaggtaattcgttttggaaatcgttcaaaggatcctcagtggcacaacttggaccgatactttgagaaagttagtagagaacttaattctcaaagacaatcaaaggaggaggcagaattactaatgcaacaattgatgactatggttcagtttacagctgaattataccatgagttgcatgctttggatagatttgcacaagattatcagcatangcgtgaagaggatgataattcaggtgcagctcaagtggtgatggcctttc

SEQ ID NO: 37174 - DNA, 484 bp, Glycine max
  Clone ID: PAT_MRT3847_13356C.1
aaaaagaaatcattctacttgatatcatatatagagacatatatgtacatacattatttaaacatggatcgatgttgatggaggaatacatgaaaaagggcaaaattataagaaaggggacccccactttgaaagttccttttccatctcgtccacttgtttaagttgccttcacctatcacaaacccatctctcatttttatcatactagctagctattatctcctatcaacctcaaaaagggggcctagtagctagctagccatcccaagtagacaaagactagatggatggtactttggcagggtcaattgatagagggggtactaccagctttagtacaactagggttatttggggttgttgcatgtctcgtctgaagactgaccaaggagtaataagctccacatgaccctttgcttttgaccccctgaaagttgacccctttatccccacaccatgtttcatacccttcctttaagct

SEQ ID NO: 37175 - DNA, 862 bp, Glycine max
  Clone ID: PAT_MRT3847_133570C.1
gcattgcgcgttcccgcacggagtgattggaagttcaagatcttcccaaaatctctttagaatagttgtatcccttctactcatcttaacctttctccaattagcagcatctgcatctgcatccacatccacaactgattccctcaaagcctacaaaaagttcataaaagacaagtgcaattcaaccactttcccaaaggtttgctacaagtctctgtcccctgatgcagcgtaactctgaccaaaccgcctatccccctccctcgtgaagcagccaagagtgcaaacagcacattgacgaagctgtccaattcgaaggggaagctgacacacggagaaacgtcggtgattgcggattgcagagagaacattgatgagacgtgggatatgcttgagcaatctgctgaagggctggcacacttgaatggcgcatctaccgctgatgagaaattccaatgggacagcataaagacatggatgagtgactgccataacagatgagggtacatgcaccgatgagtttgacgaaatacaagtgcgtccttcactgcaggagaatatcaaaaccaccgtttataacgtttcttgggttactaccaatgccttggctctcgtcaacaggctttactaataaatatacttaattgttcaaacaacattgtccgttctcttttagctaacacaatcctatgctgtttttttcataagccactatatatggttaattattgtaaaattgtggctagcttttggtctgtcattcttatgttacatgtatgcagtgtgtatacatgatctacttgtgagtgtgcactgtgcagtgtattcaaaggggcaaaggtggcttcaattccccctaacg

SEQ ID NO: 37176 - DNA, 458 bp, Glycine max
  unsure (1)..(458): unsure at all n locations
  Clone ID: PAT_MRT3847_133571C.1
aattcggctcgagcggctcgaggctgcgagaagacgacagaagggggattccattctttcattgataatgcttttcttgctgtgaagttctggattgttattgattgattgagtgctttgtccttttggttttaggtgcctgtgtcagtattttttcctttaatccttttacacttaaagtgtgttatttggcgcttaactttcatatttatttagctttttcaggcttaggtttttaataaggtgtgtagaatgtgttacgacgtgagtttgctcagtgataggtttggagtgactgaaaagaacaattttaggtgttgttttggtactcatttcaagtctgaagaaataaactcaaccaatgtccttaaaggtatttctgggaaggtttaattactcaagttggtttctatatttgcacaatctgtaaantttagtccctatatctagaaaccact

SEQ ID NO: 37177 - DNA, 525 bp, Glycine max
  Clone ID: PAT_MRT3847_133572C.1
cccgggtgcgacccacgcgtccgaattcagagagtaatagccaaatctctgatgtaatcctctactttggaatcattgacattctccaagactatgatattagtaaaaagattgaacatgcatacaagtcactacaagtggactccgcctctatctcagctgttgatcccaagctatactctaaaaggtttagggatttcattcacagaatctttgtagaggataaatgacaaaatgatatgcttgggtgaccaaaggagtatagaatgtgaaccgggaccaactctggcttttgctaaggtgatattccatgtacccggaaatgctacaaatatgggtgatctaaacacacatgtagattggaaaacatcatggttgttgttgatggctaaatttttctcatagccattgcaaatataatggtcgaattgggacacgaatgacatttttttcactttagttggggggagagggattgtcacactagcttgtacatggcatgtgattagagttcttttttatttt

SEQ ID NO: 37178 - DNA, 1367 bp, Glycine max
  Clone ID: PAT_MRT3847_133573C.1
ggagggtgcattgtgtcaaacctgttggaggtaaaaagacccagtttattgtaatgggcaatgtgttttgctcggagtaccagatccacaagaggtttgacctcaaaggctcttctcatggtcaatctacagataagccaagggaacaaattgatgagactaccactctcaaagaccttgatcttaactttgtctttcgccttgaatagtcttggtttcaagagcttatatggcaacttggtagagattgtgagttcctggaagcaaagggaatcatggattacagtcttctaattggcctgcatttctgtgatgatagctcagttgatgaaatgaaaagttcacctcgcagttctcattcgtgggcattatgcaagcattcttgatccataattgagatgctcacatgccggggacctctaatccggctgggaatgaacatgcctgccacagctgagagagtgtgcaaggctggattggatcaccaaacaactagtggaagtagtaatagccagatctctgatgtaatcctctactttggaatcattgacattctccaagactatgatattagcaaaaagatagaacatgcatacaagtcactacaagtggactccacttctatctcagctgttgatcccaagctatactccaaaaggtttagggatttcattcacagaatctttgtagaggataaatgacaaatgaagtgcttggagaccaaaggagtatagaatgcgaaccggaaccaactctggcttgctaaggtggcattccatgcaccaggaaatgctacaaacatgggtgatctaaacacacatgtagattggaaaacatcatggttgttgatggctaaatttttctcatagccattgcaaactttattgttgaaacggatgggggaggggagaatttggacactaatgacatttttttcactttagtttgggagggagagggattgtcacactagcttgtacagggcatgtgattagagttctttttttattttattgcttttgttatggatgtagacattgtggggtgtggagagagattcaaattgactcaggagaggggataataactgtacagacagtcaaaagattgataaatagaattgaattgaacataccatttttggttggagcaatcaaaaagagttgagcaagaaagaagagttccaagaggcccccccttgtagccctcaactgatgtgcattcaaacgggtttttttaaaacttttgcagcaatgcatgaaaagaagagaaaagctagaagaaagaaaggaaaggaagaggtgggtgtttcgttggttcatgtcccttgcaaaaacgaactttgaaaaagcagaataacaataata

SEQ ID NO: 37179 - DNA, 330 bp, Glycine max
  Clone ID: PAT_MRT3847_133574C.1
aaaaaaactttccccccggtgggggcataatttcaacaaaaaacaaaaaaatcttaaccctatgaggttcctacccccgcggggccagttttttttacacccaaagtttaaaagggacggggggccaactaattttattggaaaacctcccatctaaccaggaaaggggattttcccaaaacccattttaaaagaggccaaaaaagccgagggggggaaccgggggcagaacgcgctttgggaattaaagaaaccaaaaccccttaaaaaagctttacttttctaagggaggaaattgcccccaaaaaccaactccctaaaaccccctat

SEQ ID NO: 37180 - DNA, 434 bp, Glycine max
  Clone ID: PAT_MRT3847_133575C.1
ggctcgaggtttattagcagatgaaagaaatgttcccccgtcgttgcctgagcaaggacaagttccagtggataatgggagtaagaccagtagttcaagcagctccagcagtgattcaggctcttcatcaagtgattctgatagtgatagttcctcagcctctgggtctgatgcagggtcaccaaaaacctgattcattctgtcagatctcagatatttaaagattagatagtgatatgcaatgtttggctagttggtttttttcccgcatccagatttagctgttggtttgtaaaggaagtattctcaaggccacctatgatcctactgatgcagtatggcggggtccttttatcgcaactgttgcactactgctataaggccttatttgtgataacaaactaatgtaaaatatatggtagaatgtgatgata

SEQ ID NO: 37181 - DNA, 291 bp, Glycine max
  Clone ID: PAT_MRT3847_133576C.1
tcaagatgctgctgagtgcttcttcactcaagcatttcaccaaaatctagtcctcaacttagattatggttgttttttgtcacataataaaaagctatggttgaattgaagattcttgattctcattgtattcaccatttttggttaagtgtcattataagtattacagctgttactcgttccttggtgcttttcttcccttgttgcttttccttcccttgttgctttccaattattcagtgagtggaaaataactgctcgcacaattctggtactggtttcttgattctt

SEQ ID NO: 37182 - DNA, 312 bp, Glycine max
  unsure (1)..(312): unsure at all n locations
  Clone ID: PAT_MRT3847_133577C.1
agtcgcangacgngtncgtnatancgtnattcngctcgagcggcgnatgtggnctctngnnngtaaggnngnganngagtgaatacttttatantgcacctgtttagttaggcttagctgtgttncctntattggtacngtttaatgttctctgaagtgtngatgttgatgnnttcagttntntgcaccatngnagctctangtggnaagagggcttnctggattttcccncagcttgntgtggnncaggannttngtnnnaggtattntanaantggggaacaatttaagngttttggggtccgtgtcccc

SEQ ID NO: 37183 - DNA, 606 bp, Glycine max
  unsure (1)..(606): unsure at all n locations
  Clone ID: PAT_MRT3847_133578C.1
ttttcattgaaaaagcttactctagaaggcttgtcaaatttgaaatgtgtgtggagcaaaaccccccgaggaattcacagctttcccaatttgcaagatgtggatgttaataaatgtagaagcctggcaacattgttccctttgtcccttgccaaaaatcttgcaaatcttgagacacttacagtactgaggtgtgacaagttggtagaaattgttggaaaggaagatgcaatggaacttggaagaactgaaatatttgaattcccttgtttgtggaagttgtatctttataagctgtcactgcttagttgcttttatcctgtgaaagcaccatctggaatgccccctattaggaagcttggatgtgtcctattgtcctaagttgaagctattcacatcagaatttcacaatggtcacaaagaagcagttacagaggctccaattagtatggttcaaaaacaacctctgttactagttgataagattgttcccaatctgaagagcttgacactcaaatggaaaaacattatgttgttgagcgatgcacgtttgccacaagacctccttttcaaattaactngtcttgatctatcctttgataatga

SEQ ID NO: 37184 - DNA, 228 bp, Glycine max
  Clone ID: PAT_MRT3847_133579C.1
tgggacagactctctgaaagagagagaatatgacgcggggaaagcagatgatcgaagcgcagattcgattcgcagagaggaatgagaagggagagggctctcagctcgaggccagagccgttggtctcaaagtcacctgcctcatctgtaaggctcatcttgcaaatcacaaccaacttgttgatcagtacgcttccaaacatccgacggagaaaccacctgcagaga

SEQ ID NO: 37185 - DNA, 270 bp, Glycine max
  Clone ID: PAT_MRT3847_13357C.1
gatagaaaggagaggagggatagagcgcgttccgctaagcattaaattagaattccagatttgagctcgaagaggcagcagcacccggtgttgtatggcaaacgcagaggagatgcacgtttcgttcgtgtctcgtcgtcttctatccataatttcaattccatttgctcggctggagcgagtcaggcgggggcgaagcgggatgactcggggctggtgccactggaggaacaagagggagaactcgcggacatgcgcgtcgcggggagg

SEQ ID NO: 37186 - DNA, 600 bp, Glycine max
  Clone ID: PAT_MRT3847_133580C.1
taaattaaaaatgaaatctaatcacatttatatgaatcaaaaacatttaaagtgtgattgtttctctggcttcgtctgcctacctggttcatggagggccgctaaaaattgaaaataaaagaaccttctcaagtgggcaaatgtgacgcattaggcccaagaactagagataagtggaaaaggccgatatacactaaggatgccacattgcaatttgcaacttgcaagtagaaccgtccaaactgaggctcgagaattccagaattcatatacgtatcatgatacactcattgcatgttttcattaagaaaattgccatcctacttacccatgaattgcattgcatgctttcattaagaaattggcatgtcacccaccaggctggtggagataatttattttcaaaaattaatctaataatataaaagagtgagaaaaaaataaattaacacacaaaagtaagaggtataaatataaaattttaaagataaatacttataattttcttaaataagagatatattcatttatccccacataaaaaccaagtcaaaaaatttcaaatctttaaaattaggggaccacaaaatttaaaattta

SEQ ID NO: 37187 - DNA, 580 bp, Glycine max
  Clone ID: PAT_MRT3847_133581C.1
gaaaacgacgccgacaaacagcgtcgttccaccagcgtcattgccaagctcatgggcctcgagcccctaccagattcggagcccggacctgggcccgggcccgtggcgaagctccagagatccgcgtccgagtcgagagtccccagagatccgcctctgcccctaacaacgcagtgtcgtttcttcgaccccaacaatttcttttctgctcagttcacaaccaatgtggtctacgagaataacaacaacaacaacgctgccatcgaatcacgattcgttaatagcagagtcgccgcagatccaccgaaacagaggttaaagaagagtttctacgactccgcggatttcttccccgagccgaaacacaccgtttcggtgtacggagagattgagcggaggctgcggatgcgtgggattaacgagccttccaaggatctccacactctgaaacacatcttagaagcattgcagctcaaggggcttttgcattccaacaacaagcccaaccaatctcccattgtggttatgaaaccggttcgatctgtgaaccggaccgggaatgattattctccccggtcca

SEQ ID NO: 37188 - DNA, 421 bp, Glycine max
  Clone ID: PAT_MRT3847_133582C.1
tatattataaattagaattataagtttgagaattaagtttttactcttcctagtgtctcaattaggagaaattacgatatgttctaaaataactggtgttcaaatttccaactaatctctacatgactcataacaatttaatcaatttgtttttcgctaaattaaaaaacttaattgcatgtcacgtaaattaaattatgtatgatgttagatgttagaagcaaattaaaacaataattaagatgttcataaaatatatttttctcttatttttgggaggtaattgatcgcaaaactttataataaatttgttggaagagtcacaaaccgtggtcttagtggcaccatgaaacagtagctgtggggcatccttggaataaactagaaacttaaaaacttccataatttcagtaggcgtttg

SEQ ID NO: 37189 - DNA, 2213 bp, Glycine max
  unsure (1)..(2213): unsure at all n locations
  Clone ID: PAT_MRT3847_133583C.1
ggaagccactaggaatgggttggtggtgattgtgggtaggaggcccccccttccccaaaaaaaacaaaaatcctcttagtttcctttattcttttaaataactttggaaattgatgtgttggtatgataaaaaaaggttgacgcttaaatacactagagataagttacactgattgttatctttgacgcataactatgctagagattatttatgctggaaatccttgtctttgacatagtttttttaaataaaactggaagttgatgtgttggaaatccaaagttatatttaaaatcaaagattaggatgtgtgatttagcgtaacttgagatatctctagtgtagttaagcatcaacttttcttaatgacttgaagtaacattaatgtctgctatgggtaattcccggcacagagaaactgctgcagtgcttcatagagaaagaacacttctaatttaaaaaataaatcaaaaatttaaaaccctaacccaatcaatcggaaccatgggatacggtgaaaaaggaggacgacctccattcaaaaagcacaaggcctcaactaaattcggaagatccccaaaaaggaatcgcctacgatgacgatggttatggcggcgaagatgcctacgacgatgacgatggtaaaaccaaggattttagcaaattagagctgaaaccggatcacaccaatcgccctctgtgggcttgtggcaatggccgcatattcctggagactttctcgcctttgtacaagcatgcttatgattttcttatcgccatcgccgagcctgtttgcaggccggagtctatgcacgaatacaaccttactccacactcgctgtatgcggctgtttcggttggtctggaaacagaaacagtcataaatgttttgaacaagttatccaagaccaagcttcccaaagagatgattaaatttatacatgattctactgcaaattatggcaaagtgaaactcgtcctcaaaaagaatcgatactttattgaatccccgtttccagaggtattgaagacattgctccgggatgaaactatatctcgatcaaggattatttctgagaatgtaaatggagatggatttaccatcagcaaagcagcaggtgaaattgaaggcactcatgatgagttgctaaatgaagcagaagtggcagcggttgcagaagagaaagaagcccattcatttgaaattgatccttcctcaggttgaaaatgtaaagcaacgatgcttgccaaatgcgttaaattatcccatgttggaggagtatgacttcagaaatgatactgtgaacccagatcttgacatggaactaaagcctcaagcacaaccacggccatatcaagagaagagccttagtaaaatgtttggaaatggtagagcaagatctggtataatagttttaccctgtggtgctggaaagtccttagttggtgtttctgcagcttgccggataaaaaaaagctgcctctgtttggcaacaaatgctgtttctgtagatcagtgggctttccaatttaaactatggtcaactatccgagaagaacaaatatgtcgtttcacgtctgatagcaaagagagattccgtggtaatgctggagttgttgcgacaacatataatatggttgcttttggtggtaagcggtctgaagaatctgaaaagatcattgaagaaataagaaacagagaatggggactgctcctcatggatgaggtagccacacgactttatgattatatgctccctgcctaaatcttaaggttgttcctatgcataatatcatggcatgataaacaggtgcatgtggtaccggcccacctctgtgtcttctcgcagtcattagtatcactaaatctcattgtaaacttgggctcacagctacacttgtcagagaggatgaaaggattacagatctgaacttcctgattggtcccaagctgtatgaggccaattggctagatctagtaaaaggtggatttattgcaaatgtacagtgtgctgaagtatggtgtccgatgacaaaagagttttttgctgagtatttgaagaaagagaactccaagaagaggcaggcactttacgtgatgaatcctaataaggtcagagcatgttgagtttctcattaaatttcattgaggggacaccgggntgataaaattataagtcctttgctgataaattctggtttgcttctcact

SEQ ID NO: 37190 - DNA, 274 bp, Glycine max
  Clone ID: PAT_MRT3847_133584C.1
cacgctcggaatttcattgattatctttgttttttgatctatcataatcatcagaacagtttaattatataccgatcaggacatcacctcttaagtcctcaacatgctactcacccctacacttttaatgctactctatctcatttcatctcaaccttcatcttcatgttcaccctctcattctctctcatcaactacaacaatctcaccgacaacttctcatacaccccttccatcctaatcttcgactccatcacccatacattaaccctct

SEQ ID NO: 37191 - DNA, 1088 bp, Glycine max
  Clone ID: PAT_MRT3847_133585C.1
cgtccgtacggctgctagaagacgacagaagggatactttccactttcactttcaaacatcacaaacactttttaacgttgtttgattttggtgcaatctttacttcacaacttcctcgtacttctgagaatcatcatcaaaaaccccaaactcataatgatgatgatgatgaataagttccttccactctttgtattcgcattgttcttcacatctttgtgttcggttcgcgcagacaatgctcctgccccttcacccaagtcatcaccctctccgccgaccgccaaaccaccctctccggcgacccatccggcgcctcctgcaaagtctccaactttatcaccgccttcacaatctccggcagtttctccatctggttccaccccgccgccggcgactaaccctccggcgaagtctccggccactcagcccccatcgtcggttcctccggcttccagcccatccaacaatgtttcttcgccgccggctccgtccccagcgactcctccgccgacggtggctccggtgagttctccagtcggggctccgccagtggcagaggcgcctacgccggaatcttctaccggaattccttcatcggccgtgccggcaggttcaccaatcacactaccatccaccagtgcctcgccgggaactgcgccggcgagttcttcgccggaaagttcacggggttcggttggtgatgattcgggttcaagttccaatttcggggctccgatggttttgggtggcgtggcactttgggtcgctttggctatgatctgagggaaaacatcatgggattattttttgagtatattttttgttttttgttgccacattgatcgatgaataattgattgttattgatcaattttgtagttgggtaggttcaattctattcattattttgtaattgattttctttaatgttagaagtgaatttaatttttttctgtttgtttcaatttgagaagggttttgcttcctgtcaaaagtagaatagggttgtacttcgactggaaattgcataaattatcatctgtacaatttaacatattaaaatgaaaagaaaattttatatttt

SEQ ID NO: 37192 - DNA, 420 bp, Glycine max
  unsure (1)..(420): unsure at all n locations
  Clone ID: PAT_MRT3847_133586C.1
cttgatcaccataaccatgtcaatggcaacaacatcccctcacaccgccctcttccaaaaccgcaccaaccctttcactctctcctccttcaaacccacatccatcaaatgcgccacccaactccatacccaagccccgcccctcacccactcccaagatcgcgtcttcaacttcgccgccggtcccgccaccctcccggaaaacgtcctcctccgtgcccaatccgagctctacaactggcgcggatccggcatgagcgtcatggtgcagctcaagggacatagatcagtgggaggtatgagggcttctatttacaatgccatgcccttggctggngttgagaagttggtggctttcatgaaggattttcaggcaaggcatgcctaaaggagtaacctcaatctgaaacaaatacttgc

SEQ ID NO: 37193 - DNA, 1822 bp, Glycine max
  Clone ID: PAT_MRT3847_133587C.1
tcccgggtcgacccacgcgtttctatgtgcctcaacataaatactccctccttcggcctcagatctttgccagaaactcaacgaaactcttgatcaccataaccatgtcaatggcaacaacatcccctcacaccgccctcttccaaaaccgcaccaaccctttcactctctcctccttcaaacccacatccatcaaatgcgccacccaactccatacccaagccccgcccctcacccactcccaagatcgcgtcttcaacttcgccgccggtcccgccaccctcccggaaaacgtcctcctccgtgcccaatccgagctctacaactggcgcggatccggcatgagcgtcatggaaatgagccaccgcggcaaggagtttctctccataatccaaaaagccgaatcggatctccgcgccctcctccagatcccccctgaatactccgtcctcttcctccagggcggcgccacctcccagttcgccgccgtccccctcaacctctgctcctcccccgactccgccgtcgactacgtcgtcaccggctcctggagcgacaaggccgccaaggaggcgcagaagtactccaagcccaccgtgatctggtctgggaaatccgaaaagtacacaaagatcccatcttttcacgatttggagctgaatgagaattctgggtatcttcatatctgtgccaatgagactattcatggggtggagtataaagactaccctgttcccaagagtggtgtcttggttgctgatatgtcctctaatttctgctccaagcctgtggatgtgtcaaggtttggggttatctatgctggggcccagaagaatgtggggccctctggtgtcaccattgtgataatcagaaaggaccttattgggaatgcacagggtttcacgcctgtgatgtttgattacaagatccatgatgaaaacaattcactctacaatacccctccttgttatgggatttacatgtgtgggttggtgtttgaggacttgttggagcaaggtgggttgggggaggttgagaggaggaacaagaagaaagctgagattctctacagtgcaattgatgggagcaaagggttttataagtgccctgttgagaagtctgtgaggtctttgatgaatgtgcctttcactttggagaaatcagagctggagggtgagtttatcaaggaggctgctaaggagaagatggtgcagctcaagggacataggtcagtgggaggtatgagggcttctatttacaatgccatgcctttggctggggttgagaagttggtggctttcatgaaggattttcaggccaggcatgcttaagagcctaatggagtaacctcaatctgaatcaaatacttgcattgtataaacctattgctattgcatccaagttgggggcgtgttcgtctagtcacagtattaggcagagcagacactgcttaggtgcattagctttttatgttgaaagtatttgtctggtatgcagaaagggtcacaatctctttcagttttttgctttcttgttaggtatcttagctgtctttttttttttaaactttcttttgccatatttcatattcaaatttgggtcggcaggtagtgttttcattgggctttaccgttgtcgatcacaagtgaagtagtttagtttttgatttattgaaataccctctcctattactactacaagtttgtatggattttgagtcccatgtgatattttactggatgtaccaagtagtacattctcaataaattgaatgaggatgaaaattgaactactgctgtggatctgtggcaaattctctacg

SEQ ID NO: 37194 - DNA, 1994 bp, Glycine max
  Clone ID: PAT_MRT3847_133588C.1
gcttcaagtatttttattaataattgtctcaatataaatcctccatctttctgcctcagaccttcgccacaacaaacagcaacagctacctcctccattcttcatttccattaccaaaaagaaaacaccaaactctctataaccataaccatgtcaatggcaacaacatcccctcacaccggcctcttccaaaaccgcaccaaaccttcttttcctttctcttcttcctccttcaagttcaaacccacatccatcaaatgcgccacccaactccacacccaagctccgcccctcacccactcccaagatcgcgtcttcaacttcgccgccggccccgccaccctcccggaaaacgtcctcctccgcgcccaatccgagctctacaactggcacggatctggcatgagcgtcatggagatgagccaccgcggcaaagagtttctctccataatccaaaaggccgaatcggatctccgcgccctcctccagatccctccggaatactccgtcctcttcctccagggcggcgccacctcccagtttgccgccgtccccctcaacctctgctcctcccccgactccgccgtcgactacgtcgtcaccggctcctggagcgacaaggccgccaaggaggcgcagaagtactgcaagcccaccgtgatctggtctgggaaacccgaaaagtacacaaagatcccatcttttcacgatttggagcagaacaacaattctgggtatcttcatatctgtgccaatgagaccatccatggggtggagttcaaggactaccctgttcccaagagtggtgttttggttgctgatatgtcctcaaatttctgctccaagcctgtggatgtgtcaaggtttggggttatctatgctggggcccagaagaatgtggggccctctggtgtcaccattgtgatcacaaggaccttattgggaatgcacagggtttcacacctgtgatgtttgattacaagatccatgatgagaacgattcactctacaatacccctccttgttatgggatttacatgtgtgggttggtgtttgaggacttgttggagcaaggtgggttgggggaggttgagaggaagaatcagaagaaagctgagattctctacagtgcaattgatggcagcaaagggttctataaatgccctgttgagaagtctgtgagatctttgatgaatgtgcctttcactttggagaaatcagagctggagggtgagtttatcaaggaggctgctaaagagaagatggtgcagctcaagggacatagatcagtgggaggtatgagggcttctatttacaatgccatgcccttggctggggttgagaagttggtggctttcatgaaggattttcaggcaaggcatgcctaaaggagtaacctcaatctgaaacaaatacttgcattgcataaacctaatgcctaaaggattttatgctaataaagtgtttgtctggtattcagaaagggtcacaatctcttgtcagttttttgctttctttagttaggtatctttgctgtctctttttgtttactttcttgttccatgtttgatattcaaatttgggtcggcaggtagtgttttcattgcgctttacctttgtcgatcgcaagtgaagtagtttagttttgatttcttgatataccctctactattactactacaagtctataagtttgtatgaattgagtctcatgtgatattttactggatgtaacatgtagtatattctcaatctcaataaattgaatgaggatgaaacatattgagctgctgtggacctgatttaacactaccaaggttgagggaaggaaaagttattctatgtgtgtatgtatgtatctgtggtgttctttgggcattgaatttgatgttgcattgtaacaagatggttcatttgtttggtgactatgttatcaaaattacgcaatgtattgttgattgttcggttgaatcattgaatggattattttggtt

SEQ ID NO: 37195 - DNA, 187 bp, Glycine max
  unsure (1)..(187): unsure at all n locations
  Clone ID: PAT_MRT3847_133589C.1
agtttgttgattttnataataactatcttanaaaaatcatactttggatgattaaattatgattttntttactgtgtgaaagtgcatganaattcaactctattggaaaagccnacttttagatattaatttnactcngttccatcctgttgagaangctttngnnccgtancgtttcngtcatgtg

SEQ ID NO: 37196 - DNA, 1274 bp, Glycine max
  Clone ID: PAT_MRT3847_13358C.1
tccacggcgtccgtacaggtgcgagaggacaacagaaggggtacgaaaattgagcctgatgacccaaatgggtacataccggagaggttaattggtgaaatagagtttcatgaagtgcatttcgcgtaccctgctaggcctaatgtggccatctttgaaaatttctccatgaaaatagaggcgggaaaatctacggcaatggtgggacaaagtgggtccgggaaatcgacgatcattggtctaatagagaggttttatgatccacttaaagggatggtgacaatagatggcatggacataaaatcgtataacctaaagtcactaaggaagcacatagcactagtgagccaagagccaacgttgttcggtgggaccataagggagaacattgcatacggaagatgtgagagtgagagggttgatgagagcgagatcatagaggcggcacgagcggcgaacgcgcacgatttcttatctagcttgaaggaagggtatgagacatggtgtggggataaaggggtgcaactttcagggggtcaaaagcaaaggatagcaatagcgagggcaatactgaaaaaccctaaggtgtgttgttggacgaggccacaagcgcattagatggtccatcagagaaggtggtgcaagatacgttgatgagggtgatgagagggaggaccggcgtagtggtggcacacaggttgagcaccatacacaattgtgatgttattggtgtgttggaaaaggggagggtggtggagattggaacccactcgtccttgttggccaaagggtcatgtggagcttattactccttggtcagtcttcagacgagacatgcaacaacaccaaataacactagttgtactaaagctggtagtacccactctatcaattgaccctgccaaagtaccatccatctagtctttgtctacttgggatggctagctagctactaggccacctttttgaggttgataggagataatagctagctagtatgataaagatgagagatgggtttgtgataggtgaaggcaacttaaacaagtggacgagatggagaaggaactttcaaagtgtgtgtcacctttcttataattttgcactttctcatgtattcctccatcaacatcgatccatgtttaaataatgtatgtacatatatgtctctatatatgatatcaagtagaatgatttctttctacttctgaaatcattattattaacttacttattataagactaaaaaaaaaaaaaaaaaaatttaccaaaaa

SEQ ID NO: 37197 - DNA, 143 bp, Glycine max
  Clone ID: PAT_MRT3847_133590C.1
tgcgcgacgacgacagaaggggcgaagctcggatgactagcacaagcggtttaacgtgtttaaagcaaatgtgatgcatgtccattacactatcacgacggatatgccttactagctagaatctcaacaagattgctgccatg

SEQ ID NO: 37198 - DNA, 411 bp, Glycine max
  Clone ID: PAT_MRT3847_133591C.1
gaatataaaaaatattactttttctcttctattattatctgaataagtgacatataaagtatttattgactttaattgattaatggttttggttgaagaaattgattaattatcagtctctttttttaataattatgcttctagctagagatttttcttaacatattatctctttacgtctatcttcattttttacttttaaatttaattttaatatattttttttaaatattaatagttaaacattttgtctcaaaatataaattatttttcataaatttaaaatatttatttattatgtataataaatatttatctcgtgtattgcataagcactataatactaataataataaatttccgttaaaaggtgtaacaaagggaaatgcatagaactactctatataagga

SEQ ID NO: 37199 - DNA, 178 bp, Glycine max
  Clone ID: PAT_MRT3847_133592C.1
agccggagatcgtcgtaacatagcagcactacgttactactcgagcgggatacgacattctcagagctcaggtgtcttgaacttagccaccgtctgcaattttttatcgagagcgttgatttcgacgaatcttcttcttcaggattcggtaggagacctttttttttctggaaccaaa

SEQ ID NO: 37200 - DNA, 172 bp, Glycine max
  Clone ID: PAT_MRT3847_133593C.1
aattacacaaactggcaacgccaatggctgtctttggaacggttgcagcagcaggcgcagtattggcgcagcgcgctggcgggcacagcccgtcttgtcttgccgacggaccatgcgcggcctgcccagcagtcgtttgccgcggccgcggtcccgatcaccgtcgatgcgg

SEQ ID NO: 37201 - DNA, 172 bp, Glycine max
  unsure (1)..(172): unsure at all n locations
  Clone ID: PAT_MRT3847_133594C.1
ccggcgcaaaacaaggaaagggggacgcctttgaagcgagaccccgggacttgcccaagaaggganggagaaggacacgggggaaggacacaacacagagacacacgaggcgccaaagagagggaaacacaccgacagcgcagagagccaagggaggcccaccaaggggaga

SEQ ID NO: 37202 - DNA, 554 bp, Glycine max
  Clone ID: PAT_MRT3847_133595C.1
tcgatctgtcgctaggaatgtaccagagtgccgtcacaaaaccaaactattagatgcacctaaaatattgccaaatacacgggcaccatggctgcttacgcagcctacaaaactgccagcgccacgttgggcgtgtgcaatgagcgccaccgggtaactggtgagtccatttccaaatgccgggcagtatcactcacacgtgaaccataaaggtactgtggtgccctagccaacccagcactaaccaccagctacacctgagccggacataaccgcagtggcagccacagccaaactggaagcaaatgcaaggggctagttgtagccgcacctggactttgccaagcagccaacagctgcacgtagcctgccacaacctaaggcagcaacactggactaacgttgtagtggacacagaaggccgttttggggcgaattaaggcgaacggagcagagagcgagggaagaaagtggcgtacggtgaacggctgagaaggcagcaaatgtagtgggcgttgaagcccgtggcctggcggaagtaaagtaagggtggg

SEQ ID NO: 37203 - DNA, 300 bp, Glycine max
  Clone ID: PAT_MRT3847_133596C.1
aagtggatccttcttaacttcttgaaagggttattcaaaggaaggggtcacccaacccccttgcttaatcaaaaaaacctaaatttttggagaaaactcaaattcttggagtttaccaaaattaactttgtcattttgggttacaccattgctaagctaatttccaaaagttcaagtcattatcttaggagggctttattccttggatccaccacgaagcctcggaatctctgattcattgaaaagtgaaaatgtggttgatagggaaaaccaaaaaaaatttctaaataatatggattt

SEQ ID NO: 37204 - DNA, 666 bp, Glycine max
  Clone ID: PAT_MRT3847_133597C.1
aatacatatttatactacactctctctctctctctgtctctctctctgtagacttattactgcttcaatgtttgatccggcgatgcgatggtcatcccactccactctggtactgagtgggatctctccctccagagtgcgaaacactcctcactcctcaccgtggtgcctctaacagcttctcggcgagtgccatgccgatcccactggtcccagatcttgacgatattgcactataaaactcctgctatataccttcctatgaatagtatgatggatgcaaatagagagactgaatgcatgaggaatattccattgatgccgtgacgaccttcctcttcttgaaaaagggcccaatcgccgacgaatggggtgaagctacccaaagatgaccttcccgccaccgtacccacagcatgattctcgctgccgctgctacttcttcctcttcattcgccacctcatattattgaatacatcaaagaataatggcttcttagtgttctctcgtcacattgtacggattctctatgtccattgaacttgcagatcatgcatattgaccaataagactaaaactgttactttgataatgataattgcgtgcctagggtctctagcacacatactactatcagctgcaccctcataatgttatgtgtacga

SEQ ID NO: 37205 - DNA, 1414 bp, Glycine max
  Clone ID: PAT_MRT3847_133598C.1
cagaattataacatgctcgacttgtttcaaataaaaaagttttgttaagaatcgaaaatcttaatgatggtatcagaatgataaaaatgtaaaaatttgttgttgcgataaaagtatatataaaagtgatggtgggagtgggcagtggtgagtgaggagtgaagatggggtcagaggtgtctaaacagatggagcgaagaaagacaatccagacagagaagaagagtctgtccgatctgaaaagcagcggagaagactaccctggctccgactaccgtccccaagacagaaaaaactggatgtcccatctcgaccctcagaaactccgcatcaaccaaatcgtctggcccggcacccacgactccgcaaccaacaaaattggcatccctctcctcactcgccccttcgcccagtgccaatccctctccatctaccgccagctctccctcggcacccgcgtcctcgacatccgcgtccaagaacaccgccgcgtctgccacggtatcctcctcacctacggcgttgacctcgtcctcaacgacgtcaagaagttcctttccgacacgcagtccgaaatcataatcctggagattagaaccgagttcggccacgaggaccctcccgaattcgacaagtacctggaggaacagctgggggagcatctgatccatcaggacgacgccgttttcgggaagaccgtggcggagttgttgccaaagagagttatctgcgtttggaagcccagaaaatcgtcccagcccaaacctgggagtcctctctggagtgcgggctttctgaaggataattggatcaacacggatctgccttccaccaagttcgacggcaatttgaatcacttgagcgagcaccctcccgttacgtcgcgcaaatacttctacaggatcgagaacaccgttacccccgtcgcggataaccccgttctctgtgttaaacctgttacccgacgcattcatggctacgccaggctcttcatcgctcaatgcttcgccaaaggattcgctgataggcttcaggtcttctccacggatttcattgacgaggatttcgttgacgcatgcgctggactcactcatgcaagggtcgaagggaaagcctgaatgcccgaattcaactattaatattgtttgttagggatggatgttttgctttgtgtgttcctttgatctttgatggtgtcgtcactgtactttttttatttatttgttgtaaagctgtatagattttattctaaactgtaaactggaatatcgaaatgcaccctgtccgtttacaaagaatttcatttcctgctgctagtacacagccccaagtcttgtatcaaatgctcatgatagggctcagaatattcaccttcataaaataaattaaattgctttctccaaaaaaaaaaaaa

SEQ ID NO: 37206 - DNA, 469 bp, Glycine max
  Clone ID: PAT_MRT3847_133599C.1
caattttcagaaattgtctcttctaattctattgactttggtgtttcagcctgtgaatgtgataggcaagaaccactactgcatgcagaaatgtggtcgcgttcatattcaatttccattttatctcagaaacagcaataagttcaatcacaccacagactatcccactgggttcggtctgttatgcactgaaaaagatgatactttgctggagctaccttctgttccaataaaattgtttgtcagaaacattgattacaaatctcagcaaattgaaatctacgaccctcaaaattgccttccaagtcagctcttgaaactcggcaatgcatccatttctcctttccaattttcgaagccaaaaggtttttatgattacgagaaagatttatacgattccaggactaacgtttccttcttccgtgtgattcaaggtcactgtgccctatttttctacttgacccatcgg

SEQ ID NO: 37207 - DNA, 162 bp, Glycine max
  Clone ID: PAT_MRT3847_13359C.1
tggacatagtgttgcttcccgtgtgtccttcatctacttcttgctctgcaactcctatacccagcatccccattccgctatgctcttctttcacgactctattattacacaaccgtttcttctcccaaaacgtcccgttatacctttgaaactctctccgca

SEQ ID NO: 37208 - DNA, 222 bp, Glycine max
  Clone ID: PAT_MRT3847_1335C.1
aaaaaaaaacaaaatcacgggggggaaatttcgctggcagtgtcgaataagtacaattaaacatgacaatacgcttatacatagcaaataaaagatggctaaggtcatgtgattctaattaacccaattgtatgccaccaaagttgacagaccaatccaatgcttaagcatgcatttctttgccttttttttttttttaaaatcgcagcacagtaaaatagg

SEQ ID NO: 37209 - DNA, 256 bp, Glycine max
  Clone ID: PAT_MRT3847_133600C.1
tacggctgcgagaagacgacagaagggggattacacagactagagaaggagcggaaggcaaagccaaaggggtctcgttgcgtcgtgttactccgccagcggtacacatgatctcagccgataccttcaatgcgagttctgctgagtctgttcaagaccctgttataaggccaactctagaactacgacaggatgatgctgaaatgcaagctcaagttgatgccatgtgggaaaaatgaattcacgagtatctcat

SEQ ID NO: 37210 - DNA, 450 bp, Glycine max
  unsure (1)..(450): unsure at all n locations
  Clone ID: PAT_MRT3847_133601C.1
tttttgttattnnntttttttttttttttttttttttttttttttttttttttttttnnaaaccccgccccaaaagggcccttttaaaaaaattaagggatttttcccggtttattccaccttcccccccaaagcaaaaggtttgggtccccctttaaaaatttgacccttttaaagtttaattttaacctacttttcccagcattagtttgcctcagttggtatttaggcccccccccagtggggccaaatttctttccacccccccccattttttgaaaactttttttttaactaaccctttttcttggggggggttgaaacaggggccctctttttttttttggggacttgaaaacaaaacctcttttggttggataaacaagccctttaaaaaaattttttttaggccgggcaaccttttttttaggaacaaaaagagggattttt

SEQ ID NO: 37211 - DNA, 562 bp, Glycine max
  Clone ID: PAT_MRT3847_133602C.1
ccgcgtccctctgtaccactactcctggttgaactcgagcagcctcgccaacgcttccgggcgatcctaactacggatccaccgacttcattcccgagaacgccctgaacggctccgcccagcctgtgcacaaagccggcggcgctcccggcggcaaccccagcctctacgacgtgctcttccgcgtctacgccactgtcaagaacaccggctccatcgtcggcgaggaagtgccccagctctacctctctcgcggtggtccctacgaccccgtcaaggagctcagaggcttcgagaggatctccatcgcgccgaacaccactgccagagtcagctttgatatcactcgcaaggatattgccagctggaacactgttgagcaggattgggttgtgcagaacacgactaagaatgtttgggttggcagctcgagcaggaacttgcctcttagcggtgtgcttgcttgagattgttgatggggtggatgatttgatcttcatggctgatgatagaatattactacacgatagacatagatgaatatactactgtacataatcat

SEQ ID NO: 37212 - DNA, 375 bp, Glycine max
  Clone ID: PAT_MRT3847_133603C.1
cggacgcgtccgcccacgcgtccgatttgccagaatggtaggcatggattctttccttcaggatttgcacggtctgatgcagatggtgaggacccatttggtgattcaaggcgaattgcctgcaaaaggtgtggtggctttcatgtctggatacacaccaagaaacaaaagtctcgggcaagatggtgccaggttttttcttaatctttgttgttctcaatgaagcctaggtagcatgcttaactgacagttggctaagtatattaataattgcaaaatatttgccagtattctgtctctcccagcatgaagagagtatttttcatacatatcatggcactagtgttttatggtgggtttttttgttttaaagga

SEQ ID NO: 37213 - DNA, 263 bp, Glycine max
  Clone ID: PAT_MRT3847_133604C.1
gctgcatgaccaccggtaggctgagaggagagttcaccagtgctcaatctgaagcgctgatgctgatggctgaccctagatgaagttcgtgtctgtacacgtgggatggtcatggaccttgggggcctttgagactgtgtgtggagagtccatgatgaaagatgaactgcttgtccgccttcgattgctgggtgaacaaatgaacagagatgtgggcttgacggggacgaaagatgaacagagctccgtgttgcagaattgaa

SEQ ID NO: 37214 - DNA, 857 bp, Glycine max
  Clone ID: PAT_MRT3847_133605C.1
tcccaggtcggtcgggcacctggagcgcggactttcaacccgggaatggtggcgccccgtagggcgctgctagccggcgtcgttgctggagagggcccccctctttcaccgccagtaagctcggaattcggctcgaggggtttttcccacactctgcacggctgcaaaagaatggatcatatcgaactgttaaacattcacagactgttcacatacatcctagtttggggctggcacaggttcttcccagatgggttgtataccatgaactagtactctcaaccaaggagtatatgagacaggtgacggagttgaagccagagtggttggtggagatagccccccactattaccagcttaaggatgttgaagactcatattcgaagaaaatgcctcgtggagcaggacttgcatcgtaggacagattgttgacatctttacatatgctttgggaggagaaagtacttttatcaagtcattttgggggataaaaaagtgtcactcttaaacatgggaaacgtattgtaaatattttttggccctaatttataatatagcatgcatattatatcttgttgaaattagcttagcctgtagttaccctcacttgctatagtagctctcccttggtgagtggtgatatcatttacatacaaattttgtcatctaagtttcaatttcatttgttttgtaactattttttccccgtaatttatactatagcatgcatattatatcttgttagtatttctagtttaatattgtatacatttcttaaagggcactgttttaacccagaaatattcagagcggcatgtatttacttctgatgattgtacagatttcatttgatctgc

SEQ ID NO: 37215 - DNA, 498 bp, Glycine max
  Clone ID: PAT_MRT3847_133606C.1
cccccactattaccagcttaaggatgttgaagactcatattcgaagaaaatgcctcgtggagcaggacttccatcgtaggacagattgttggcatctttacatatgctttgggaggagaaagtacttttatcaagtcattttggggggataaaaaagtgtcattcttaaacatgggagacgtattgtaaatattttttcgccgtaatttatactatagcatgcatattatatcttgttgaaattagcttagcctgtagtaaccctcacttgctatagtagctctcccttggtgagtggtgatatcatttacatacaaattttgtcatctaagtttcagtttcattttttttgtaacaagtgccatctataattcaattttgttagtattgctagtttaatattgtatacatttcttaaagggcactgttttaacccagaaatattcagagcggcatgtatttacttctgatgattgtacagatttcatttgatctggc

SEQ ID NO: 37216 - DNA, 540 bp, Glycine max
  Clone ID: PAT_MRT3847_133607C.1
actcatatgtgttagagaattaaaatatatgcatgtattcttgataaattcatatgttatcatttgtagagaactcccacctcgatgtagccaagtctttcagggtctaactcttccatgatcagagctgcgtattcctcggcctgctctttcaatctggataatttatttgctgaagcgcttagcataatgatctctttcacttcttcttcggtgatcctaccatcttcattcttgtccaccatgtcaaagaatatctgaagccgcgaatcaaagctttgatcggtaatttgcgaccagaattcgttaagctcgtctctgctgatcttttcaaccttcagtctacgtctacgactcagcgcgtcaaatagttccagagcgaactccttagagtccttcatccctatgcattgcgcaaaatcagtgcgataaagataaccgtccttggcaagactatagaaattgctttgcacctcgttccaggcgtcagcgccattggatttactgctaataaatttcagtccacggagcgctttcttc

SEQ ID NO: 37217 - DNA, 369 bp, Glycine max
  Clone ID: PAT_MRT3847_133608C.1
ctctcttttgctgggacacatcctcgaaaacatgggcctgatatagaagaccaagacaatccctacaagattgaagccagattgaaacaaataattgctccttaacacactgaggttcatgctaaaatggaaacaaatctgtctaaaccgcctattgaggaagttgaaactcctaaaggtcccatgttggatcttaaactctctcaatctaaaattgcacctcccaaaaacacagtatggcggaaccattctgcgtagagatctatgggcaaattcaaggacagaaggcaataatagagcaagtgttgttttgcatcgcactcatggtattaaaggaatgattaaacggtggccacagtggttttcctg

SEQ ID NO: 37218 - DNA, 291 bp, Glycine max
  Clone ID: PAT_MRT3847_133609C.1
agagtgaaaggcagtacaaaggcccacaacaagaagggacaacaaacgaacacggaaaagacacaccccgaatagaacaaaccaccccaaaagagaaagaaaaacggggaaccaacacaaaccctgcagggaaaaaaacacacggacacgcgggcagactcgtggagaagcaagggaattccaggccgaggccggacgccggaccagcccacaacataaagaaccagaccagaggtgggaacaacgatgggcaaagggggaacccgtagaacaatgccatacgcaaacaaa

SEQ ID NO: 37219 - DNA, 561 bp, Glycine max
  unsure (1)..(561): unsure at all n locations
  Clone ID: PAT_MRT3847_13360C.1
cancagtctgcacatctacggcnntaacnntgaaatctgcgagtngatgtncggtctcctattgtgnctatgagctcacagcnnangnttgttntattctctgncngggntgngtttgtntctgngcagacatntgncngtgtngtgtgtagaagtctgtcantgncntncgcaaagnggttgtgccggagntctggtgccntgngtgcttanatcgtgantngttgggntcngnnntggagtgcatatcngttgnnngtagngatncanatccggtgcnganttgnagngtggtgngnncgcnncantnncncattgancccnagtgtncagntgtnannctntangngtgtgctgncngctngntgtgtgtctanagtgnnttagggngtnngttgncanagntgagtacgcacnngtgnncggnggtncgcntgtgngngtttnacagacgngtggntggtnagtgtntncattctgtngcgtatatgtgttgtangnagcngtgctgtnctcgcnacgtgngtacgngngngccnncngacagangtgtngnntcnc

SEQ ID NO: 37220 - DNA, 408 bp, Glycine max
  Clone ID: PAT_MRT3847_133610C.1
ggctcgtggttttttaagatattttatacatgttttaatacataacacaaaatatttatatcccattcaatatttttgtgatgctctttaataatttatatgctaatgatagctcgtacccactatggcgttataaatcaattggatttttttttgtcacttttgtagtttgatatatggtcaaattatatttgttgaatacaattctctttgttgtcaatgctactgttgaatgttcaagaatatgaaatcataatatggttcaagaatatcaaattgtacatacaccttgatttctctttatcattctttcatatgataccattaatcacctcagtcatttatctgtccatctctgagtgcatggatgaccatccaacataaagatgttcataacaaatggtcttg

SEQ ID NO: 37221 - DNA, 267 bp, Glycine max
  unsure (1)..(267): unsure at all n locations
  Clone ID: PAT_MRT3847_133611C.1
nnnncncaattgctcgtggagccacacaattacacaaatatcttccccttttctttttttcttttcctctcctccctctctctttctgggtcacccttatgaagcgcggcggcatctttcccttcccctttctctccaacccaaatcctcactctctaacctataaaccttttcttttacatatcgaaaccattacatcccatttcacataacactcttttctcttccattctatcaacccccactttcaacccatccttccttttt

SEQ ID NO: 37222 - DNA, 606 bp, Glycine max
  Clone ID: PAT_MRT3847_133612C.1
ttcccgggtaatagtggatgtagagagagaaagaggcagagagagggttcttttcttcttctcgtccttccttcttcgttgttgctcttgttctagagagagaaagagagagtgaatcttggagagataagcgcctgctccttcggcatttccgtcagacaaagttaacacttccaagaccgacgtagctgctactgctattattaatcaattcaattcaattcaattcgcctcttcaccattccctattgtagtagatgaactctcccaagattttgattagtagcggaatttgaaggtgagagagaatgggagaaaatgaagaagctacgacgactgacatgttgcagaggcttcactttctgaagcagccgttaaacatggagcaacttagcatcccgcaattcaacccctcgcaaatgcgcgcgaggcatcatcatcagaatcagaaccagttcgacggtgggaacagtaacaagcgcgccggtataccaccctcgcacccacaccagatcccacccatttcgccgtactctcagatcccattgtcgcgtcagcacagtgacatcaacagcaacagcaacatttgccctacacccacccaca

SEQ ID NO: 37223 - DNA, 464 bp, Glycine max
  Clone ID: PAT_MRT3847_133613C.1
ggaggaatatggcttccttaagctcctcattagtgctgctccttgcagctctaattctatcccctcaagttcttgctgactatgagaagcccccaatttacaagccaccagtgtacaagccaccagttgagaagccaccagtatacaaaccacccgtttataagccaccagtttacaagccaccagtgtacaagccaccagttgagaagccaccagtgtacaagcctccagtgtacaagccaccagtatacaaccattgactttgtcatgctcaaaaatttagtttaatttacaaattatggcaagggttacacctggctagcttccgcgtttagatcatttgtttaaagggctatggcccccccaagagtgttatgggggcctgaatgtaaaacgaaaaaaaaaaaaattgtgttttttttgtccttcaagttatgaataaaagaatttccctgtttgtttgt

SEQ ID NO: 37224 - DNA, 416 bp, Glycine max
  Clone ID: PAT_MRT3847_133614C.1
actttgggtaaggtggcttgtaaataggaggtttcttaacagggggcttgtacaccggtggtttgtacactggtggcttctctataggaggcttgtaaactggtggcttgtaaataggaggtttctcaactggaggcttataaactggtggtttgtatactggtggcttgtacactggaggcttgtacactggtggcttctcaactggtggcttgtacactggtggcttgtaaactggtggcttataaacgggtggtttgtatactggtggcttctcaactggtggcttgtacactggtggcttgtaaacgggtggcttgtaaactggaggcttgtacactggtggcttgtaaactggtggcttataaacgggtggtttttcaattgggggtttatacactggaggcttgtaaacc

SEQ ID NO: 37225 - DNA, 440 bp, Glycine max
  Clone ID: PAT_MRT3847_133615C.1
aacatgaggaatatggcttccttaagctcctcattagtgctgctccttgcagctctaattctatcccctcaagttcttgctgactatgagaagcccccaatttacaagccacctgtttacacaccgccagtttataagcccccagttgaaaaaccaccagtgtacaaaccaccagtttataagcctccagttgagaaacctcctatttacaagccaccagtttacaagcctcctatagagaagccaccagtgtacaaaccaccggtgtacaagccccctgttaagaaacctcctatttacaagccaccttacccaaagtaccctccaggctccaactgaagacacccacctgattttgaattaagttaagggatgtattaagtatatgctaaataagaggtgtatctacaaccattgactttgtcatgctcaaaaattta

SEQ ID NO: 37226 - DNA, 545 bp, Glycine max
  Clone ID: PAT_MRT3847_133616C.1
tatggcttccttaagctcctcattagtgctgctccttgcagctctaattctatcccctcaagttcttgctgactatgagaagcccccaatttacaagccacctgtttacacaccgccagtttataagcccccagttgaaaaaccaccagtgtacaagccaccagtgtacaaaccaccagtgtacaaaccaccggtgtacaagccccctgttaagaaacctcctatttacaaaccaccttacccaaagtaccctccaggctccaactgaagacacccacctgattttgaattaagttaagggatgtattaagtatatgctaaataagaggtgtatctacaaccattgactttgtcatgctcaaaaatttagtttaatttacaaattatggcaagggttacacctggctagcttccgcgtttagatcatttgtttatagtgctatggccacgacaagagtgttatgggtgcatgaatgtaaaacgaaaaaaaaaaaaattgtgtttattttgtacttcaagttatgaataaaagaatttcactgttt

SEQ ID NO: 37227 - DNA, 807 bp, Glycine max
  Clone ID: PAT_MRT3847_133617C.1
gctgcttgatgatcagtttttggatttaagagcttctgagggatccaataaagatggtatgcaccgcattgaccctgggactgggtttgatcatgatctttcatcgcattttgttagtggctcaccatgtcctccatctgcatttcctccaatgggagaggttcagcctaatgaaatcaaccataaatcaactaatccatttgattatccttttgattcagatgtggaacataataatacgtgtcaattgcaattccttgacgtcagctctctatgaccatgtccggaaaattcccagctatcactcctttcttcaagtgcaactaatttatggcgtgatgccacatggaaactagaagcttaagtttctgctacacgtccgggtggtttgacattcatggctgcaccaccaccaagttctcaaatactgaacatccagacgaatgaaccggttgcttctgttgggggtaatccctttgcataggattagactgtaaaatgtggaaacatcattcatagggaaatttatgcttgctcttgacatagattttaatgcttttattctggtcagattaaaatgttgcccattacttccacgccaaggaagtacttgtaattcatagtcactgccatatgcaggccatgcgtttgtaattttgtaattgaatggcattgtagttattgacaaaaaacaattacattgtagttagaactcttaaaactgcttaattagtgttggggcaggtatgaacgcaaccaatttggaaatagatggcaaaaaagctttaaaggcaaaagtacttttgc

SEQ ID NO: 37228 - DNA, 470 bp, Glycine max
  Clone ID: PAT_MRT3847_133618C.1
gaaaaacatgaggaatatggcttccttaagctcctcattagtgctgctccttgcagctctaattctatcccctcaagttcttgctgactatgagaagcccccaatttacaagccacctgtttacacaccgccagtttataagcccccagttgaaaaaccaccagtgtacaaaccaccggtgtacaagccccctgttaagaaacctcctatttacaaaccaccttacccaaagtaccctccaggctccaactgaagacacccacctgattttgaattaagttaagggatgtattaagtatatgctaaataagaggtgtatctacaaccattgactttgtcatgctcaaaaatttagtttaatttacaaattatggcaagggttacacctggctagcttccgcgtttaggtcatttgtttatagtgctatggccacgacaagagtgttatgggtgcatgaatgtgaaacgaa

SEQ ID NO: 37229 - DNA, 996 bp, Glycine max
  Clone ID: PAT_MRT3847_133619C.1
acgcacgcgtccggctttttcccggtgaccttgaaacgtgttctctctctgagaaaatctcagaagccaccgttgtcgtcaccgtcaccgtctccgccatggaaggaggtggaggaacgctctcggagattcaccaatccgcgaagaagctcctgctgaggtctcgcgacggcctcgaacgtctcgaacgcctcgagtactctgccgccgccggtgccgccttctcgggcgccgactccgagctgtctttcgccgtgaagaaggatatcacacagatccaaaccctctgcgtcgagatggaccgactctggcgatccatcgccgcaaaacctcagcgcgatctctggaaaagaaaagtggaacaaatagctgaagaggctgaatcactgagagcaagtttggataaatataacttacggaatcagatacgaatgagagaagctaatgagagaacagaactcttgggacgagctaatggggattctgctcatgttttgagaatttatgatgaggaggcacaagcagtacagtcagttccctcttcttcccgggtactttaaactatacatggccaaagagaacgcttgcagagtgcacatcgaaaagcattggacatcctcaatacagtgggaatatcaaactctgttttgaggctaattgagagacgaaaccgagtcgaccagtggatcaaatatgcaggaatgctattgactgtcgttttcctgttcgcgtttattatgtggagacattgatcattctcagatgttgaaaaattgaaatttctgtttatgagagagcatataaaagtgaaatacaaagtatatttggctgaaatgcgaaacctaaacagtttgtgcatcatgaggtaacacagagctgctctgcttataaatcttgttattgttgcacgataggtacttaactgaaaacatatgttttaggctacttttgatttgaagtatctatttttattttcaatattaaagttccaccccc

SEQ ID NO: 37230 - DNA, 511 bp, Glycine max
  unsure (1)..(511): unsure at all n locations
  Clone ID: PAT_MRT3847_13361C.1
tccgggacggctcaatgattatatantgaacacagcgaagaagcactgaaaaactttcctttgggtgaacaccttttaagggactctttaacattgaaggtttggctttgttgctcattggctgttttagtacaatccatcaagagaatgaattgaaaaatgatattcatacactggttgggtgcctactgcctagtgtatctcctggccaagaattagagactaatttcttgaggatggatgaggggttcactatatttgtgagtttcactgcttaattggaattctccctagtgttttaccaataatgaagctggctggcatttgaattgagtgcacaagttagtcttcttaaaagcttaatgtcttatggttgctgtcaaggctcaatggcattcatttggacttcagtgagatgggaagactagtgagtagtgacaatgaaactcgtaaatttgaactgtatgttgttattgttatgggaacactcaactatggttgcctttagttc

SEQ ID NO: 37231 - DNA, 518 bp, Glycine max
  Clone ID: PAT_MRT3847_133620C.1
cccatttacaagcctccagtgtataaacctccagttgaaaaaccaccggtttacaagcctccagtttataaaccacctgtttacaagcctccagtgtataaacccccaattgaaaaaccacccgtttataagccaccagtttacaagccaccagtgtacaagcctccagtgtataagccaccagtttacaagccaccagtgtacaagccaccagtgtacaaaccaccggtgtacaagccccctgttaagaaacctcctatttacaaaccaccttacccaaagtaccctccaggctccaactgaagacacccacctgattttgaattaagttaagggatgtattaagtatatgctaaataagaggtgtatctacaaccattgactttgtcatgctcaaaaatttagtttaatttacaaattatggcaagggttacacctggctagcttccgcgtttagatcatttgtttatagtgctatggccacgacaagagtgttatgggtgcatgaatgtaaaacg

SEQ ID NO: 37232 - DNA, 1127 bp, Glycine max
  Clone ID: PAT_MRT3847_133621C.1
gcggccgctctagaactagtggatcccccgggctgcaggaattcggcacgagggaatatggcttccttaagctcctcattagtgctgctccttgcagctctaattctatcccctcaagttcttgctgactatgagaagcccccaatttacaagccacctgtttacacaccgccagtttataagcccccagttgaaaaaccaccagtgtacaaacctccagtttacaagcctccagttgaaaaaccacctgtttataagcccccagtttataagccacccatttacaagcctccagtgtataaacctccagttgaaaaaccaccggtttacaagcctccagtgtataaacccccaattgaaaaaccacccgtttataagccaccagtttacaagccaccagtgtacaagcctccagtttacaagccacccgtttacaagccaccagtgtacaagccaccagttgagaagccaccagtatacaaaccacccgtttataagccaccagtttacaagccaccagtgtacaagccaccagttgagaagccaccagtgtacaagcctccagtgtacaagccaccagtatacaaaccaccagtttataagcctccagtgtacaagccaccagtatacaaaccaccagtttataagcctccagttgagaaacctcctatttacaagccaccagtttacaagcctcctatagagaagccaccagtgtacaaaccaccggtgtacaagccccctgttaagaaacctcctatttacaagccaccttacccaaagtaccctccaggctccaactgaagacacccacctgattttgaattaagttaagggatgtattaagtatatgctaaataagaggtgtatctacaaccattgactttgtcatgctcaaaaatttagtttaatttacaaattatggcaagggttacacctggctagcttccgcgtttagatcatttgtttatagtgctatggccacgacaagagtgttatgggtgcatgaatgtaaaacgaaaaaaaaaaaaattgtgtttattttgtacttcaagttatgaataaaagaatttccctgtttgtttgtaaaaaaaaaaaaaaaaaggcgcgcccgctctagaggctcc

SEQ ID NO: 37233 - DNA, 231 bp, Glycine max
  Clone ID: PAT_MRT3847_133622C.1
ctgctggagccggtgttgatgtctttgttatcgacactggagggtacactgagcatcaagagttcagcggaggtcgtgcaactatggtgtacaacgctatcactacagagtcggaccaagatctcaacggacacggaacttactgagcaggaactatcggaggtaccacttatggtgttgctaagaaggacactatcacgggagtgacagtacttgctggtaacggatcag

SEQ ID NO: 37234 - DNA, 1213 bp, Glycine max
  Clone ID: PAT_MRT3847_133623C.1
gaggaatatggcttccttaagctcctcattagtgctgctccttgcagctctaattctatcccctcaagttcttgctgactatgagaagcccccaatttacaagccacctgtttacacaccgccagtttataagcccccagttgaaaaaccaccagtgtacaaacctccagtttacaagcctccagttgaaaaaccacctgtttataagcctccagtttataagccacccatttacaagcctccagtgtataaacctccagttgaaaaaccaccggtttacaagcctccagtttataaaccacctgtttacaagcctccagtgtataaacccccaattgaaaaaccacccgtttataagccaccagtttacaagccaccagtgtacaagcctccagtgtataagccaccagtttacaagccaccagtgtacaagccaccagttgagaagccaccagtatacaaaccacccgtttataagcccccagtttacaagccaccagtgtacaaaccacccgtttacaagcccccagttgaaaaaccacctgtgccaccagtttacaagcctccagtgtacaagcctccagtatacaaaccaccagtatacaaaccaccagtttataagcctccagttgagaaacctccagttgaaaaaccaccagtttacaagcctcctatagagaagcctcctatagagaagccaccagtgtacaagccaccagtgtacaaaccaccggtgtacacaaaccaccggtgtacaagccccctgttaagaagttaagaaacctcctatttacaaaccaccttacccaaagtaccctccaggctccaactgaagacacccacctgattttgaattaagttaagggatgtattaagtatatgctaaataagaggtgtatctacaaccattgactttgtcatgctcaaaaatttagtttaatttacaaattatggcaagggttacacctggctagcttccgcgtttagatcatttgtttatagtgctatggccacgacaagagtgttatgggtgcatgaatgtaaaacgaaaaaaaaaaaaaattgtgtttattttgtacttcaagttatgaataaaagaatttcactgtttgtttgtatctttgttggttattcaacactccttcttcagtttgtgttttggaaagttgggaaacttccgttcaattagttgtaaccgattaaaaaaaaaaaa

SEQ ID NO: 37235 - DNA, 1283 bp, Glycine max
  Clone ID: PAT_MRT3847_133624C.1
cgaaaccctcggatcggtgtcgcagattcttctccccaaattgcattctccattctccgattgagtgtctctcaatgtcctcgcttcttcgcttctctgcatttctgttcgtatgaatactattattgtcacttgctatcaccgtcaccgtttttcttcgacctgtgtttccatttccacttcttgaacttctcagtggcggcgttccagaaggttctagaatctctggctgcgttcctattgcggcgctgcagtatctcgagatctatgaactccttgaccgtcttcgtttcctcgtcgtcgtggtggtcgtcgttgcaaaccctaacctcggagttgggtttgtgggaacggtttgtttttctggtgtcgtcgcgggtgaagagatcggagagggtgctgcgggggcgggcggcgcaggagcggcggcgggggggggaggcggggtcggtggggcgggagcaagacttggagcggcggaggtcgggcaggggaggggagtggtcggaggggatgccggcgaggcgttcacggaggcagagggcgcagaagccggtgacggggacggaggggtggcggtggcaggcggagaggcggtggggtttggaattggaagacatgactcatgagtgtggtggcagtggaggggagtggtcggaggggatgccggcgaggcgttcacggaggcagagggccctctgcctccagtttataaaccacctgtttacaagcctccagtgtataaacccccaattgaaaaaccacccgtttataagccaccagtttacaagccaccagtgtacaagcctccagtgtataagccaccagtttacaagccaccagtgtacaagccaccagttgagaagccaccagtatacaaaccacccgtttataagccaccagtttacaagccaccagtgtacaagccaccagttgagaagccaccagtgtacaagcctccagtgtacaagccaccagtatacaaaccaccagtttataagcctccagttgagaaacctcctatttacaagccaccagtttacaagcctcctatagagaagccaccagtgtacaagccaccagtgtacaaaccaccagtgtacaacccccctgttaagaaaccttctatttacatgccaccttacccaaagtaccctccaggctccaactgaagacacccacctgatttttgattaagttaagggatgtataaagtatatgctaaataagaggtgtatctacaaccattgactttgtcatgctcaaaaaattagtttaattta

SEQ ID NO: 37236 - DNA, 1030 bp, Glycine max
  Clone ID: PAT_MRT3847_133625C.1
ccacgcgtccgctttagtagaaacgttgaacgcggcggtgccgttagccatggaagcagcagcagcaacagcaaactcttctcagagaaagccgaagagaaaacgagcttcagcaaaaagcgatcccgaacttgaccgtctcgactcgcttccgtggaactccgctcttcctcaaaacgacgacgacgacgctttctccttgttcattggctccaacgaactcgaaggaggttttctttcgctcgaggagattgatgaggctgagtatggtttgagtattcccgaacctgaagttgacaagaggaagacgaagaagaagaagtctgaacagaacgaaaatgtgaagaagcagcagcaggatggagttgacagtgcttgtagcgacgacacggtggtcgaagcagagttggatgagagtctgaagtctaaagagaagaagaaaaagaagaagaagacaaagaacaagaagaaggatgccagagaagatcagacagttgagccgtcagatgctggtttagatactaatgtgaaggatgatattggggaggaggacgttgatgaaactgaattttatgcatggaatgaattgaggcttcatcctctcctcttgaaagctatatgcaagcttggcttcaaggagccaacaccaattcagaaggcttgtattccagctgctgctcatcaagggaaggacgttgttggggctgctgagacaggatccggtaaaacacttgcatttggtttgcccattttgcaacgtcttttggaggagagagagaaggccggaaacatggttggagaaaggggtgaagaacctgaaaagtatgcttctactggtcttctgagggctcttattattgctccgactagagaacttgcacttcaggtcactgatcatctgaaagcagtagccaaacatattaatgttagggtgactcctatagttgggggaattttagcagaaaagcaggagagacttttaaaagcaaaacctgagattgtagttgggaactccaggatgttatgggga

SEQ ID NO: 37237 - DNA, 208 bp, Glycine max
  Clone ID: PAT_MRT3847_133626C.1
gcgcggacgcgtgtttgaataggtagagaggctgaaaagatatcagaatgtcctcatgtcatagagcgggggaggatatcgcaagagcatcagaccagtgatgaccagctgcagagactggcttagcgcctcaagggattggaggcaacgagctgcatgcatataatgtcagtctcttgccaaagatgccaagagcccagggtccttt

SEQ ID NO: 37238 - DNA, 231 bp, Glycine max
  Clone ID: PAT_MRT3847_133627C.1
aagctgaagctcctgcacctgccggtaccgatctcccgttcctcccacgccccagtccggctgtcaggtgacgacataacgggatcagggggatgaggatcaacaaggttaagaatagtgccaatgatgacggtgtgagtttgcaagggactaggcagagcggtactaagcgtggtgctgatggttaacggtgatcataaagcttccgctaaagtggtccgatatgggaag

SEQ ID NO: 37239 - DNA, 360 bp, Glycine max
  unsure (1)..(360): unsure at all n locations
  Clone ID: PAT_MRT3847_133628C.1
gacccacgcgtgcgggcgcntataaccatattaatctttattttgaggcgcaganatgaagaaagacccgcctttgtttaatttattgatcctccaaatgctaatgattctatatacaacctgtatggtcgtgatgtttaaggaagtcttattattgtggaatttgccaaggggggtcctcttagttcccgttaccgataatatatgtttctgtgttcacctcctggatctgggcgattctttaactgtggcatttatggtcatagggcccaaaattgcaaatccttgtattgtaagaacaagtgttaaccgttgttgtgaaagaggtcatatacaaaaaaactgtattaacagtcctaa

SEQ ID NO: 37240 - DNA, 272 bp, Glycine max
  Clone ID: PAT_MRT3847_133629C.1
tgaacgcctgacgcctgcaggcacggagattcggaatccccggccccccccacgcgtatggatatatatgcgacaagagaaaaacgggggctggtttacttttaacacaactttgtatatttggagagtggaaagaaactattatcaacaaccggttttcgatcataaatcccgctcctgaagacataatacggcatattagggccgttattaaggaagaagaagtaattgtggtggatgatgcataaaagagtcttgtaccataacatagg

SEQ ID NO: 37241 - DNA, 196 bp, Glycine max
  Clone ID: PAT_MRT3847_13362C.1
tctacattatgggcgcggcgggggctgattctccattaggtgtatcggatgctttgatgagaacgtgaggtcattgggacctgtacagataaccatagtggcaccatctcacatacagggatatgatgcaagaagcggatgcgggacgggatgatgttgcttcttaaatatgggggagaaatgaagtatgtgatta

SEQ ID NO: 37242 - DNA, 459 bp, Glycine max
  unsure (1)..(459): unsure at all n locations
  Clone ID: PAT_MRT3847_133630C.1
accagggccaactcagttgacatttgaaattgagcacttattttcgtatatacctcaatttttgagatgtatgaacaagaataaaaaaaaaaagaaattgcaaaaaaatgataaatatattaaataatgagaaataattaaatattattttattttgaaatgattagcttagagaaaagagagaaatagaaaaaaaaagtaatagtagaaagagaaaattgtaaatgtgataaatgatataaaaaagaaagatagaaatagaataacctaaaagtaaaaaggaaaagaaagtaagcgtatgtatataataaatcctaagtgactgatatgatgagaagaagaaaagagataaaaagaagataaaatagaaaaaaaggatgaaaaatgtaaattctttggaaataaacaatattatttctttataaatcatctgaatcaaataagcgctntgagaaagtc

SEQ ID NO: 37243 - DNA, 214 bp, Glycine max
  Clone ID: PAT_MRT3847_133631C.1
ggttgatccattgcttgtaaggttagtattcaataagaggtttgtaccaagctctgggtattgttgccatgtgtggggaagaacaacctaatttgctgtccgaaacaactgatgtggatacagctttaaattacctttcattccataaataccatccccaagttttattcaatacaaatctgttgtaaaggtttatctcttccaatagaaagaa

SEQ ID NO: 37244 - DNA, 388 bp, Glycine max
  Clone ID: PAT_MRT3847_133632C.1
gaccgcgctcactgaccggcggacgcccatttcctgcatcccggattttttttttttttttgctccgaccgcttttaggggaatcggttttcaattacaccgggggacccaattaaattctttctagtccacaccgcggaaattgttaaaaaaccccttcctgggatattctaacctggcccacttctttgaattatgattttctgcccccttgatagacaaactttgtgggacaacaggggcactggtggccccccttcgacctttgaaaacaacaccccagtgaaaattttcaagtgtcttaagacgggcatttaaaaaaaacctcatccacatgggatacacgcttaaaaaaaaagtggctcttcccttgaccccctttttggtt

SEQ ID NO: 37245 - DNA, 253 bp, Glycine max
  Clone ID: PAT_MRT3847_133633C.1
tctctttgttatatttgttacttatattttcttcgttcagcatggactctccgaagcggcaggggcagaagtttctggtggcggtgacggcggtggctgcggtggtggtaaagctgcttaggcggctgcatcggacgctggtggtgagggagcactggaggatgtatctgcagtcgccgaataatcttctgagcatcataggcagcatccagctgccgtttaggaagaataacatgggtgaggaggattgcgg

SEQ ID NO: 37246 - DNA, 165 bp, Glycine max
  Clone ID: PAT_MRT3847_133634C.1
accggggatacacgcacagcagagacacacagttactagtacagaagatcatggtctctctagcaatcttggctgctgttcaaccagctccgatgacgggccttgctggaagttccctctctgggcagaagctctccttcacgccctctcgccacagtgtcatct

SEQ ID NO: 37247 - DNA, 862 bp, Glycine max
  Clone ID: PAT_MRT3847_133635C.1
gtatacaatttgttctgtttttctattgatctccgtgtgaacgttaataccacatcctgctgcaattattacacactatttttttgtggcagatactcaattagtatttcataattttcaggtaagcgtgtatttgtagttttcttttttattggttcatagaaaatgatgaacaatgatgaaagagaagaggttaatccacccttttcgattctccagagattggatcgccttgagcatcagatgctgtttctggaagaaaggcacggttatggagcaccaaatttggctgttgttgctgacaaatgtctgaaaccagaagaacagtgcaagagcatgttctctgcccttgaagaagttcaccacaaaggctcgttactggagcgggtagcagtgctagaaaatcgattaattcagctgagtagggacatggacttggaaaacacatcaaggtctagttcttccaatgctgcagtaactgaaaagttgggaaatgggttaggatcattagaggctaggggaccaaatgagggtatgaatatgatcaccacgattcaagagaagcagggtccttttgtaacacaaggtgaggatagcattgttctggaagcttgttcattaaactcaccatcttgtagggcacaaagaagacgaatcaaggccatatctagaatgggttgttacaggatgctcaagtggttgaaattgggatgttgatgttagattttgtggcattgtatctttcaaaatttctataattcccggcttaacttggaagtgttgtaagttgtaaccaaataattatatctattggcttgatttcattccacactagaaaaaccataaacacataacccaagtc

SEQ ID NO: 37248 - DNA, 2137 bp, Glycine max
  Clone ID: PAT_MRT3847_133636C.1
ccctcgcgtccgcccacgcgtccgatgccattggaaaacataagttgcggcaggagcaagtgcaacatttttttggtctaagccctagagaacgttctttgtcttccatattgcagctcaaggaacatggagataccattgccttcagttgctctgaactggatttgattttatctgaagttgagaaggtggaaaattggaagactagatgcatggataaattaagaatgttggtccaaaatggaaattccctacttcatgcactggatgaagataaaccagactctagatagatcattgtttatgtatgacaaattgcaagatctgaaggaacaaaatctatgtatatgctgctatgatgattctgaagatcaggaatttcttacttgttccacttgtatggactgctatcatgtgcgatgcgttggactaacagaaaaagacgcaggcattgaaaactacaagtgcccttattgtgaaattttgaggggtgaattccattatcagaatggaggtgccctcctgaggtttgtgaagaagcgtgttgaattgaaagttcttactgaactcatgtctcatgctgagcatttctgtttatggattgatgaaaaagattttttgtgccaacttgttgagaaagccctttcatgcaaatcttgcttgagagaaattgtgatccttgcatcagctaatgttgatgaagatattagcattgtctccgaaaaattggccactgctgtaaaggctagcaaagtggctattgtctatgatcagcatgatacttgtgaccttgagctgactttagcaaaaaacttttggaaaattcaagtcagtagattgttaaatggtgtacctaagcccactagccctttcatgcaaatcttgcttgagagaaattgtgatccatgcatcagctaatgttgatgaagatattagcattgtctctgaaaaattggccactgctgtaaaggctagcaaagtggctatcgtctatgacccgcatgatatttgtgaccttgagctgactttagcaaaaaacttttggaaaattcaagtcaatagattgttaaatggtctaccaaagcccactatccagcaaattcagaagcatctgaaagagggactggctatggacatatcacctgaagatcactatatgttgaaacttacgaatgtgaattgcttgggtttacagtgggcagaactagccaaaaaggtggcaactgattctggggcactcagcctggataaagtttttgaacttgtggtggtaggtgaaaacttgcccgttgacatgaacgaggaactaaggatattaagggcacgatgcatgctttattgcatttgtcgaaagccctttgatccagaaaggatgattgcatgttatcactgtaatgagtggtatcactttgattgcatgaaattgccttgcacagaagaggtctacatttgtcctgcatgtaatccgtgtaccgaaacgtgttgaacttagaagtgtttgtccatttctatgcatactacgatagctaaacatacggagaaatcattggtcattaaattgattcaaatgatttttatggtgtcatctcggtcatttttaatccatcttaatgcgaaaattccatttttaatttcttgttcgcatttcaccatttgaaggcttgagttattaggataaagatggcgtaaattaacgtaggaagcattagttttatacagctgacaaaagtaggtaggattttttttttaatagaattcagttagtttttaactttttatggtggaaattagataaaacagtggtaacaatcattcatccattgttggattaaatcttcagtgtctgtaaataagatgatgtttacatttattttctaacaaataaattgtctccctttagttgttgtttaaaaaaaaaaaaaaaaaaaaggcgaagttttatacagctgacaaaagtagggaggatttttttattttattttataggatttagttaatttttatgggggaaactaaataaaacagtggtaagaatcattcatccattttttttttttggattaaatgtttggtttctgtaaataaaaaaatgtttacatttagtttctaacaaataaattgtctccttttagggtcc

SEQ ID NO: 37249 - DNA, 1283 bp, Glycine max
  Clone ID: PAT_MRT3847_133637C.1
gtgccaacttgttgagaaagccctttcatgcaaatcttgcttgagagaaattgtgatccttgcatcagctaatgttgatgaagatattagcattgtctccgaaaaattggccactgctgtaaaggctagcaaagtggctattgtctatgatcagcatgatacttgtgaccttgagctgactttagcaaaaaacttttggaaaattcaagtcagtagattgttaaatggtgtaccaaagcccactatccaacaaattcagaagcatctgaaggagggacaggctatggacatatcacctgaagatcactatatgttgaaacttacgaatgtgaattgcttgggtttgcagtgggcagaactagccaaaaaggtggcaactgattcatgggcactcagcctggataaagtttttgaacttgtagtggaaagtgaaaacttgcctgttgatatgaacgaggaactaaggacattaagggcacgatgcatgctttattgcatttgtcgaaagccctttgatccagaaaggatgattgcatgttatcattgtaatgagtggtatcactttgattgcatgaaattgccttgcacagaagatgtctacatttgtcctgcatgtaacccgtgtacagaaggattgccttcaaaccatgacagattaactagtggtaaatttgaggagcctaaaaccccatctccgaggcattcaaatcctagaaagaaacagaagagagatgtgcccagtctcacttgcaacatattcgctagcaggaatcaagataagcttaggtattcgagtgggatagaatgtctaaggtggcaaaatcgaaagcctttcagacgagcagctaagaaacgtgttgaacttcgaagtctttctccatttctatgcatacaacgatagctaaacataggagaaatcattggtcattaaattgattcaaatgatttttatggtgtcatctcggtcatttttaatccatcttaatgcgaaaattccatttttaatttcttgttcgcatttcaccatttgaaggcttgagttattaggataaagatggcgtaaattaacgtaggaagcattagttttatacagctgacaaaagtaggtaggattttttttttaatagaattcagttagtttttaactttttatggtggaaattagataaaacagtggtaacaatcattcatccattgttggattaaatcttcagtgtctgtaaataagatgatgtttacatttattttctaacaaataaattgtctccctttagttgttgttt

SEQ ID NO: 37250 - DNA, 294 bp, Glycine max
  unsure (1)..(294): unsure at all n locations
  Clone ID: PAT_MRT3847_133638C.1
cgaaaacctaaaagcatgggnncagggaacaccgggnggtctgaaccggcaggntcttccgggggaccggaagccggacggcggcgacaagaaggagaanaagttcgagccggcggcgcngncngcncgcgtnagccgtaagcagcgtanccagaagggcccgnaggcgactnnncngctgacnacngtgacgcggtntccnagtgcnanctaangctacttnaaactngattcgcattaaaagaattactnttgatngacgaggattctggcnaaccagatangttaanncgc

SEQ ID NO: 37251 - DNA, 195 bp, Glycine max
  Clone ID: PAT_MRT3847_133639C.1
ctgaaatcgaactttttcattctgggtcgcattcaatgggagtgggcgggtgattggtgaagccacatacatatatgcatctgctaacgcatgaaacactgtgtttgatgccacgcctgtcattggacgcacacttagcgactaagtcagtaagaaagatgctaaacattttgcatttactatcttacaacgtga

SEQ ID NO: 37252 - DNA, 445 bp, Glycine max
  Clone ID: PAT_MRT3847_13363C.1
tcagaattgggtcgacgagcgtactgctcggtggccggccttcgtcctttttttttaacacgcgcatgtgatatttaattataagcatattggatacaagacaagattgttcattatactagcaagattatcttctaggagcattatccatttactaaaccttaggagatccaacatgatatgcacaactttttacaacttgacggcctatcaagcacagcatggtcacctttgagacacacttggctcatgcgactctgttgcgtgagacgcagactcaggcatactgtaatgcatgaagagtgaccggccgttgcctgcatcactggattgagtgtctacctgtagtgcagcactttgttgagacatggagactgggtacgacccaagtgatgtaactggttctgctacatcatatctatgtgggtgacagctgctagtccaa

SEQ ID NO: 37253 - DNA, 119 bp, Glycine max
  Clone ID: PAT_MRT3847_133640C.1
cgatccggtcgccgggctgaacgatgcgcagcggctggcggtgctgacgcatctgctgccgggcgaggtcgggcggctggcgggcatcgggccgctgaagtgcttcccgctcgggctca

SEQ ID NO: 37254 - DNA, 277 bp, Glycine max
  Clone ID: PAT_MRT3847_133641C.1
cggtaagggtgtatgctgtcctgctttgccctacaaccggactcctgctcgctggctcaagatctcttcgcacgatgtccaaagatgatatcgtgtgagtatgcgaagaaaggtgctgaccccttctcagattggtgtcattgttagagattctcacggtcttgctcaggtcaatagcgtctctggcagcataatccttcgcatcctcaaggctcactgacttgcgcctgaaattccagaggacctgtaccatttgattaagaacgcagctgaatta

SEQ ID NO: 37255 - DNA, 236 bp, Glycine max
  unsure (1)..(236): unsure at all n locations
  Clone ID: PAT_MRT3847_133642C.1
ctttctcctaaaacatctccagtgggttcttctgcttccataagacatacgacacgcangancatnancatggacatggccatgatcctgctcctcttcacggtcttcgccgtgtcatcggccctagacacgtagatcatcccgtacgacaacgcccacgtcgtcacgtcgctcagagacggcagcttaactccatgtactatcagtggctagggtagcacagcaacgaggacaac

SEQ ID NO: 37256 - DNA, 2154 bp, Glycine max
  Clone ID: PAT_MRT3847_133643C.1
ggctacatctgttttccgctgcttgtttgtgcctgcgtagttacaaagtaaaaagagggaggactaggacaaaagttgttggcagtcatcatgtcgagcgcttcgttgaaggagatgaggaacggtggtgaggattatagcaatggtcatggtggtggtggtgtgagggacttgtatggagaggattgtgccactgaggaccagcttatcactccatggactttctctgtggccagtggatgcagtttactgagagatccacgctacaacaaagggctggcctttaccgagggagagagagatgctcattacttgcgtggccttttgcctccagctatcttcaatcaagaacttcaggaaaagaggttgatgcacaatcttcgccagtatgaggttcctctgcataggtacatggcaatgatggatcttcaggagagaaatgaaaggctgttttacaagcttctgatcaataatgttgaggaactgcttcctgttgtttacactccaacggttggagaagcatgccagaaatacggaagcatttttaggcgtcctcagggtctatatataagtttgaaggagaaaggcaagatccttgaagtactgaaaaactggccagaaaagagtattcaagttattgttgtgactgatggtgagcgcatattaggacttggagatcttggttgccagggaatgggaattcctgttgggaaacgtcctctttatacagctttaggagttgaccgcccgtcatcttgcttgccaataaccattgatgttggcacaaacaatgagaagttgctgaatgatgagttctacattgggcttaaacaaaagcgggcaactgggcaggaatatgcggagcttctagaggagttcatgcacgcagttaagcagaattatggggagaaagttctcatacagtttgaggatttcgccaatcataatgcatttgatctgctggaaaaatacagctcatctcatcttgtttttaacgatgatatacagggtacagcatctgtggtattagcaggattgcttgcatccctgaaattagttggtggaaccttagttgaccataccttcttattcctgggtgctggagaggctggaactggtatagctgagctgatagctcttgagatttcaaagcagactaaagctccagtggaagagacccgcaagaagatctggctcgtggactcaaagggacttattgttagctctcgtttggaatcacttcagcagttcaaaaagccttgggcccatgagcatgaacctgttaagagtcttctggatgctgtcaaggcaatcaagccaaccgttttgattggatcatctggagcagggaagacatttactaaggaggtggttgaaaccatggcatccttgaatgagaaaccacttattcttgctctctccaacccaacttcacaatctgagtgcacagctgaagaagcttatacatggagcaagggtaaagcaatctttgctagtggaagcccatttgatcctgttgaatatgaaggaaaactttttgttcctggacaggctaacaatgcttacatatttcctggttttggcttgggtttgatcatctctggtgcaattcgtgtgcgtgatgagatgctcttggcagcctctgaagctttggctgcacaagtatcacaggaaaactatgataagggactgatttaccctccattctcaaacatcagaaagatatcagcccacattgctgctaaagtcgcggctaaggcatatgatcttggtctggcttctcatctgcctcgacctaaggatcttgtcaaatatgcagaaagttgcatgtacagcccaggctaccgaagctaccgttgagttttttgaatattgtgaggtctacaccctacagtgatacacaatgagattcttcttaggagcagatttattttattgcttgttagctttgttgtataaggccaatatgaactttgaaaagttgcttattctttcaaggtttttatttgtattaaggaggaatattattatttatatttaaattccaatttattctgaacgaaatatgatttttgtagtaaaaaaaaaaagtcattgagggccctttgccccgaatatttcataactgcagtaggaagaaacctgttttttaat

SEQ ID NO: 37257 - DNA, 1291 bp, Glycine max
  Clone ID: PAT_MRT3847_133644C.1
gccgcctacctaagctctttttcggctcgagcgggcaacggggcaggagatgtgccgagcttctagaggagttcatgcccgcagttaagcagaattatggggagaaagttctcgtacagtttgaggatttcgccaatcataatgcatttgatctgctggaaaaatacagctcatctcatcttgttttcaacgatgaggtggggggtacagcatctgtggtattagcaggattgcttgcatccctgaaattagttggggggaccttagctgaccataccttcttattcctgggtgctggagaggctggaactggtatagctgagctgatagctcttgagatttcaaagcagactaaagctccagtggaaaagacccgcaagaagatatggctcgtggactcaaagggacttattgttagctctcgattggaatcacttcagcacttcaaaaagccttgggcccatgagcatgaacctgttaagactcttctagatgccgtcaaggcaatcaagccaaccgttttgattggatcatctggagcagggaagacatttactaaggaggtggttgaaaccatggcatccttgaatgagaaaccacttattcttgctctctccaacccaacttcacaatctgagtgcacagctgaagaagcttatacatggagcaagggtaaagcaatctttgctagtgggaagcccatttgatcctgttgaatatgaaggaaaactttttgttcctggacaggctaacaatgcttacatatttcctggttttggcttgggtttgatcatctctggtgcaattcgtgtgcgtgatgagatgctcttggcagcctctgaagctttggctgcacaagtatcacaggaaaactatgataagggactgatttaccctccattctcaaacatcagaaagatatcagcccacattgctgctaaagtcgcgactaaggcatatgatcttggtgagttttttgaaaatgtgttcatttcaagcaacactgttttagtcattttatttttttacatacttaatcctgacttctatgtttggtggacaggtctggcttctcatctgcctcgacctaaggatcttgtcaaatatgcagaaagttgcatgtacagcccaggctaccgtagctaccgttgagttttttgaacattatgaggtctacaccctacagtgatacacaaagagcttcttcttaggaacagatttattttattgcatgttagctttgtggtataaggcattgccatataaactttgaaaagttgctattcaaaaa

SEQ ID NO: 37258 - DNA, 506 bp, Glycine max
  unsure (1)..(506): unsure at all n locations
  Clone ID: PAT_MRT3847_133645C.1
tcccccacccccccttttttttttttttttttttttattttcttctttttttttttttttttttttttttttttttttttttttctttcttcttatttctattttttcgcttgcatctttacttttcaatcctttttcaactccggttctagatgtcttggtctctaaaatactacttcatgattgtatttatggacacacccccaaagcatttttctattatacttgatacttgtattcaccttaattagattcaatatgttccattcattccatgtttctgaacaaattagtccatattatgaccccaaagattctacctcttttaagaatataaacttnaataatcctcatttccaattaatattcactccctcctatccacctaatccttgcatagcttagattcagagttatccatacttttattggtatttgaattcttccaacacatcttggaattttacattaacaaactataactgttaatctcaccactcctaaat

SEQ ID NO: 37259 - DNA, 371 bp, Glycine max
  Clone ID: PAT_MRT3847_133646C.1
cccacgcgtccgatcactcctttttgaaccaccaccgcggacgcgatgggggtttgaatatgtaagcacacaggaggcccgcgtgcactgtcggatatatatatatcggggtacttgctcgagccggcagccattctccaaaagaggctgccacataccgagagatagatggagtcaatgcaatacccgtgggatctgacaagctgcggcaaaaagatccggaagaacctgtaactccgttatgaaatggaggcccgcattgacaagatggacgacgcggctccggtaagtgttgccatcagtgggaggaaggaaccagagcctgatcttggaaaccgtaaagcggagtcacttgttgaggaaacagaatt

SEQ ID NO: 37260 - DNA, 528 bp, Glycine max
  unsure (1)..(528): unsure at all n locations
  Clone ID: PAT_MRT3847_133647C.1
accggntccggaaattcccgggtcgacccacgcgtccgcccacgcgtccgatgcgactctatgaagtttgttaatactatatgaagctttgagggtgttgctagtgaaaaaaaaaaaaaaaaaaaaaaaaaaaaaaaaaaaaaaaaaaaaaaaaaaaaaaaaaaaaaaaaaaaaaaaaaaaaaaaaaaaaaaaaaaaaaaaaaaaaaaaaaaaaaaaaaaaaaaaaaaaaaaaaaaaaaaaaaaaaaaggggcgcccctttaaaaaaaccaaatttaactaccccgtccttcaaaataaaaattttttttttagggcccccaaaataaaatccctggcccgcgttttaaaaacgcggaaattgaaaaacccttgggttacccaaattaaatccctttaaaaaaaatccccttttcccaatttgggaaaaaaaaaaaaagcccccacccaatcccctttccaaaaatttccccaccctaaagggaaaatggaacccccccttaaccggccaataaaccccggggggggg

SEQ ID NO: 37261 - DNA, 459 bp, Glycine max
  Clone ID: PAT_MRT3847_133648C.1
agaaaaaacaaaaagaaatagtaggcagcattcttgttttcattggcctgattagcgacaacaaattattaggcagccctaaagaaatggacgggaataactaccgagcctcctctttttaacataaggaatatccccctgcctccatttttacagattcacagctacttgggaatcagatactttaagccccctataccgctttgttgatgccaaaaagtacagtccgttgagcacacacatttagagaaaccattccatccacattctccaggctgtgaacggagtgaaacgcggaacaagcttgaacttgactgggttggccaaaagaaccgtgacaattactttctcagacatgtgaacatgaaggtttttaccatcattagcgatccaatccaagcaatggatggaactttctagcgatgattgcatgacaagccccgctagcgagggttcggg

SEQ ID NO: 37262 - DNA, 589 bp, Glycine max
  Clone ID: PAT_MRT3847_133649C.1
cccacgcgttcgtttttggaaaaaaaaaaaaaaaaaaaaaaaaaaaaaaaaaaaaaaaaaaaaaaaaaaaaaaaaaaaaaaaaaaaaaaaaaaaaaaaaaaaaaaaaaaaaaaaaaaaaaaaaaaaaaaaaaaaaaaaaaaagggggcgcccctttaaaaaaaccaaatttaactaccccgtccatgcaaaaaaaaattttttttatagggcccccaaaattaaattccttgcccgctttttaaaaacttcgaaattgaaaaaaccctggcttacccaaattaaatccctttgaaaaaaatccccttttccccagttggctaaaaaccaaaaagcccccacccaatcccctttccaaaaaattgcccaccctaaagggaaaagggaacccccccttaaccgccccataaaccccggcggggggggggttaacccccaggggaaccttaacatttccaagccccttaacccccgttcttttcgtttttttcctttcttttttccccactttccccggttttccccggaaagttaaaaatgggggcctcctttaagggtcccaattaagggtttaacggaccctttaaccc

SEQ ID NO: 37263 - DNA, 287 bp, Glycine max
  Clone ID: PAT_MRT3847_13364C.1
gggaaaaactgggatttcctcccggatttacattaaaagcctttaaaccttaaatggggtttttgccattgaatttttaatttatgcatgacaataaaagtgccccttttacaaggttttaccaacataaacccctccccctaaaaccttttaagggtttccacttatttaaaaagggttgcccatttttttccaagggtttgaattatagagttgttccaacacttttcactttggggggaaagcgccaaaaattttttcttggcccggattttctaggggggcaa

SEQ ID NO: 37264 - DNA, 1363 bp, Glycine max
  Clone ID: PAT_MRT3847_133650C.1
cctcgtgccgaattcggcacgagggcacagagaaaaccttcctccattaatggaggaggtggaggaggaggagttttactcccaattactacaccttctccttcttcttttccctcttccacgaccagtgatgttaccctcacatccacaacaacaactgctgctactactgctgctactgctgctactactactactgctgtcgaaaacctgagatgtcctcgatgtgattcatcgaacaccaagttttgttactacaacaactacaacctcactcagccgcggcacttctgcaagacgtgccgccgctactggaccaaaggtggggctctccggaacgtccccatcggaggcggatgccggaagaataagagcattggcgtggcgagctcggtggcggggaagacagcctcgaccaagatgaaaaccattgcatcggagtttggaaaatcgccgggctttggcggtgggttcgaggtggaacacgaacttccgccaccaccgggccaaatcctctggggatcgccccaaaacacccaccttctagccttgctgagagctacacaaactcaaaaccctaaccctaaccctagtcccatgtccctcaaggaagaaggaaccctattgggccacatggtgagcactgatcagcccttggtttcaaacactttgctgagctaccgaaccttaggctatgatgctgttgcgcaagttccttcttcgcttggtctgtttgggagaaacaatcaagatcaacaacaacaaaatggagggttcctagttggggaacatcacaacaacagtggaattcaagagctttaccagaagctaaggtcatcatcaactgttaataataattattgcagtgataataactcgtcacaaatgtttatggggaacatggcttctaactattcctcttctgtgtccaacaacattttggagacaacctcggttgctgggggtgaattcggatactggaatggtccaactttttctaattggtctgatcttccaaccactaatggcgctggtgcatatccgtaacaaaaataactgttttaattttcttcaccagttaaatcttcttgttttcctgttagatagtggcatagtgctcctaattaatcactttgtatcttaagggtttggttattttgtggtttcttttggttcgggtggtatatgaatatggatctagaactttttcttttctaattccctctctagccttctatctttttttttttttttggtgtaagtttggttgatggtgtgcttggctaagttatctatggtttatttcgagggtacaagagttcaaaactgaatggagaaatcagtgtatttttaatgcttcata

SEQ ID NO: 37265 - DNA, 208 bp, Glycine max
  Clone ID: PAT_MRT3847_133651C.1
ggcttcatcattgatctcttccccagctgttaccactgttaaccgtgccggtgccggcatggttgctccattcactggcctcaagtccatggctggcttccccaccaggaataccaaccatgacattaccttcatcgctacaaccgtgtatgactgcactcttgtacgtgtggccaccagttgtcaagaaaagttttagactcttacc

SEQ ID NO: 37266 - DNA, 336 bp, Glycine max
  Clone ID: PAT_MRT3847_133652C.1
gggttttgtcaaagggaaggatgccttggttgtttgatatagtgtcccataaaacatttcagttacacgattaaaaacttccaacctactacatatctctcttgcaatttctcactcatctaatgtaggcaagcatgtatataactattatcttgttttcaaacaattaaaacacctttgtaagccaatgcaacaacaagcatgtgataagtggaattccatctagttttgcattgaagaatgagtttctttgtgacagaaactttgatttgacgttccctaaaggttttgttggttctagttataaattttgctactcttaatctgcacaagatc

SEQ ID NO: 37267 - DNA, 245 bp, Glycine max
  Clone ID: PAT_MRT3847_133653C.1
gcttttctcttctgtcaaccccacacgccttttgcacaatgaagtgggtaacctttatttcccttcttttatctctttagctcggcttattccaggggtgtgtttcgtcgagatgcacacaagagtgaggttgctcatcggtttaaagatttgggagaagaaaatttcaaagccttggtgttgattgccttgctcagtatctcagcagtgtccatttgaagatcatgtaaaattagtgatgaagt

SEQ ID NO: 37268 - DNA, 291 bp, Glycine max
  Clone ID: PAT_MRT3847_133654C.1
tttttgtataaaaactcgttagagctttaagcaggagacaaaaattggccttgaaacatccaagatccagtcggagcttcctgcccaaagataccatggcatagaccgggacaccattatttttgtataataattaacaaatttcatgcttatgggccaactgatattgcaagacatcttggaagcacctaggctaaaatcacatacgggtgttccgtcaagtttacttagacaccgctaatcaaatgttgttctcggggacttttacagatacaatcctgccaccaaaga

SEQ ID NO: 37269 - DNA, 524 bp, Glycine max
  Clone ID: PAT_MRT3847_133655C.1
acaaaatttgtctagtgttcctcaaagatgcattcagcctcaaaatgaagacattgtggtcttatctgaagaatctattagtatccttgtgattccaattattgacatgcagagcctgctctctgtggaatcttgtagttttgacttggccaagcttctccttgcatgcaaagaattaatggggattcttccagatctcttttctctctttatccttcaatttctttataattttaacacatctttctgtttgattctgtactatatattcacttaaaagttaaaactatatttaaaattcaaatatgaaaaacggtatgttgaattaatttgaatccattgagtattgattatacatttattaaattttgaaaaatagtgaataaatcgttaatcatccataaaattaaatgattggattgatccaatccatttaaatggattgatttgtcacccctactaattgatttagttgttaatcccctttgtagctgataaacaatggtgttagctcatccttgctg

SEQ ID NO: 37270 - DNA, 345 bp, Glycine max
  Clone ID: PAT_MRT3847_133656C.1
gaatataatagacgttgcctcaaaaatgtatgttcttcttttttccattaaatgagttttgaatgaacatccaaacatgtacttatgaatccaaaccaagtcttcgactggcaagttcacacttggtgtcagcaaatccaaccctggagttgaccaagtcaaactccatccacacgttttgctgatgatggtgtccaatcacgtaagcctcaatccctaacaagtccgaattcccaaacgtcaaacagtacacgtcaccattccctttcgccacgtcaccatcaccccccacccgatacagtaacctctcaccggaaacactcatctccgccccttcaaacacca

SEQ ID NO: 37271 - DNA, 144 bp, Glycine max
  Clone ID: PAT_MRT3847_133657C.1
gtgtttgggcccacccctaggaatggtattcaataaacggttcaatccgtgcatgccgtagaatgcagatataatacaccatactttctatcgtgtaaggggttggatcctgctttgtgtacagagtcggtatccctaaaatac

SEQ ID NO: 37272 - DNA, 237 bp, Glycine max
  Clone ID: PAT_MRT3847_133658C.1
cgacaccactgatgatgctaatgcagaaatacatgaaaagggaggtttttcaccaaacctgtagagggttatttttgcacgagagcatctggataatctgcgtaccctggcttattataatatacagaaagcatccactgtgcatttgcagacgaggcttcacggtggcatgctagtattggtcaagactctgacagggtatactgtaaacttcgaagtggatagctctgataccat

SEQ ID NO: 37273 - DNA, 414 bp, Glycine max
  unsure (1)..(414): unsure at all n locations
  Clone ID: PAT_MRT3847_133659C.1
gataatatgtaccntgaaagnnccaaaaccgaacggaacatgttctgtggcatttaattcttatcactttctgccctcaaatgtcacactctaatcatgcaccaacattttgtggcgtacaagaaaactcttgtatttgagagcagtccatttttatttgaacatcttttgacaaatggaactagcttttcattaccatgtgacaaaaaattactttcctaccattaatttccctgaaaggtaaaattatccaaatctggaaagcgtttcgtgtaatcttggctatccatgactaactaatttctgaaacggttcagctacttcataaccttntgatgtcattctncccaacaaaaacaacttgtttgcaacaccttgcttgctttctaacgcacttggtgaccttccctgctt

SEQ ID NO: 37274 - DNA, 520 bp, Glycine max
  unsure (1)..(520): unsure at all n locations
  Clone ID: PAT_MRT3847_13365C.1
ggaaggaaaggaanagnnttcttttttttggaacccaaaattttcttaacttcgtggcattaccggcccccgagatctcccccttcttcttcngtctttcttatctcgctggagcnnnngggggagggagtaccttcnaaaatcccccccggaaaagggagccttcctaggacttactttcggaacccggaaccattcttgacacccccggcggccccgggggtaccaccttcccctgggggccttttcnacctccctgccctcggggcttcgggggccgggcccgccgcccctgggggagaatcagcggccccagcccggacttttttctccggctgggccggggccggggcctctgccggggaagcggccggggccgttgccccgaaaggcttctttgggagagggcccttgtctccctggtcccctgggggcggggtttcactggggttggtgtgggaccctggggcttcccccaccccaggtgttcccttccctgggttccctgggggggggacct

SEQ ID NO: 37275 - DNA, 335 bp, Glycine max
  Clone ID: PAT_MRT3847_133660C.1
ccggttcccgtcgacccagcgtcgttagctgtatcggagggaatatgaagttgtgttttgtgctgaagttggtagatggctccatgccgctccaaggtccttcaatgaaaactgcttggggctcttggggtaaagccagtttaggctgtgggagcacaccatcggccttaacattctgagagggtgaccacaagctcattaggcaacattaatagacttaacagtaccacgctttttatgctggaccaagtcatacacactatatatcgataatacacgactttaaatcatctagaaacatgttgggggaggattaagacctattgagatggtac

SEQ ID NO: 37276 - DNA, 742 bp, Glycine max
  unsure (1)..(742): unsure at all n locations
  Clone ID: PAT_MRT3847_133661C.1
cccacgcgtccgcccacgcgtccgcccacgcgtccggccacgcgtccgatcagatacaacatatcgataggagccttcaagaaataaggaacctgaagggctttttataatccaaacttaataaaaatcctaatcagacaaaaactcgcaaaatgaaatcttataaagacaagataaatatctcaattgcaaaagtagaaagacagttattccaaaaagtaacacataattaataaatattttatatcaccctctttcaataattgcctatttttctttctttctggtttgctgttgaatctgactttttgctttgcctatttttccactagcccatttttctttctctttcatgtatcttcattcttcatttgggttaatagaagtttcttggttccttcggtatattttcatcctatagttaactagtgtctttttggtgctaataatatgtagcatcatgctatcttgctgcttaagcaactgggtaacagggatggtataaaagcctagcctatttatactatcaggtcatgtccccattgatttgacttaagatgtaggaacatggtcaaaatactctaggcaatcctcttcccttgagctagctnttggggttgagttaagtcagtcaattttcaataacttgtactaaatttcaagttatggtgggnacttttgcacttaaacattcacttcggattttttcaagctgtaccaaatgtgattgcatccattaagc

SEQ ID NO: 37277 - DNA, 405 bp, Glycine max
  Clone ID: PAT_MRT3847_133662C.1
aaggcagcagcagcagtagtcccccaagtttcatcatataagggttaaaaaaaattaagccttgggttttccaaatccaaccttaaatgagttctccaaaaaggaaaaaaaaggggggtcatgaaacacatatagaacgggttcctccattggtctgccccacattatacaaactggggtcaaagggggggcaaattttttataattttggcaatgcgcggggaaaaatgcgagggtggtcccaatcagggacaatgggatcacgagggatatccttggggggggggcaacccctcaagggcctgggtagctcaaactcctcacggagcatccgcaggacgttttttacaccagccttttctttagcggccaaggggaacaccccagggggtccaataaatatgc

SEQ ID NO: 37278 - DNA, 395 bp, Glycine max
  Clone ID: PAT_MRT3847_133663C.1
gaagggggggaacccccagcaagaatccccaattccaaaaattcccaattccccctttctccccgaaccccgattaatcccaggcgcccccatattcggccctccacggtcgcgctctcgaacaaccacaacaccatcgtcatcacatggcaaacgcagcatcgggtatggcagtccatgatgactgcaagttggggtttttggagctgaaggcaaagaggacacaccgtttcatagtttttaagattgacgagcagcagaagcaggtcattgtggagaagcttggtgagcctgcccaaggctatgaagatttcagtgccagccttcctggtgacgagtgccgttatgctgtttaagagtttgagtatcggactgaagggaaggtccctaaaagc

SEQ ID NO: 37279 - DNA, 1436 bp, Glycine max
  unsure (1)..(1436): unsure at all n locations
  Clone ID: PAT_MRT3847_133664C.1
acgagagccgccgaagccagaaagaggattgagctttgagccagagactatggcttttacttcttcatgttctcttgcttctcagtttctccctcccatatatcattctgcaatcccttttcactcaacgaactgcacaaatttgtcattccccgctgttccgactccaagacaacaaccactgttgttttcttcaacctcaacttgcttagcagcagcggcggcgtcaaactcaaacagcacttcgaattccaataacaacaaccctgcttcagcttcagcttcgtcgaaagagaagaaagtagaagtggaagtggaagtggaggaggagctgccgtggattcaggaaaaggctttggacctggtcgagttcacgggctccgttacccaagccattcccgggcccagagtgggtcccacctccttgccttggattctcgctattcctctcacatatgctggccttactttcgtcattgcctttgtcaaaaccttcaggaaattctcttctcccaaagcaaaacgccgcagacaggtcagtaaaaatgcgacgctatgcaagtcgctggatgatttatttcaaaaaggaagagatcaagttaagcttgatgctctcaagcaaattgagaataagacaggttttgatttggaagaaatattgcgcaagtatatcaggtatactctgaatgagaaaccattcaatcctgacatggtagctgatttaattcatctaaggaaagcttctatattaaatgattcacaagttgctgagattctgaatgatatttcacgacgaattgtgcgagacaaaggccctattgtgatggataaatcaggttatactgaaaaaggttttaagagaaaaatagctgttcaggccctttttggaaaggtcttctatctgtccgagctgccagagttttgttcaagagatacctccttagttgtcaaggaaatcttcggagttacagatgaagatgctgacaaactcagaatccacacaatctctgaagctggcagtctagatgcacttgagaagatggttgatagttcaaattcagaggatgctagcgaggattcattcgaggcctcttaatgcaaatcatatttcagtgtttagcattcgaaaaggttaaagaataaaatgatgctgctaattaattgtacaacaccatcatcgcctcccatccaaaagaaaattttagaggaagtgattttcagtactgttactttacatatgcaatttacggtgtaacttcttgcatactttcaagatccatgatatttgcctgatgtttttgtaataaccgtcttataagtcagtcttagtgggcataacggcattgatgtttagactggagaaattgatagtgatacatttagatatggataaagaatcatatattgggttttccgttcacactaaaaaaaaanaa

SEQ ID NO: 37280 - DNA, 338 bp, Glycine max
  Clone ID: PAT_MRT3847_133665C.1
aggtgtagcaatgatgataagtaatgactaaaattaagtttgaacagctgataaggggggggctacaataaaagggagcaaggcaatgccatgcatacagatatgttgggtctccggttgaacactggctatggtgcccgcactccggtggcgaaatgcgccggttgttggcttgccctggatgcactccacagtgtttggctttgagaccattcctgccgggtgcgccttagcggcaccggagttcatccctgtggaacaatttggctcagactccactggggttaacccactagcttacttttatgccagagacctctaagtccatcccaaggaca

SEQ ID NO: 37281 - DNA, 537 bp, Glycine max
  Clone ID: PAT_MRT3847_133666C.1
ggaattcccgggtcgacccacgcgtccgtgaaaacatgagatctgagttccattggatcaagaacaaagccaatgtacttaaaaccatgggtatggtgtacaagcaaaagctagaaacaaaatcctctgatctctcaaaggctgaagcagaggtatgtaatcagaaacattattgttttttatttttttgtcctgctattggaaacattgcacagttatgtgtttctgaatcttactttatgttaatgttaataactacgtaacctgttgttgctccaatgcatgctgatgcaattgaatatcattattaggtagtgtttgtggacctacaaggaattagtttaggtgcaaagcagctctagcgtctaactactgatgagaatgtgagttaaatctcagggaagcaaaaagctattggagaggtcatgtaaccctcgtgccctcatgggcaaaaaaaagtctcatgggtggttcaaatgggttgtacttgtgaggacacctagtgatatatcaccacaagagagagagagactgtcg

SEQ ID NO: 37282 - DNA, 232 bp, Glycine max
  Clone ID: PAT_MRT3847_133667C.1
tggaatgctgcggcacgttgacgggacctgggttgttcaaggaccagttgatgtagacattggtgcaaacccttctgctgccggtggaggataacatgagggatttgatgatgctgctggtaacgccgccgacattgctggcacatccacactgcaggaccaacccgtattgcttgagcagcagtctggtgccttcatgacgagcttcgtcactgatcggcctcctactctt

SEQ ID NO: 37283 - DNA, 619 bp, Glycine max
  unsure (1)..(619): unsure at all n locations
  Clone ID: PAT_MRT3847_133668C.1
tcggtgaacaagccacagttattanccttgtagaaaacaacacttcatagttcatacacagagagagagagagaggaaaaaaaaacaccgtgttttcttgtgagttggtgtgcagtggtttcagttcagatgcgtgtagagaccacacaccaacttctcctaaaaccagttcagttcacgtatctctgtgacaacctgcgccactttctctgcataagatcatgatcataattattatatcccttcctttcacagtcactatcacttccactgttcttctctgcagctcttctgctcttccactctctttctctcttcatcatcaaaacggctcacttttcttttctgcactatggctgaggagggttttgagcactaccatgtcccacaacaaagtagaaggaacaagctgagagttttccctgagcaccaaccttattgtttcgttgaatcttcctccacttgccctactttagcctctctctacgatccttcgcttattattccttctgatttgttagcttgtgccacccaacaaggtggtggtggtgctgctgctaaggaacaagaaggttccaatttgatgatggggtttgttaaaggagcggttgtgaatggt

SEQ ID NO: 37284 - DNA, 1004 bp, Glycine max
  unsure (1)..(1004): unsure at all n locations
  Clone ID: PAT_MRT3847_133669C.1
ctgtgtgattatacttttttctccttttctttaatgaactttagatgttataatttttttaacgtaatgtcgccttatccaaaacatatttttagtgttatgcaagggagtggtttgagtgggccaattccttctggaatttcaattctgagaaatcttactgacttgagggtcactgacttgaatggatctgattcatggtttccacaacttaataatatgacaaacttggtaacactaatattgaggagttgcaacattattggatccttgccagagaatcttggaaaattgactaatttggaagtattagatgttagctacaacaaattaactggaccaattccaagcatttttggtgatcttcggcacttggatatgttttttttagaagggaatcatctcactggatcgctgcctcggttgatagatagacctcactatgtagatctctcttataacaatcttagcatcggcaacaacatagaggagctacagtgtccacagggaactgtgaacttgtttgcttcattttctaatggaaacagcttaggaaatgtttcatgtttgtcaaacattccgtgtaaaacttcatattctatgcatataaactgtggtggaaatcttgtaactgatggaaagaagacatatgatgatgacacgggtgagactactggaccagcaagctttcataatgaccgtggaaaaaactgggcacttatcaacaatggtcatttctttgataccgaccgcttaaactactataatgtgactaattcaactaagcttgtaatggagaatgttgaactgtacatgaatgcacgtgtttctccaacctctttgacctattatggattttgtttgggaaatggaaactacacagtaaaacttcattttgcagaaataatgttcactgatgataaaacaatttagaggcttggaaggggaggatttgacttttgcatctattgtantctttgttaaaaggaaaccatgtggaggat

SEQ ID NO: 37285 - DNA, 112 bp, Glycine max
  Clone ID: PAT_MRT3847_13366C.1
ggcagcagcgaaatctcctagtaagcgagtttctctttgtcactctctctgtcaatgttcacatagtcagcgaaaacaatgaaagctattggagacttggagcacgatgaca

SEQ ID NO: 37286 - DNA, 637 bp, Glycine max
  unsure (1)..(637): unsure at all n locations
  Clone ID: PAT_MRT3847_133670C.1
aaacagaagttgacttcatctatattgatagatcctcaaaattatttcatgcaaggctgttgcaatgaagcttgtacgttcataaggaaggtaaaaaatcccatcatagaaaaattacagggccgtaatctatctacacagcgcatgacagcaaaatagatttgctgctgcacaaagtagggcatgatatctgagcaagtgcaagtgatattaattagtagacttcgacattccattgctctgccttcttcaattgcctcttgtactcaatccaatcaataccatcttttgcagccaatgaaaccattatgtcatctatacccttttccattcccttcagtccacacatatagacaaaagtgttatctttcttcagtaattcccataactcttctgcatattgagccattcgtgtttggatgtacattttctctcctttttcgtttgtttgctctctgctcacagcaaagtcaagcctgaagttgncaggtgctttctccttcatcttttcaaattcctccttataaagtagtgagctgcttgtggggacacccaagaagagccatgccaaaccattgaacttgtaatcatcatgcttctcaaagaacattttccataaaaatgagcggaatggggc

SEQ ID NO: 37287 - DNA, 1253 bp, Glycine max
  unsure (1)..(1253): unsure at all n locations
  Clone ID: PAT_MRT3847_133671C.1
acgagtagtggtcggaagattaagaaaggaaatcttatgtgggttaggcatcatggattaaaccttctaaagtaggaaaaaaagaatagagaggagacaggcagcacaaacatatagtagggtagccctttttctttggaatttatattcatcacccaaacttttttgtaactatccgttatttgtcatttttttaatccatgtttcatctgaaattgaatatctgaaagatgtttctttccaggttgacctgcttttatcattctgttctgagattggattttcttcagtggtgctaattggtcatgatgatggagggttgcttgccctgatggctgcacaaagaattcaaacatcaatgaattatttcaatgttaatttgaaggggattgtattgctaaatgttagcttgtcgagggaagtggttccatcctttgcaagaatccttctgcatacctcacttggaaagaagcatttggttcgccctctattaagaacagaaatcacccaagtggtgaatcggcgggcttggtacgattctaccaaaatgacaccagaagttttgactctctacaagaatccactatctgttccaggatgatgtgaggcgctccccgaaatcggtaaattgtcatctgaatgaaaccattcggctaaaaatgctgaatcattgttacaagctgtaggagacattccagtgttagtcattgcaggtgctgaagattcccttgtcactttgaaatcctgtcaagctatggcctcaaaacttgtcaattctagattggttgccatatctggatgtggccatttaccccatgaagagtgtccaaaggcattgcttgcagctatatcacccttcatcaatagactcctgtctgcatctgactcgcaaagacaataagttcatttcttttaaagctgattatacatagggttgttatctattgtaaggggctacgatctttctttcctttttccatctttgttttgtttttttttcctcctcccatttctttctaagcaatattacttcaagagaaagagacgaaaggtcatctcttctctggggtgtttttgacgtgctagttttaggggttttaagttgtctgtatcttctccatcatttctctctttttaagctgtcaatatntgtgttccgtctcatctgcttgtcatttttcccacttaaagagggtggagacaaatatacatttgtaaattcatcaccagattgagaatggatatagtttagc

SEQ ID NO: 37288 - DNA, 937 bp, Glycine max
  Clone ID: PAT_MRT3847_133672C.1
actgtttctctatgcgtgaaacggctgctcaaatttcttgtgtgacctgaagccaggagctgaagtaacaataactggacctgttgggaaagaaatgcttatgccaaaagatccaaatgccaccatcatcatgttgggaactggaaccgggattgccccatttcgctcatttttatggaaaatgttctttgagaagcacgaagattacaagttcaatggtttggcatggctcttcttgggtgtccctacaagcagctcattgctttataaggaggaatttgaaaagatgaaggagaaagcacctgacaacttcaggcttgactttgctgtgagcagagagcaaacaaacgaaaaaggagagaaaatgtacatccaaacacgaatggctcaatatgcagaagagttatgggaattactgaagaaagataacacttttgtctatatgtgtggactgaagggaatggaaaagggtatagatgacataatggtttcattggctgcaaaagatggtaatatcacttaactttagggccactttagataaatttcctctcacaaacacttataagggaagcaagtaataagttaaagtgaattgaatttttcccatttaacttatggacttcaacttttgaaaaaaaccaaatgaaagagcttctatatataaaagttaagtccatgagttaattataacttatagaagaagttcaaatcagtttaccttaaatatttactaagaaatttatccaaaaataaccttagcccagaatcagagaaatttgtttcatcatgttgagttggcttttgtggtgtaggtattgattggattgagtacaagaggcaattgaagaaggcagagcaatggaatgtcgaagtctactaattaatatcacttgcacttggtcagatatcatgccctacttttgggagcagcaaa

SEQ ID NO: 37289 - DNA, 213 bp, Glycine max
  Clone ID: PAT_MRT3847_133673C.1
accgcttgcaaaagaacaacaaagggggacacatctgttgaaatatctaaaccctctactataaaaacgagagcgcttgattcgtatgctgctatactgcttttagcatatgatatgcaagactcaaactaccgaaatattgctctgcaggtgaaacctgcgtacggagaccaattcaggggtgccgtgtttgtgatatattgcggcttgtct

SEQ ID NO: 37290 - DNA, 154 bp, Glycine max
  Clone ID: PAT_MRT3847_133674C.1
gacccacgcatccatcaggtggcaaaaagacaacgaacggggtcatgcgttagtactgaagaactgaacatggatcacgaggtttcagtttcagactcactacatcacctacccccttatcgggcgggcgccctccctcggcggtcaggtcggc

SEQ ID NO: 37291 - DNA, 189 bp, Glycine max
  Clone ID: PAT_MRT3847_133675C.1
ggatgataggccgggcgcgggggggaatgtgcagggatgattaacttgctcgcggcgtatttggagacagacctaggacgcgctggtggactatagaccctacggggtttaatctagtggcccgtgagaagaggctagatccggagaggctcattatgaataaaagggacaagcttagtcgtcaagtgg

SEQ ID NO: 37292 - DNA, 245 bp, Glycine max
  Clone ID: PAT_MRT3847_133676C.1
taaaactacttttttttttttttcaagacaattttactcaacttgggggatttgtgattagccaaacgcaaccacagccatcactaatttaaggaacttcttgaaacggatttaatctatcccaacttttaccactctattttaactatactcactacgaaggttcatttattgcgattacctaaacccaactatgatctttaaaaaggtgccgtatcaattgatggggtaagctaaaacggaaa

SEQ ID NO: 37293 - DNA, 147 bp, Glycine max
  Clone ID: PAT_MRT3847_133677C.1
ttcctctttgacaagtgagtcctaaaatctgagctgtcacattcactactagtcagatgcatgtgacagctcagattttaggattcctctttgacaagtgagtcccatgtaattaaaatttgaataataaatatgaataatgttgat

SEQ ID NO: 37294 - DNA, 302 bp, Glycine max
  Clone ID: PAT_MRT3847_133678C.1
aaattaaatatgtaaattgatgggggggggccaaaccaaccgggtccaattatttcatactatccctttcaataacatgacaaataagagcacgttccattgtttaattcctggaggcagggctattaatttgtttgattggcctacgtgtggggtatgcgtaactacgtacgtccaggcataaacgtattatggcagcaccaccatcgtaggcaatgtaacgttttgtacttagaagcaaaaacgggctcatataaacatactccattattttttgtgcctaatttccaactattttctca

SEQ ID NO: 37295 - DNA, 398 bp, Glycine max
  Clone ID: PAT_MRT3847_133679C.1
agaattcaagtttgaccaagccacctgaatgatcttgacaaaatataatgaacgattgctaatttcaactgggaaaggtattaactgatattgcaagtttgaaactcatctcctcagcagccaacaagcacaacagtatcattatcatatacttggaagtgataaggtttcatttcaaaggtttggtggtgcaattcctttccattagcaaccttgcttgactgcatgtgctaatgcaaattctgaaattcaatccacgcgtccaccattgatgaggagcgtaagcagaaacaggagacaaattattcttttattttgcgtacatagacagtgatgtaaatagcacaatgtttaataattcatgatcgtgtattatcattagaggcttagcgtgacac

SEQ ID NO: 37296 - DNA, 286 bp, Glycine max
  unsure (1)..(286): unsure at all n locations
  Clone ID: PAT_MRT3847_13367C.1
gggncccccggatttgaaccgctggagaatgtgccgtgccgggcatttcaacggaaatattaaattttttagccccccctttttcctttctattttataccaactctcattctgggggaaccaaaacaaccttttcagttttttttgacaaagggaaccctttttggaggaaaaatcccgggggggtttagcttcagggaaaggtgggtacctggtttttttttttaattaggtggcacaacagatttgctttttttttttgggaaaaaccctttcccaaattttt

SEQ ID NO: 37297 - DNA, 346 bp, Glycine max
  Clone ID: PAT_MRT3847_133680C.1
gtgagagcaccaaactgtgaacgctggactaccatgcttacaaaccgccactaccatcatccccggatagcctagtacaaaattcacccaattacaagtttttctactcaccgcctgaagcgttatgtagaagttaccaatgtaagtggccaatggccggaaattcggcatgagtactcctgggagagaaacctgagcgcactgccttttgtgtgcaagaaacgcaggcaacgcaaaagcacgttgagtgcatctctgaacagccaaatcgaacttctctcatgtgctcactaccaccttccgaactactagtggaattgataggattcacaaaataaacaggcgg

SEQ ID NO: 37298 - DNA, 1614 bp, Glycine max
  Clone ID: PAT_MRT3847_133681C.1
gcacgccgccgtaagctcggaattcgacagaaggggagagtaataacggagaagaaaagcataacaagcagagcacattgtttaaagaaaagcatggctaggagagcacattgtcttgtgttaccatatccacttcaaggacacatcaatcccatgcttcaattctccaagctattggaacatcaaggggtgagaataacacttgttacaactcgtttcttctataataatttgcaaaaagtgccaccttctattgcacttgaaacaatctctgatggttttgacctaggggggcctaaagaggctggagggtccaaggcatatttagatcgcttttggcaagttgggccagaaacatttgctgagcttcttgagaaacttggtaaatcaaatgaccatgttgattgtgttgtttatgatgcattcttaccttgggcactagatgtggctaagagatttgggatagttggtgctgcttatctcactcaaaatatgactgtgaatagtatatattatcatgtccaattgggaaagcttcaagctccactcatagaacatgatatttcccttcctgctttgcccaagcttcatcttaaggacatgcctactttcttctttgatgaagatccttctttgcttgatttttttgtggctcagttctccaatatcgacaaagccgattggatcctatgcaacacgtactatgagctggataaagagatagtagattggatcatggagatttggccaaaatttaggtccataggaccaaacataccatctttattcttagataagcgatatgaagatgaccaagattatggggttacagaattcaagagggatgaatgcatcgaatggctagatgataagccaaaagggtctgttgtttatgtatcgttcgggagtatagctacctttggtgacgagcaaatggaagagctagcttgttgtttgaaagagtgcttgggctactttttgtgggtggttagagcctctgaagaaactaaacttcctaaaggttttgagaaaataacagaaaagggtttggtagtgacatggtgctcccaattaaaagttcttgctcacgaggctgtgggttgttttgtgacacattgtggtggaattccatattagaaaccttgtgcttaggagtccccacaattgcaataccatgttggtcagatcagagaacaaacgcaaagcttattgccgatgtttggaaaataggtattcgaactccagttgatgagaaaaatattgtgcggcgagaagctctaaaacattgtataaaagagataatggatagagacaaagagatgaaaaccaatgccattcagtggaaaactttagctgtaagagctaccgctgaaggtggaagttcttatgaaaatattatagaatttacgaatcatttgttacattgataagcttgatcatgttctaaattagaaattcaatagtgatggtctaattgtcacttacatttaaaaatatttatttcatgttggcgtagtgaacaatctaccgctattttggcattttgtcgtagcgagaaataaattcaagttctatgttaaggtaaatagagacaaaataataccctaatttatg

SEQ ID NO: 37299 - DNA, 239 bp, Glycine max
  Clone ID: PAT_MRT3847_133682C.1
ctcgatctggttccctgttcgtcgtgcagtgtccggtaattcagagttactggtcgaaggtatgtccaattttcacgcagttcggttatgctattcaccgttatgtgacgggacgtataggctgatgtacgtggtaggtagctactacagtcgtggctattaaagctgcatgagcggcttctcgtgcacatgctatgaatcatgtgtccgacttcctcgtgtgatgccggtgaggcaag

SEQ ID NO: 37300 - DNA, 826 bp, Glycine max
  Clone ID: PAT_MRT3847_133683C.1
agaagacgacagaaggggaggtttttagggtttacattgaggaggcacaccttcaggagcagtggtggttctcaaaaccgagctgtgccgattcagcggtgccaagatctacccagggaaaggcatcagatttgttcgtggtgattctcaggttttcctgtttgctaactcaaaatgtaagaggtatttccacaacaggttgaagccgtcaaagctcacgtggactgcaatgtaccgaaagcagcataagaaggatattgctcaagaagctgtgaagaagagaagacgtgctaccaaaaaaccttactctaggtctattgttggtgctactttagaagttatccagaaaaagagaaccgagaagccagaagttcgagatgcagctagggaagcacagcttcgtgaaattaaggagaggatcaagaaaactaaggatgacaagaaagctaagaaagcagaagttgcagctaagtcccaaaaatcacaagggaaaggaagtatttcgaagggtgccatgcccaaaggtcccaaacttggtgggggaggtgggaaacgctgagcttttaagttttgttcttatttttggctacaatttaaatagagctgttttgaaacttctgtactgatattttatttgcatgattaatatgttttattaaaaaacccatgtttggagcttctgaagttaccttttattgaatggattttgtcccccttggaagttttatattttttcccccatcctcctttccgttgtttttttaaaaaaaaaaaaaaaaaaaaaaaaaaaaaaaaaaaaaaaaaaaaaaaaaaaaagggggttttt

SEQ ID NO: 37301 - DNA, 127 bp, Glycine max
  Clone ID: PAT_MRT3847_133684C.1
tggcttccccaccacaaagaccaactgtgacattacctacattgctagcaacagaggaagagtgctatgcatgcgggtgtggccaccacgtggcaagaaaaactttgagactctcgcctacctgccc

SEQ ID NO: 37302 - DNA, 271 bp, Glycine max
  unsure (1)..(271): unsure at all n locations
  Clone ID: PAT_MRT3847_133685C.1
tctcgagccgaatacggctcgagcggactcgagtgctccaccgatcaagctcttgtattctcttacacaatgcccgtgcatcccatactcgttaccgtatccacttcaatgctcagatgtgccgatgaatacagctaacccaatacacgtaggaggcaagtcctcttctcncatcagntcccaaccccaaattccggaaccactcaacggccaccttgagacttcccgagtttcttctcggtatggaccgcttgattgggctcccgctggg

SEQ ID NO: 37303 - DNA, 578 bp, Glycine max
  Clone ID: PAT_MRT3847_133686C.1
ccacgcgtccgatttggttgggttcgtacacgacacccatggccgccgcacgcgcctacgacacagccgttttctacctccgaggtcccaccgcacgccttaacttccccgaactcttgttccaggacgaccaggaggagggcaatgattcggtgcagcacggtgcagcagcagggaacatgtccgctgattccattcgccgaaaagccacgcaagtcggcgccagagtcgacgctctccaaaccgcgcttcaccaccacgcgtcaagtaccaactctctcaaacccgacttgaacgagtttccaaaactcgaatcccttcaagattgatatcgatcaatatttaatttcctgagtcctatatcaatatactatagttttatgtatataggtgatgatgatgatgatgcctcggagttggggcttgaaactaattaaccccttcccttccctttaatttatatatatccttcttcttgtttaaacggatcttcaatcataatatcaaatcaaaaaagtattattattttccaaaaaaaaaaaaaaaataaaaaaaaaaaaaaaaaaaaaaaagaaaaa

SEQ ID NO: 37304 - DNA, 617 bp, Glycine max
  Clone ID: PAT_MRT3847_133687C.1
acgctttacaatcaccactcgtccgctccttccttacatcctgtgttaagaaagtgcttaatttgtgttgttacttggttcagtttccatggattgggggcttgctatatcttctcatcctaaaccttattcagtcacaactggtggaaatctctggcggagtaaacacaccaccaagaatatttactttgcaagtatgtatcacatatactcctgttcctttaattttgaccgttatcattacttcttaaatatctcagtcttttacattcgttcacttgctcacagaaatatatattagtagaaggaatcacttttaaagctgtgagtttttcaataaggaggggtgtttaaaataaaatgatccaaaataaaaataaaaaaacacttaaaaaattaaaaatcaaaccaaactgatttctttttatttatttggataattttttttcctcaaatcgattggtttggtttggtttatagtttttgaaatcgaatcaaatcataacacttatgctaacacttatattattttagtattatgcatgcacaatgtacggtgtatgatgttggggcgggggggtgggtcgcggggtggtgcggtgagtgtggctgggttt

SEQ ID NO: 37305 - DNA, 444 bp, Glycine max
  Clone ID: PAT_MRT3847_133688C.1
ggctcgagatgaagacgaacacggtatgcccagcttttaccgttgttatgctggcgcccactgccatgaccatggagaacatcatgaacggactggtctctcttggcacgaagaagctccccttggtcgaaaagagcatgacacgttggcgcatagatcacaatatgtgtgggatgtcagggcttggacttgctgacaccatgggagagagaggcgtagggtatggaccgtgttagatacccatcatgggatggctcatagtgggacccgcctgctcagccatgctgtctaggggcatacgatcatacagcgataccttcgctgaagaagtcacagatgttgtgctccaaagagtgccgagggcgcgtgttcatgagctgagagctgcctgccatattgagtgaaataccatgggcggttatggcatgcggcagtttgggtgac

SEQ ID NO: 37306 - DNA, 264 bp, Glycine max
  unsure (1)..(264): unsure at all n locations
  Clone ID: PAT_MRT3847_133689C.1
ctcttactancaatntncnanggttnatacaattntcnatggcttcntcagntgcngagtaccgntgtttgtcgntgggctcgcttgggccactgacgancangctctcgagnganccttctctcagnacggcgaaatcgntnaaacgaanatnatcaacgatcgtgagactggaanctccaggggttttgganntgtgacnttcgnctcggagcagncnatganagacgccatcgatgggatgaacggccanaaccttgacgg

SEQ ID NO: 37307 - DNA, 773 bp, Glycine max
  unsure (1)..(773): unsure at all n locations
  Clone ID: PAT_MRT3847_13368C.1
atattttaactagcatattatacactcaaataaattgatctatgaattgtcaattaattcttgaattatatgaaataatccagttagattgacaaaatttaacacacaaagttaccaagacttacaactgacgtaagtataccaagaccccatttttggcacatttaatacaataaatttccacctgaacaagaactttttttccatgatgatcaagattatagaaaagaggctacgagttgtggatgccattcaattaagaagttctggctttaactttttaagcattttttgtacgcaaaatatattcagcggagctaacggcaagagtgctcaatgacaaaccttggcaatgaatagtgtttatttctggccctttcatttctatcccctcatcatccagcagaaccaaccctgatgaagttatcttgaaagggaaagccagaggagctgatatgggagattttgctaacttaataaacctttgacctgcgaggaattgaacttttgagattcaaatatgtaatacagacacaatcatatatttcaataaacaaatgggtggttgctaaaataatcgtatatacttgtattgtngttggtaagctagacccaattgtttttaagttggccttttaaaaattgcattacaccagtatttgaccaagacaccctatacatattngggtnttatctttntttttttcaaaatctcttttaaatatttaaattaccaggttggttttgaatctaacataagctaatataaatga

SEQ ID NO: 37308 - DNA, 426 bp, Glycine max
  Clone ID: PAT_MRT3847_133690C.1
accttagggaccatattagttttcattccttttttaatttaaaagggataaaatttcctttaaacctaaaaaattccgggatggaggatgacttggttgacaggattcttttttatggtcctggccaaactcaaaatttttatgggtcccaccttttacaaagacatggccaaggctgaattaaaagaaattaaccaggcagttcgaaatcgaatccaacttccataaagaacgggggattatctacatggctggttggtcacagctgaattttgaacagattccttcatccaatgacatcactgttcatcatcaactccaacacaacttgaacttaccattcaaaaaaagtaagaaagtactacttcaattcgagccctaaaaaaaatattattttcaatcatttacgtttacttacaattctta

SEQ ID NO: 37309 - DNA, 319 bp, Glycine max
  Clone ID: PAT_MRT3847_133691C.1
tttttataaaacaaaccggtatcaattccattattcttggttttttgagacaaaatccatacctatgaaaccaccttaaaaagtgttaggggggggcttacactctttcccaggtttttttaaccccttcccggtgtggttgtggggggcctacacctctccctataaaataaaccccccttaaaaatttgtttgggggggggctacacacaatttcaaattttttttccctggtagggaggcgagaaaaccctttaaattggcgccggtctttctttgtgggccaccaaggggtggaccaccatttgggggggccttt

SEQ ID NO: 37310 - DNA, 439 bp, Glycine max
  Clone ID: PAT_MRT3847_133692C.1
caccattctgcgtacaggtccataggcaaactttttgacagaaggccttttgagagcaagtgatgattcgcatcgcactcatgctattagaagaatgattaaaacggcggccacaggcggtatgcctgataatacaggtatatcattggcctgcgctatgaatattgctcctaaggtgagcgccaggtctgatatttacaccatctgctctaaagactgtgaattgcagaatactgatcgcacaaaagcaaagactatggcatttaatccaaacccgagctctgatgcatggagctcggaatctccgaagcgtactgcatttcattgcaatgtcatatgtgtcactggatggactgccaccccgatgcatgatgttcatgatacaatagataggccattacctctatgaatggatgccatgacctattggtattaaatc

SEQ ID NO: 37311 - DNA, 294 bp, Glycine max
  Clone ID: PAT_MRT3847_133693C.1
cccacgcgttcgcccacgcgtccgatatataaaaaaaataataaaaaataaaataaggggaaaaaaaaaaaaaaaaaaaaaaaaaaaataaaaaataaaaaataaaaaaaaataaataaaaaaaaatacggggtttttgttgtatcgtatcttagtttcaattccgttgattgctatggatttgtttttttttaaggtaggttaaattcattggactgccttttgttttgaactttgtggaatggcaatgccgttacctaacttatttgattggcgtaacatcccattttcttt

SEQ ID NO: 37312 - DNA, 1457 bp, Glycine max
  unsure (1)..(1457): unsure at all n locations
  Clone ID: PAT_MRT3847_133694C.1
aaaaataatggtcttctctttccntattggaacatgggccttctgaggttggcacgtagaagagcaacgcataaggtatctatcaactggatcccgtgtccttcaaatgggaacttctaaaccacatgtctcgatagacctatccacacaacctttgttataaaaaccaaaacgtgtcacggtttccctttgcccgaaaatttcagcctaatcagcaaaatagatagagcattgcagcgaccctctcctatgcttcatccttctgtctctcatcccatgtgaaggttcaatggtcactaagctagttcagccaccaatgacagattcccatgtgagtcctctcatttatagaaccatgaatgtcatgaagctccgcattcgttatttcggaaaaattttgagctatggccgggcgtcttcaatcatgcggggtggcagtaaatcacgtaaccttcgtctttcaatatactaagtcatcttctattgacagtttagtgtagaagtccgactctttgcatccctttccatcccccccaattcaaattttttatttggtttagaaatcgatccaagattaaagaactaagatttggttagagaccattatggtttagacccattacagtcattaaagttgcagaacacaattctggctcaggcttagttgagcttgaagcacttgctcagaagaaaagagagctttaccaggcggtggaaggaatacacaggggaatttttggaatcccagctacctagaaatctgaaattgaaagattggtgaagcagatagaatctctgaatccaactccatgcccaactctagtactggagaaggtggctgggtgctggaggcttgtttacagtacgatctcagccttcaatccagagggatggctggaaatcacatatgttgatgataccttgagaataggaagggacgacaaaagcaatatctttgtgctggaaagatttgatgatagtaataacacgtagccaatttccttccactttaatcttcaaaattaattagtacgcgaggcattttttatccttacagatgtttttgttttgaaaattttgttggccaagattcatttagtaaatatgatagaaatttcttcttatacaaattattatgggcagaaataagcaagttatgttgcttaagagaagcaattaatttctgatcactgttgtattcctactctcagaagtggccacgagtagtttgtgccctagagtattgtatcttgaaattcttaggttaagataaggttttggttcttctatttttacttattggagtttttttgtatttatttaaatgttaatatttatttatttttattcataagttttagtttttcaaagacagagactaatgtcttaataaagaaatttgtaattttaaaaaataaataaactaatatgattagtattgagactgacatgtactg

SEQ ID NO: 37313 - DNA, 558 bp, Glycine max
  Clone ID: PAT_MRT3847_133695C.1
ggaataataggggaattttcggccacgcgtccgccaagaaatctgaaattgaaagattggtgaagcagatagaatctctgaatccaactccatgcccaactctagaactggagaaggtggctgggtgctggaggcttgtttacagtacgatctcaattttgggatcaaagaggaccaaattaggcctcagagacttcatctcattggatgatttttttcagtcgattgacatatccaagagcaaagcagttaatgtgataaagttcagtgcaatgggattgagtttgttgtctggacaacttaatattgaagcctctttcaggatttcttcctcaacaagggttgacattaatttcgaaaactcaacgatcactcctgaccggttgatgaatgtatttcggaaaaattatgatcttttgttgggcgtcttcaatccagagggatggctggaaatcacatatgttgatgaaactatgagaataggaagggacgacaaaagcaatatctttgtactggaaagatttgatgataataataacatgtagccactttccttcc

SEQ ID NO: 37314 - DNA, 731 bp, Glycine max
  Clone ID: PAT_MRT3847_133696C.1
tacggctgcgagaagacgacagaagggggccgtccccaaaatcccttcttctctctctcaattagggtttgcgttttcacactctctcccacacactcctctctctctcgcgtttcaatgcctgccaaatccgtctccaaattccaaacagtgccaagccgttctattttcaagcgaattcggcgttcggttcagttcatatcacttcttccccttattttactatagggctcctcccatggcgccgagccgcagaaggggcgtcagtaaggcggcagcggcggccgccgcttgccgccagttccaagtcggcgatcttgtgcttgccaaagtaaaggggttccctgcatggcctgccacggtaagtgagccggagaagtggggctactctactgatcgcaagaaagtgcatgttcacttctttggaacccaacaaatagctttctgcaatcctgctgatgtggaagcatttactgaggagaaaaaacagtctattcttggaaaacgtcatggaaagggtgctgaatttggtcgtgctgttaaggagataattgaagtttttgagaaattaaaaaaagagactcagcttgatgaaactggctctggtggtgatgttgctaatgcagatgtttcaaatcctgttaactcatctgccaagtatcagacagatgctcctgagttggcacatacattaccaatgaattcttcaaattctattatcaacaaacatg

SEQ ID NO: 37315 - DNA, 251 bp, Glycine max
  Clone ID: PAT_MRT3847_133697C.1
gggtcgggaacgtgtaagggtttatacacgttggagcaaatagtctttggaagaattgggaaatcattttttggattttttgtttccttggaaagctggaagcatatgcagtcgaaacaaaaagccgtgccttgtggaaaaggaaaagtaggtttttttcaaagtggagactcagccgtaattttaagctctaaagatcatcatttttgaccccccaaccctacaaacgtgacccaggaatttccccaact

SEQ ID NO: 37316 - DNA, 254 bp, Glycine max
  Clone ID: PAT_MRT3847_133698C.1
aaacttggtgttttctttcttgtgctaagaaggatctatatctatatccttgaattatcgtatcttttatatctttctaaatcgatgtttgactgatgaccattattgaacctttcttttagtattattactattgctataactatgctacttgaatttatgacacctagggtaactttcggggatttaattattgatgcgctcacgaatccaatctcttgcacaaacttgatccctggtatcatacgaaaaca

SEQ ID NO: 37317 - DNA, 209 bp, Glycine max
  Clone ID: PAT_MRT3847_133699C.1
tttggattttcccaaaccaacccaacactagggctcgcgttcctttaacccagtcactattctcttcttttctactcaacgaaaaactatttctaaaaacaattcacaaaccattgctcttccctctccaatgatattaattgctacctatcctataaaccatacatctcctgttattattacaccaaaccacattattatactcttaa

SEQ ID NO: 37318 - DNA, 423 bp, Glycine max
  Clone ID: PAT_MRT3847_13369C.1
aattcggctcgagacggctgcgagaagacgacgaagggaagctaagaggcggcttcattcatttaaaggaaatagtcttaagacatgggatgaggttatggagaaatttctgaagaaatattttcctgagtctaagactgcagaaggcaaagccaccatctcttattttcaccaatttcctgatgaatctttgagtgaggccttggaaagattctgtggtttattgagaaagactcccactcatggattcttaaaacctatacagctcaacatttttatagatgggttaagaccacagtccaagcagctattggacgcttctcctggtgggaaaatcaaattgaagacccctgcagaaaccctggatcttattgaaaatatggctgcagtgacattgctattttgagagatagagctcacatt

SEQ ID NO: 37319 - DNA, 129 bp, Glycine max
  Clone ID: PAT_MRT3847_1336C.1
cttctgtgtttgactctgatctagagtctgcagattctcctcgttgttcttcgcattgctgttttcaattccgattcgtgcgataatttaatagcgatgggaggcaggtcaccgtcgaaaaacgataat

SEQ ID NO: 37320 - DNA, 521 bp, Glycine max
  Clone ID: PAT_MRT3847_133700C.1
gtagtaatagttctatattgaaaatccttaaacgtacgccattcctataataataataagtgacactataagaatagatacattgtcaaagtttcattcaccaactccttttggtttatacagagacagggagacaagacagagcagtacaggttactaccaatggctaccaaggtttatattgtgtaagacgttctaactttcctctggttttgtcctactttgatggttaagtcttaatcactttactattgtatagttcatatgaagttttaaatcctcgtatcctgagtctgctttattttctccattatataattaatgattgatggaatgtttttatttaattcttctcctttgttgattggatcagattattactcttataattttatcgagtatttgtagattgatgaattgggtaggagtggtgagtcttcggtagtagtggctttagggtttagactcttcgtacagtatgtgtcttacttatgaagaattgtcaccacagatagtcaact

SEQ ID NO: 37321 - DNA, 594 bp, Glycine max
  Clone ID: PAT_MRT3847_133701C.1
cacgcgtccggtttttaggggaaaatctatcgggtttttggttgggagtacaggaaaccggagagggctcctcctgcatgtccattcaagcctccagccaacagggttagtgaagtaagccaatgactaattttaattgtttacgaaaaagtttaatttttatgtgctactatcaatcataaattagaaatcatgatatatatatatgacttttaaagtagttattgtggaagttaacaaactttgctcgagcggattagaatggcagaggctttgttagtgctcaatttgcttttacttttagtatgttggaaataaccaatgtgatgttggggtgtgaattccttgttggcggtgcgcgatgagtgagagtgtaagaccacaccagtgttatcaatggcggatggcagaacatggcaaaaggcccaaattccgccttataaacatgccactgtgccttatggtgccgccatggcaggcctcccttcacaaattagctatggcggggtggcaaaaaatccgccacgccattccgccatggtggctatttttttaacatggaccgaactttacaactttacaggatcgaggaat

SEQ ID NO: 37322 - DNA, 467 bp, Glycine max
  unsure (1)..(467): unsure at all n locations
  Clone ID: PAT_MRT3847_133702C.1
acgaggaataatcgagacacagatcatagtgatcattttttaatttctcanatttatccgacgtcactgcagatccaccaaccgttatggctgccttcagcggtgatgaaacagcaccatttttcagcttccttgacaccacagctaccctcatcttctcctgtataggagctacctatagcacagcaaagagtgacatagacataacttccatagatataataagacctaanctaataataaagtcgattgttcctattatcataactaaaattttggacatttataaccttattattactattattatcagtaccaatattaatccaaaaaccaagtcctattacctctttaataattatacacatctctcttttaatcttacctatgactttactaaccttgctactaacgtaactattagtagtattgataatgccagtattgaagccagtacgcaacagcca

SEQ ID NO: 37323 - DNA, 326 bp, Glycine max
  Clone ID: PAT_MRT3847_133703C.1
aagggaacaaacttttaaatccacaatttttgaaactacaatttagcagttgcagttgtcccaaacagggtgtcctacgtaacaagaacaaaaactagggctttaatgggggttctgcatttggatttcccggtaaaaacatcagcagtagaaatcagtggcgatcaagtgatgaacgagaacccctgcttgggcgggcatttggaccaggtctacccctataacttctttctttatttggacctcccatttcactttcatacctattagcaccttctgggggaccactgtaccgggcataccctttttccttggcataaccattt

SEQ ID NO: 37324 - DNA, 805 bp, Glycine max
  unsure (1)..(805): unsure at all n locations
  Clone ID: PAT_MRT3847_133704C.1
ttgcatgcctgcaggatcagatatctattttgtacttgggaagtaaggcttaagtcgacgaaaaagttaggaaaggggatcatatggctagggttgccctcggggctcaagggtttagcgatgaagagtgccaagcaaaaggtcaataccggtacgccgatcaaagaagtccagtggcaaggccctttcagccaagctagcgtgctgaacagaaagtcgtagagtgatgacagcttcttcttcttgagtcattcgtgtgacaacatcaggatctcgtcgaaagacctcctctgcctatctctcccgcaagagaggactcgttatggcgcacctctttttagcagtctcgtcaataagataagattgcccctcccttcttattgatttgataaagggctttgtccactccctctcttcttagccgagcggagtgacggtttagtttaggctttagatgccactgcgaaagactctagagatccactctcacagcgtatacgcgacatccctatgtatacacaatcctttcaagcagctaggacagctagcaagcaagttatctgttcgcggacaagctctctggatgacaaaaaacatgctctttcatgcggaaaaaacacggtctttcgtggaagttggtcgatttgaagtcgctttatgagtgaaaatgggtcgatgacgaanaagacggngaaaatgatcaactgtcacattttgatgccagtttagggctaaaatgaactttcatccaaaaagaccgagaaaacgctccactggcaggatccgatcggaaataaccccatga

SEQ ID NO: 37325 - DNA, 198 bp, Glycine max
  Clone ID: PAT_MRT3847_133705C.1
agttggaatgttgagaaaaagaaaagaggtgaggggactttagtggatttacttaaagaaaaggtgttgtgatactcatgatagaatacaaatgttggaggagatgatgtgtaagatattaactgggatattggtgcattgctacagaggaagtgagtaaaatattacaatgtgatgcgttgggttggtgggagcatg

SEQ ID NO: 37326 - DNA, 818 bp, Glycine max
  Clone ID: PAT_MRT3847_133706C.1
ctcgagccgaatcggctcgagcatcagtctcttccacgcacgagaccagaatcccttccccgttcacgccactgcttctcccagcaccaccggtgacggacgacgggtgccgaacgtcgacggacgacttctctcctctctggcttttttccgatgtggttcaaatccggcgaggtagctcttctctcgccctttttcggtgctttccggcgaggtcccattctcttcgggtttccgttcagtttgataatgtttaagctttgatacttgatgcaaagttgctgttgcactatctaggaaatcatttggctggcatggacatagcacattgctatttaaagggtaatgctgattctgtggagttttgtccacatgattcctaccagaatgttttagcggtatccacttacacattacaagaaagttgtcagcccagttgacatggaagcatttcactcttcagtgttgatgtggacacaggtcaccttgacatggtttttagtgaggaaactgctgggatttttgacataaaatggagtccagctggagggcatgcaagtccttttctagctcaagcagatgctgatggatacttgaggattaaaatactggggggttgctgtaatggagtggaaggggctaatctaaaggagatcacaaatggaaaaatcagtaactctatgtgcctgtacctggattggaatccttcagctacatccatcacagtagggctttctgacggctctgtgtcgaatggttctcttcttgatccaagctagaaataccagatgagtggaaggcacatgattttgactttg

SEQ ID NO: 37327 - DNA, 636 bp, Glycine max
  Clone ID: PAT_MRT3847_133707C.1
ccacgcgtccgcttccacgcacgagaccagaatcccttgcgcgggcagcgccactgcttctcccagcaccaccggtgacggacgacgggtgccgaacgtcgacggacgacttctctcctctctggcttttttccgatgtgggtcaaatccggcgagggagctcttctctcgccctttttcggtgctttccggcgaggggcggttctcttcgggtttccgttcagatttattatacttttcttacaaggggtgtgtggtttacatttgtgttaaagcttgatccagggcagtttgataatgtgttaagctttgatacttgatgcaaaggtgctgttgcactatctaggaaatcatttggctggcatggacatagcacattgctatttaaagggtaatgctgattctgtggagttttgtgcacatgattcctaccagaatgttttagcgggatccacttacacattacaagaaagtgtgcagcccagttgacatggaagcatttcactcttcagtgttgatgtggacacaggtcaccttgacatgggttttagtgaggaaactgctgggatttttgacataaaatggaggtcagctggagggcatgcaagtccttttctagctcaagcagatgctgat

SEQ ID NO: 37328 - DNA, 253 bp, Glycine max
  Clone ID: PAT_MRT3847_133708C.1
ggctgcacaagctagtgtttcatcatcatctcttaccttctcaggcgaggctacaagacaaagtctcggaccaagatcactccaatctccatttggctttttaagaaaagcctacttttcttgttaaggctgctgttactccccctgtcaagcaaggatcagacagacctttgaggtttgcatcaaagctaactttctcctacttgcatgggacacttcccggtgactatggacttcgaccctctcgtgactt

SEQ ID NO: 37329 - DNA, 121 bp, Glycine max
  Clone ID: PAT_MRT3847_133709C.1
tttatagtaaggttttcaaacgaaacgtacccaaccattctttggcgcgtacaagtaaataccattacaattgggccatagaccgtacagtcatttttacaggaaaaaatgtgattcaacc

SEQ ID NO: 37330 - DNA, 281 bp, Glycine max
  Clone ID: PAT_MRT3847_13370C.1
gaacacattccagaatacagtcagatacattgtagtatcacttttgtctcagaatttgttcttttgagttatggcaagcgtaaaggttgcatgtgtggttttgatgtacatggctgtgaagagtgcattaatgatggtgcaagccgtgtcatgcaatgatgtttctgtgaacgtagcaccgtgcgtatcttagctgagtcagggtggagatgttagagaatcctgcagtagcagattgaaggacattctgggttctgccaacaacacctttgatagataac

SEQ ID NO: 37331 - DNA, 453 bp, Glycine max
  Clone ID: PAT_MRT3847_133710C.1
ctgttggtttttctatctgggatacttaatctagagagtcgcttacgttgacgaaaaagcatccgtgcttcgcacattccgagcggagcatcctaacgaaagcatatggatcttcctttattgaacgcaagagcgcacgctctatgctctggaagggaccttacgtaagtgtagtagcgatacattgtaacgccttatcagagatcctcgccctgcgctatatatcatggggactcgaccaatccgtgaattgccccatatactccgtaggcctgtttgatcatatcacaaccaaaactgccgaatagaactcagaggtcacaaacataacttcctgtcatttgtgctactgctacgtactactgtacctactaccatgtggtacctggatcaccgctcgcatgctttgttggattctccaaaaacgactgaaacttcaaaatctgaagaacc

SEQ ID NO: 37332 - DNA, 1532 bp, Glycine max
  Clone ID: PAT_MRT3847_133711C.1
agcagattaagtgcttcatcacatttatcagagatttcagttgaatgcacatcattaaaccacggggtgtactttccaattcttaaagatcccaaggcatttgaattatcgttggatgacagacttggcaaacaaggtggtgacggtttcaaactgattctatttgcaggtgatgcacccaacattgcagaatacactagcaagacatcctccaccgttgaagcaatgggtccaataatttccacagtcccagaatcacataatgacccctccatgcttgtccgcccgtaagttgtcttaaatcccaccacaccacaaagggaagaaggaatacggactgaacctccaccatcagttcccaatgcagcagaacatagtccagaagccacaattgcagccggacctgaagaagatccaccagtatacctgtcaggtgcatgaggatttcttgtagttccataattaggattatttcctgttgtacccatgcctaactcatgcatatttgctttccctatgaatatgacaccacaggtacgcagtcttgatacacagactgcatcctcctttacagtgcgtacctcatgcatccatgtagttgcacccttagatggatgaggataacaatctatgtcatctttgatggccatgaaaattccatccaatatcgataatggatttcctgcttcaaacctctgagtagatgctgccgcctgctcccggacttctgcagcatcaaacgatatcaatagtggtgtaggaggtttatttcttccattgtcctctataattgagatgatgcgctcagcaaccatagatggggttacttttctagattgataagcatgagcatagtcacgtattttccagtaccgaaaagatgcagatgaattttcccatgattcagcaacatcataatgtggaagacacttcagggcatactcaactcgatcttcaggtctcccatcttcctcaaggacaacaacaccaggctccatttcttgaggtggatattcaggtttaaacatgggttcctcgggtatcacagtgtggcgcagtatctcatccattttattttccttcttcaaaatattcataatgataggacctatcaggggagcttcaattatcctcacaaataatctaaatacaaatccagtcaaatgcggagcttgcacaacttcacgtttgtatttgatggaagataagtcaacgtccttggctggcgtcattacacgctttttccccatcttcttcagagatcgcgaaacactgatgaatgatcctttttctttcagcttcctagtgaattgtgatgtgagcgatgaagaagtaaactcctaagtggtaatagtaacgtttttcatttgtttggaagtgagagcgaagcatgaatggtagtgtgagtccggccctgtcattttcatatggattcttaaatgcgtttcatcttccaagctgcttctggttgctgaaaccaacaaactctctgactatccttccctcctttaaaatcttctacctaagctaat

SEQ ID NO: 37333 - DNA, 531 bp, Glycine max
  Clone ID: PAT_MRT3847_133712C.1
ctccgcctcaaaaaccactccaaaatcgccctctccctcttccactacgccaaaaccctccccaacccccctctctcccactcctccttcaccctcctcatcgacaccatggctaaggttcgccaattcgacgtcgcgtggcaactcatcgtcgaaatggaccaacgccaccacctcaccccaaccccttccactttcctaaccctaattcgccgcctcatctgcgccggcctcacgcgccaagccgtacgcgccttccacgacatcgacgccttctcagaaaccaaaacgacaccccaagacttctgcgttttgctcgacacgctctgcaagtacggccacgtcagactcgccgtcgaggttttcaacaaaaacaaacacactttcccccccaccgtgaaaatgtacaccgttttgatctacggctggtgcaaaatagggaggatcaaaacggcacagtcgttttttaacgaaatgattgataaaggaattgagcctaatgttgttacttataacgttttgttgaatgga

SEQ ID NO: 37334 - DNA, 340 bp, Glycine max
  Clone ID: PAT_MRT3847_133713C.1
tgtggacctcacagtgaggctggattaatttgccttctacaatgaaattaacaatgctagcatgctttaatcacagggcaagttgactggaatacttcattacactgaagatgatgaggtctacaccgactttgaagaccatctcatatcaagtattactgatgcataggctataatagcattgaataacaactttgagaaacttgactatagttatgacatcgagtggcaatacagcttacttatccttaacctaacttgaaatctctgacaacaaatctttctatggttctactgaaacaaaagtcgcttctctaaacattgagacatggtgtctagc

SEQ ID NO: 37335 - DNA, 277 bp, Glycine max
  unsure (1)..(277): unsure at all n locations
  Clone ID: PAT_MRT3847_133714C.1
gctgctctctgcatccaaacccgtcaacctttgctcattatgccataaataaatcaatcctaacagtaagtanagcataccccttttgtcgtcatcattgttttcttcctttaggactttcttaaaccccgtggttctcagtgtagagtacctaatgattcatacgattctatttagcttataaaaaaatttcaacttgcttgcactaatacagaatctgtgtctgttatgcanaagaatagacaggacatgtacttcagatttagtcacgaacaca

SEQ ID NO: 37336 - DNA, 308 bp, Glycine max
  Clone ID: PAT_MRT3847_133715C.1
tgcggccgcgccttgttgttatcttttttgcctcctcggaaccaatgcctaagggtggacgtggaacaacttgactaataactaccttatccaggaaatcagttgcgcctgctggcgcattgcctttccgactgaatatgagtgctaatattgcacccccattctttggggaagctgtgctctcagaatacaaaactggagggagcagttatctgattacactaccttttttcttactgattgacaaatggaccgcatcattacctcgtctcagaagacattatgcccagaacagcgccatggcaaac

SEQ ID NO: 37337 - DNA, 363 bp, Glycine max
  unsure (1)..(363): unsure at all n locations
  Clone ID: PAT_MRT3847_133716C.1
gccggaacaaggtgggtgagatttgcagcagctgcagcttctgcttgtgcttctgtctgacgcatgtgagaaccccataaccgaccgtgggttggactgggcacgcgggagcgctgtgagaggggatagccgagggctgtgatgaggcacgcggcggcggggttggggcgntggcgtgagggggtgggcggtggtgcgtggggagggatttgtggcgcgggtggggggcgctggggggggggggagggagcggggcggggggggggaggaggggggggaggggggtgggggggggggggggggtggggggggctggtgtgtggggcgggggggggggggggggggggggggggtgtggggggg

SEQ ID NO: 37338 - DNA, 437 bp, Glycine max
  unsure (1)..(437): unsure at all n locations
  Clone ID: PAT_MRT3847_133717C.1
ggaaccgtaatctccaaaccccacttcgtaagtctcatcaaaatgcattccttttcatctgggttttcagttttcttctctgggtcatctaggaattctgtgtttatgttcaaaattgctaaatcgtgggttggggttggggttggggtnntgcnctccncacctgtnnngtcttgtnttttcctcttcctcttccttttgttttcggttttcgatccttggtcttctctgtgttgattggggttgttctagatcgccgtgtcggtgaatgtgcgccggaaatgctcggtatttaattgtgtttcctcaactttcaatctagaattgtttgctgcaagatacatgctagatgctaccttagattttaacttgggtgttcacatattgatttgatttttcttctaattcatgattatggggttgctggatttatccga

SEQ ID NO: 37339 - DNA, 249 bp, Glycine max
  Clone ID: PAT_MRT3847_133718C.1
gtttcaacaccaagggaatcatggagtattggttggagagtgctaatttggatgagattcgccaggagactggggtgcaagacccttatattggtgaactgaaaatgcttaaaattgaaatggcccagatgaagaaagacatgcaagagctcattgccaagaagcaagaaaaaagtgaaatgtgcttgatggaggagacacagaaaagttttgtgaattggaaagctatgactgagcacgtgtaactga

SEQ ID NO: 37340 - DNA, 209 bp, Glycine max
  Clone ID: PAT_MRT3847_133719C.1
gatcctcctccatagacacgcgaggtctccaacctcctagctgggcgcaaatcctataggttctcccttagcagcctgtggacttagctttgctttatggtgccgttgattccaaaacgtaacccatagggtgtactagaacgtggaaatgcttcatcaccaaatggttcagtaccgtgctatgctaggccttgaagatcctaagctcc

SEQ ID NO: 37341 - DNA, 441 bp, Glycine max
  unsure (1)..(441): unsure at all n locations
  Clone ID: PAT_MRT3847_13371C.1
tctcgagccgaatcggctcgagacggctgcgagaagacgacagaaaggtcccaattgtatattaaattaagttatttttagttgatcaatgacatagtgttacaaagcttggtcatgaaataaatgacattatctctcatctatactctctctatataactaactttcccttgctaccttcatgtttctaggctctagttgtcttaggtctacaaggacaaacttgtaaggtcttcttctacttattggacccatccaaaaagtgttctcatcctctatattctaatcattctctgtttttgaatctatattcctagaaaaataattatttcatttatatgaacctagtattagaagacatcattgtacacanaaaagatanggttataagataattcattaattatgttgcgctaaaatataaaatgtaattaaatatga

SEQ ID NO: 37342 - DNA, 585 bp, Glycine max
  Clone ID: PAT_MRT3847_133720C.1
tgaacctattacatattcaatgggactttgatctcgaatgtggcaaattggcaattacttattttatggaggcatcacttttctgtttagtagataccaattactgtaggattttatttgtaccaagcaagagccctatatcaggggagagctgcaggatctcaacacacacattggccattgcaccatctatttctagctagcatttgttctctgttagctggaattgttggtggacttcttggtacaggttctggatttgttatgggtcctttatttctagaagtgggaattgctccacaagtagcaagtgccacagccacttttggaatgatgtattcatcatctttatctgacatacaatattacctgttgaatcgtcatgctgttccttatgctctcttacttactctagtggctgcaattgcaccattcctaagacagtatctaattgacaagcttggtaatatcttacaaagggcttctttaattattactgtcttggccttcacaataattgttagttcaattgcattaggtggacccggcgtatctgacatgatcttgaagattcaaaggtatgaa

SEQ ID NO: 37343 - DNA, 841 bp, Glycine max
  unsure (1)..(841): unsure at all n locations
  Clone ID: PAT_MRT3847_133721C.1
tttcttgatgcctgcacttaatcaacctatttgatgggaaacntatgtcatggctgaatttaaaaggtgttgtccccctcaccccaaaacagcatttcctccacatatagatgttcaggctgatggtgttaggattaagaggtggcaatgctggtggctggccttaacatggtccatttggaagctcaggaacagcataatgttctctaatgcaacttgcaatgctaataaactatttgaagatgcaacattccttctttgaacttggcttaagagctttgagaaagacttcactatccactttaaccaatggtccagtagcatttgacagggttttctgtaccagtagaggatggaacattgtggctactaaatgtaaatttcatctatatccatagaatggttctctctcagactatgtatgtttgattatggaaccatttgtatggtactcatattgctgtattctagtaactctggtactcccttctatatttataaaatattatctttactgataaaaaaaaaaaaaacatttcttcttgtccaaccaatgtcagacttgttatttcttcattttcaaacatgaataatgatcaatatgggaaatggtggattaaattcaaatatatattttattataaaattttgatagaaatcaggtttaaactttgaacaggctttaaaggtgttattcagctttgttttggtcttttctaatcttttttagtgaaaccattttgtgtggggtacatgtctatccaagaaatctcgtgtttagacattttagaccaaaccacanaacattatggaaagacgtaccatcaggctaatctctgct

SEQ ID NO: 37344 - DNA, 487 bp, Glycine max
  Clone ID: PAT_MRT3847_133722C.1
tggcttggaacctttgggctgatttatgtgcttgtttatgtgcttgcatggtcgtgagaagatcatagatggggatagacacccacgcgctcaggagatacacatcaaaaaattaaggtgagcgaaagaaaaaaaacgctaggcgcgctctcagtagcgctcggcttattagtagtaatagcggtcgaagtagtaggcataaagttcaaatgaagaatagaataggtactaacgggcggtacgacgggcctatcgtgtgcgacagaatcctagtcggcggttcctactccggcgcctctagtaagcggttccgctttatcttccgactcagagcctttcgtacctgttctcgtacatactccggtgtccctataacctgtacccatactggtgctcctgctggggatcgagactcctaaagggagtacaccgccgtgaacgcacgccgacgtcggtattattgcggggtcgcctccgttgtcggtcc

SEQ ID NO: 37345 - DNA, 597 bp, Glycine max
  Clone ID: PAT_MRT3847_133723C.1
tggggttggttaatgatgtttaagttgtttgaattactgggatgagtgaaataggaaagtcaactcttggccaaactttatatgaaagaatctctaatcaatgtaattctgattgttatattgatgatgtaagcaatgtttatcgactttatggtacattaggtgtataaaaacaattactttctcggtctctatatgaaagaaatccggagatttacaatttatccaatggaacacttctaacatggaagagactatccaatgcaaagacactaatagttcttgacaatgttgatcaagataaacaacttgatatgtttacaggaggtatagtttatctgttccctaaatgcacacggcagaggaagcataatcattataatttctagtgatccataaaatattgaaggcacacggagtagatgctatttatcaagtgaagtcattgaatgacaaagatgttgttcgattattttgtagaaaagctttcaaaagtaattatattgtgagtgattttgaaaagatgacttgtgttgtactatcacaatgtcaatgtcatcccttagcaattgaagtattggactcatctttgtttga

SEQ ID NO: 37346 - DNA, 265 bp, Glycine max
  unsure (1)..(265): unsure at all n locations
  Clone ID: PAT_MRT3847_133724C.1
gnttctcnctcttggcttnntccgcttaatttgtntatcatnnnttggccanaatagctctcncataagtcctaaaagactanatatcttcanacttgctgcatatntgtnatatatacanacatatatatacggtgcctctcgganagggtctaaganagggagataaaactcagananatggagangtgggtggcttggtgttgctgttggatttgtggagaataaggncaggttttggcgttgaactgnngangtgacanat

SEQ ID NO: 37347 - DNA, 342 bp, Glycine max
  Clone ID: PAT_MRT3847_133725C.1
gaccaggtccacaaaacaaccccaacaaattcacctaccgttttttcggagatggatataaatgattaacaaagacaaaacctgcacctaaattataacttatcctgatattccactttttaactcatttcctttgtcaacttaaattaagaacccaacttcttaatgaccattatctgtgggtttcatgaaaaagaccatcaccatttcactgggacatatatatttatttgcactgccatatccatgtatattgcaaagccatgatgttaactgcattatacattttatggctgaatttcctgatttgataatcatgaaacagaaaatccttatcaaaca

SEQ ID NO: 37348 - DNA, 417 bp, Glycine max
  Clone ID: PAT_MRT3847_133726C.1
gatttgtccatgcttcaaagaaatttatcacccttcaacgcggactggcaaaacgcacccactaggacatcaccatccatattgatgtcccatcagttgccgacccatggttccacttacttgatgaaaaaaattgatccccggagatgaggtagtcttctactaccggtttgatgaccatgcatgggaactgctggtcaggaaagatattgaatgggagaacgacgacatcaactttgaagaaatgtaattttcatttttaaatattttgaacaattgtatattctgatatcatccaacgacattagtattttcattgcgtttgacatgcacatcgaacaacttatttattttcgtggatgtccctgcgtgggattatttatattcatatatgatctgcatatttcgcgatttttt

SEQ ID NO: 37349 - DNA, 312 bp, Glycine max
  Clone ID: PAT_MRT3847_133727C.1
aaccaaggcaccggaaatgggtgctatgcccttacttgacaatataccatacaaaacaggctcaaaaaaatgatatcaaactgaaggggacaaaatggcttttgttactttgctccctggggaacatataaaaggaaaagaactatttaaattaatccggctgggggacccaaaaatttagatcggggccaaaacaaataggaaaaactgagttaaaaaaatatccctaatttgctattacccctatgtgggagaggggggggctcttaacctcatgattgaacctttctttccggagtacccaaatttaac

SEQ ID NO: 37350 - DNA, 355 bp, Glycine max
  Clone ID: PAT_MRT3847_133728C.1
agaaaaaaaggggttaaattgaagggaaatgagaagagtaatacacactactactagtattagttccatactctccagactaccgttaatggcggcatcattcgggaagaggatgcttactttcaacaagtgattgaagataagtacagggaaagggaaagacacttaaaaacaacatcttgatgatgaacttgaattcttaaggaaggtagcaaaagtttgcttgtaaaagtataaaggaaggtgccggagctactggtctcttcatgaccaactgattcatgtgaggctccactggcgacccctcacgaagaatcggtgtaggtacgcgcttggaagtcataaaaaaccacct

SEQ ID NO: 37351 - DNA, 187 bp, Glycine max
  unsure (1)..(187): unsure at all n locations
  Clone ID: PAT_MRT3847_133729C.1
gggagagacagaattgtaaatttcnnaatagcaattttgcttaattatgatacacacaccattttcctgaagaaacatccctaacctgttgtatattttacaaccccattcataatgaacatcagcatcatatcactacagccatatataacaaattttaactctgttcttataattttttcacctt

SEQ ID NO: 37352 - DNA, 623 bp, Glycine max
  Clone ID: PAT_MRT3847_13372C.1
tacttattatggttggtgtgattttacatgttggttctacacggttagtaagattcctttcttgttcttcacgacaaaaaagaagcaatgtggagaagaattttggccttagaggagccacttcttcccgtgtgagagaaccaagtccaagtgctgtcattcaagcagcaacattaaatcatttactatcatcatcttccaaagaaaaagcttgagttgacatgagctggataatgttccttcatccccaggatttctaagcattaagttgctttctaatccgtctgccaaggccaattctgtatattatagtggcgcttcatcagagggcatgacattttggtgatcattcattgcttctggctcacacattttggatgaaatgtttgttaacttcagatgccaccttgtaaaaactattcatgaacttacactatttttgctttcaaggattgtatatgacagtgatgatagcataccaacatacaaaatttgttttacttgcacttaaacaaattggtaaacagtttattcgtatgcagttgggatctttgccaaaagctgtggcttttgttagaagagaaatgataataaccccccctactattgactaatatttgttg

SEQ ID NO: 37353 - DNA, 306 bp, Glycine max
  Clone ID: PAT_MRT3847_133730C.1
gggaaccaaaaactttgttcctaaatttaaggcatttgggggttttttacaaaagttttttatggacaattacaagctttgatcaatgtaaacaaaagagttccttttttttttacaagggaaagaaccttgggcaaacaacccaaataaaagacgggaattttgttcaagggggaaacccgccttttagatcaaaagaaatcattttttaaatagttcccaaaaggttttacacccggcccctttttagctgcaagggctttcttggcctgttttggaacttttgggggatttcggacccttggg

SEQ ID NO: 37354 - DNA, 274 bp, Glycine max
  Clone ID: PAT_MRT3847_133731C.1
gaaagacaaaaaaaaagtattaggggaaaattggattgtgtttttaaagctggcaaagtgccacacgaaaatcatgacaaaaatatcatctttgtatagtacaaattttcattccactttttcccttttagtttaccatcaattttcaaggaattaaattcccgatcacgattctttacggactcgtgataaaaacctgccaaaccttgatccctccaacaagaaaaccactgaaaaccgggaacccacatttaggggaaatttgatcaaaccc

SEQ ID NO: 37355 - DNA, 265 bp, Glycine max
  Clone ID: PAT_MRT3847_133732C.1
tttttcttttttttttttttttggggggacccagacaaaagacacacgtgggattcttacacatgaccctcactggcgccataaattaactatttaaatgaccatcaacgatgcgtgttaactcaaaaatgcttacacacatgagctgtaacccccaaagatacgaagaaccctttcttttttttttgtattaaaaaatctgttcggccgataattttaacgaccgctccctcttttgtctgaagaagttttaaagcaggtagaa

SEQ ID NO: 37356 - DNA, 264 bp, Glycine max
  Clone ID: PAT_MRT3847_133733C.1
gggagcccattggaggagttattttaaaattggaaggttctaacattatgttttatatagcgtaggggccactaaaacccaagttaaaaaacccataaatgaattgccccctggggagggatctggcctatgtatctattatttaacagtagacccgtaatatttttttgaattactaggaaaaactaagtttttttaaaatccaaagcaaaacaagatttttgggcgctgggcccaacccttaataattactatcaattttgg

SEQ ID NO: 37357 - DNA, 436 bp, Glycine max
  Clone ID: PAT_MRT3847_133734C.1
agacttcacctctcccgccatctcgtgtgcgttcagccagatctgccgacaggtcaactgccaaggatggtgcattaaatgaattgcgtgcaaaacggttaaagcagcaagattcagaagcaaaccgcaggccaagtgaggcatctagaagttcagggcctgggcatttttcaccaaagcacaaacctttcccaaatctcagtagctcaagtgatagtgaaactgaaagtaagtccctgagtgataatgaagggttgagtgatgacgacagaatcatcgacagtgatgatgacaggataatgttaggatctgaagggctttcatttgaggatataaaagaaatcaccattcggagatcaaaacttgcaaaatggtttatggagcctttttttgaggagttaattgctgattgttttgtaagagttggtattggtcg

SEQ ID NO: 37358 - DNA, 410 bp, Glycine max
  Clone ID: PAT_MRT3847_133735C.1
aaatctttaagggaaagacgtcttaaatactgatttctaggccctttattgcactacgcgtattgaagcttgatgcaattcatatcaatccccgtttgtttcggttcagtgatgaagtactgagaccggggccacagccacggctgacctagtaccagtgggactcgtttacatttgttacccatataatagtattgctctaaatgggccctattgacattatggcttgttaaacataagcgctgagatattacagggtaggctgacacctcattgtttatgggactattgatgaggctgcgtcgcttacttataacatgaaagaaagttaacatgttcgaacataccctgaaggactagcgcccagcatgtcttattagtcaggccatacttagtcgggcatttaatca

SEQ ID NO: 37359 - DNA, 334 bp, Glycine max
  Clone ID: PAT_MRT3847_133736C.1
tgagaatctgatatctatgcctgacctcattcatgcacacttgtccaacgaactaaaccaccttcttacgaacggatggatctcttgctggtaatacacttaggaccacaggatctggtcccgcgttcacactaagcaaccaccatactactatggaccctactggaccatgtggaagctgtctatgtctgttcgcactgacgcttctcacgcgttgaaagaactacaagaggctaatactgctttccccaccggtttcatgcgtatcatctgattcaacaacgttcgacaagtgcactgcattatcttcatcgcctacaagcccccatgcttc

SEQ ID NO: 37360 - DNA, 333 bp, Glycine max
  Clone ID: PAT_MRT3847_133737C.1
gggaatccaataattcccatctgatatacaaatttttgttattcaattattggcgtcctaagaaatccgactcattacaaattttttgagacttcattcactttataaacttactaccataaactgcctaatggaccaacaacgcacaattttgtaccctgcacaaaaaaatgctggcacggccatattattggagcaattgacctccactgagtgggtataagcttaacaagatgaagtattggatcattatcttctatggcccactcaggctattcacccatagcttccaattgaaaaaccactcgttggctgaatttcacaacaatttat

SEQ ID NO: 37361 - DNA, 229 bp, Glycine max
  Clone ID: PAT_MRT3847_133738C.1
tactcccattgctgatgcaaattggcaatcacttgtgattgaatcctagtctcctgtactgattgaattctggactccataatgtggaccctgccgtatgatccacacgataattgactagctggcaggagaatatacaggtgtactagcgtagcacaaacgcaatactgatgagagccctttaactgatactaagtaaagagatagaagtatcacggctggcgtgtat

SEQ ID NO: 37362 - DNA, 279 bp, Glycine max
  unsure (1)..(279): unsure at all n locations
  Clone ID: PAT_MRT3847_133739C.1
agttgancctcaaaacctcctntgctgcagagggaaaaanggcttagtcccacaacattttccacacatacaacaanttncttaccaaatggattctacntcngttcagcnaggacattgatgaacctttgctgtnttnnagaaccnttcacccgagccagcttcttgtatnnantcattcagcncaaagccatggnatcagatggtgaacttgcgcgaatactctcaaacactaggcgtcctttcgcgaagtcttgnannggcaacntgggtggagtc

SEQ ID NO: 37363 - DNA, 248 bp, Glycine max
  Clone ID: PAT_MRT3847_13373C.1
cttgttgatacaactgtgattcctgcttcttcagtcattccaactggtggcctttctggttcccataaacaccacaattgtgctgtacatgttgataataaaaccagtacatctactactctagtagctactgataagtctcccagcaacgttcatggtgatgtgtctgccatttcgattgatcttgaagctctttgtaataagactacgagcttactacaatctccttctaggtctctacaacttcc

SEQ ID NO: 37364 - DNA, 420 bp, Glycine max
  Clone ID: PAT_MRT3847_133740C.1
gagaccatatgccacttatatcattgtttagttggaacggggaaaagtaccttaaaaaaacgagaaaagttaaatccaaatccaaaacataatgacaagaccgggtattttttaaacttcaaaaggggctttgcaaaatcaaaaacaacccatgacaaggggtctgcttaatccacttcctcaatttgggggccaacaccgtttccactggccgcagcaggaccattcttatccatgggtccacccggatcaccaccaggtgcttggtacatctttggtatgatggggttacaaatgctttccaactccttcattttgtcctcaaattctgcaggtttagcaagtggggtttcatacagccattggatagcccgcccaaatgcatcctcaattttcttcttattattagcagacaggttg

SEQ ID NO: 37365 - DNA, 229 bp, Glycine max
  Clone ID: PAT_MRT3847_133741C.1
cgaacaggagatcaagacgacattgaacactctccttgacaccaattctcagctcataaacaccaatggcctcacccgccctatcaacctgtggctcgctatacaccacgatccggcccactcgcttcgatcattatgatcgttgctcgcatatttgctcggcgaaacaataacacagcctcagtcgattccactatcccaatagcccgcccctaacgtatgtccacac

SEQ ID NO: 37366 - DNA, 474 bp, Glycine max
  Clone ID: PAT_MRT3847_133742C.1
gtttttcagattgtgttttatttatttttcaaatgttaaacataatatgatttttttttaattttcgcattcaaatacaataaaggataaataaatacataaatctttaacttgtttacaaaaaatgcatcaaaataccaaataaccttcttttataattgggaagtaaaaattaaatatttaaagcttaatctattaaaagattaagttaacttttctctaaaattatgatttgtattttttatgtaaaaataaaaaatacaatattaatgttacattcagaaataataaaaacaaataaatctaaaaaataaattattttctttaagctaagtgaagaaattaaaaaaaaaaattggtgtgagtgataaaaaaaataaaactcatgaccaatttaactccctatcgatatttaaaattttatatattaaaaaatcagtttaactatatttctgctaaaggtatgaattgtat

SEQ ID NO: 37367 - DNA, 470 bp, Glycine max
  Clone ID: PAT_MRT3847_133743C.1
ctcgaagttcagcaaccaagccgctgcacgtaacaatttggtgctctcaacactaacaaaaagataagcagaatcacaaaatatcctaacaatattattcttttctaacaacctatctaaatagcgcgttttgcttcctgcagtactatccctatcatatcctgtctgctacagctgctattcagcccactaattggtctgctatactaatcctctctgctatggaagccactgtagtggccaagggccgctccattctactgaactgctataggacactatttaaagccctgttttaatcaacaacttgtgtttacacgataaaaaatgagagcatttttgaaaagatgatggtgcagatttttctgcattggactgaagatttaatatttgctttctcttttttgcttttgcccaatataggtggatgggtgacattaactgcaaaattgactgtaatggataggagg

SEQ ID NO: 37368 - DNA, 500 bp, Glycine max
  unsure (1)..(500): unsure at all n locations
  Clone ID: PAT_MRT3847_133744C.1
ggctcggcgngttcatgcttcctctgcaactctctctctctcatcttacgtgtgaatcattgtcactcaaacgacgccggctcctctccgattcctaagcgacgtttatcaggtttcttggtgctgatagtgcattgtacattattatttctacatgtactgatggtgttgaaggtgctttccaatcttggattaatggggagacaatagaactgatgagtgacgactttgcatgttctgttttctcaggatgtattagcatgatatgccgcaattatggagtgttgttaagccataatataagacgaaggtatattgtgccaaagaatctctgttaattggaagagttgtataggccatgttcagctgcattgtgtcctttagatcatggtcatacttcttctgggattggatggttgcctggcgtgagatggcttagcaattgttctgagggtactgaggcaatagactggtcacatacaatgtttagtgatgcgaga

SEQ ID NO: 37369 - DNA, 381 bp, Glycine max
  unsure (1)..(381): unsure at all n locations
  Clone ID: PAT_MRT3847_133745C.1
tacggctgcgagaagacgacagaagggatcattaaacagacatacagagcaaaacacaagtgtgctagtgataccccgggaagttgcccagccagaacacccagaaatcctgttgttccaaccacagtaaaaagaaaagctgcctgcaccatcaaagatttttgttacttgttggttaagaatgcatacaacttacaagaaacatgtgttttcaagattgaaagtcttaatagaaattactagttgccacatgtatacaatcgagatatttacatattacatatttaaaagcactgctcattccatttgatactaagaattaaaagatttctgaaactcacatcgtttctgacactangaattgcaagatctctgcgtttt

SEQ ID NO: 37370 - DNA, 559 bp, Glycine max
  Clone ID: PAT_MRT3847_133746C.1
tccacgcgtccggtgaatttgccaatttcaatggcagttgtaacaaacagatgattgttttgccgttggacttaaattatcggaagccgattgcctttccgatcagaaaataagtgcgcgaatattttggaatactttagacacttcgaactttttccattgtcagtgttttccattaaaggacaatcaaaaacactgaaaagaacgggggaaaatattaaagggaaacggcggggattggttgaaggaaaaaagattgtgttaagagttgctcggaaaagttcaaaagctaaaaaagaataccgacaatgatggatcatcatcatcttccaaagattcatcatcgaaagattcctcatcatccaagggatcatcttcgcacaaggattcatcatcaggacattcatcagaatccaaagaatcacattcttccaaagattcatcactgaaaccatgttcaccaaacgaagattcgtcctctgtcaatgaaaatccctcaaattccaaatcattggacactgtctccacatccgaagcctcacatcgcatattgaagagt

SEQ ID NO: 37371 - DNA, 301 bp, Glycine max
  Clone ID: PAT_MRT3847_133747C.1
aagacaaacagggaaacataaggcctccccccctttgggtggataaaataaaaccatccccaagggggtggggcaatggtgcccaccaaaaaatgtcatgtacaaaccggattttttaaagcctttatgctattgggaggttctcttttgaaatccaatatgcaaaaaaaaatttgtttctcaacaaagtttttggaaaaaccttcccaaattgtacatgcaaaaaaaaccactaggggggggccccccccccaaaggaaaaaaaaagaaatgatatcccttttttaatcccaaggggaaa

SEQ ID NO: 37372 - DNA, 1110 bp, Glycine max
  Clone ID: PAT_MRT3847_133748C.1
gtcggctactcgtccgcccacgcgtccgcccacgcgtgcggcgagaagacgacagaagggtacggctgcgagaagacgacagaagggtacggctgcgagaagacgacagaagggtacggctgcgagaagacgacagaagggtacggctgcgagaagacgacagaagggtacggctgcgagaagacgacagaaggggggttcaaaccttcatcagctatgcgattgtctccttgtgcgaacaccacttcaatgagttccggatcgggttcacttttgtggttccggaagggtcttcggatccatgacaaccccgctctcgaagtcgcttcgcgtggagcctctcatctctaccctgtctttgtcatcgacccgcatttcatggaacccgacccgaattctttcgcacccggatcctctcgcgcgggtctgaaccgcatcaagttcttgctggagtgcctcgttgaccttgacctcaacctcaagaaccttggctcaagacttttgattctcaagggtgaccctgctgaagttgtcattcgatgcttgaaggagttgcatgttaaaaagctatgctttgagtacgacactgaaccgtattatcaggctctggatgttaaagttaagaactttgcacttgctgctggaattgagggtttctctcctgtaagtcatacactcttcaatcccacggaaatgccacacaagaatggagggaagccgccgcttagttatcaatcgtttgtcaagcttgctggggaaccaccatcttctctctctactgtgtactcttcacttcctccagttggcaatcttggaagttgtgatatttctgaagttccaacaatcagagatcttggatatggagatgctgaacaggatgagttctctcctttcaaaggtggtgagtctgaagcattgaagaggttagatgaatgcatgaaagacaagaagtgggtggcaaactttgagaaacccaagggtaatccatctgcatttcttaagccagcaacaactgttttatcaccttatctgaaatttggttgtctctcccccagatatttctaccagagtattcaagatgtatataaaagtatgccgaagcatacatta

SEQ ID NO: 37373 - DNA, 417 bp, Glycine max
  Clone ID: PAT_MRT3847_133749C.1
cttgggaatctctcaagagaatatcaaaaactgtagacggcctgtggtggatgcttaagcgtcttaacacacctgaagatcataatgtccgcgctccactcgtgcgcataaataaaaattctgagtgaaatggtcctacatcaacaatagctgttccaataccacaaaggccctgtcatatgtggcgaaaactccgtctatcttatatgatacggaaacttcaagcctttccagctagccatcatgtttcgattacatcaccgaaactttcatatgacaaattcacagcctatccattcgctgtctcgagatggaaaggcacccaataatactaccaactgataaaggcagcgccaaaactttccctaactctcggtacccaaatgctctgcgagaactactccctaggaaaatcac

SEQ ID NO: 37374 - DNA, 342 bp, Glycine max
  Clone ID: PAT_MRT3847_13374C.1
ctcgattaaggaagaaagagatcgggaggtaaagaagaagatttaggtatgtaacacttttcttcctttgttccctctctttatatttttttgatggtacgcacttagtttctacatatcatgctttgtacagtagtgtcaaaggcatcatgcccttgcttgcgtaattaaagactaaccatcaacctgtacaaacatgacttttaccttaataagtcttgatcgaactaaaaaaaaaaaaaaaaaatatagataataaattacaaaaaattatacaatacaaaaatcatatactaaaaataaaattatgataacaacatttaatttcacatgaaaattaca

SEQ ID NO: 37375 - DNA, 497 bp, Glycine max
  Clone ID: PAT_MRT3847_133750C.1
gaagacccgtatagaatctgccagaaaaaaaaaaaaaggcgaaaaacgaaattcggctcgaggtaggtttttgcatttactttttttgcgctgattttaattttctaacatgtaaaaaatccagcgagagtggaagcaaaatttctgggaggaagaagagaaaacccatctgaaacccacccaaaatatatataaaaaaaaagagagagagagagagagatgagagcgtttggttagatgtaattctcgtgagaaaaaattccatttcagagatttattcttttgccacttcagatcacagacagaaaaattatgtgttgatgtgctaatattattattattattattattattcataaatgctctgactgaaatttcatattgcatatccttgaattcgcattcagttggtggtcgtagcgctgattttcctgttaatttgaagagaggttttgcgactcgaaacgacgtcgtataagacactttgcgcttgatta

SEQ ID NO: 37376 - DNA, 495 bp, Glycine max
  Clone ID: PAT_MRT3847_133751C.1
tacaatactttgcttggtgcttgtgctcatagggggttaggtgatgaggctgaaatggtgtttaggactatgaatgagagtgggattgttcctgatattaatacttatagttatcttgttcagacgtttgggaagttgaataggcttgagaaggtttcggagcttcttagggagatggagtccgggggtaatttgccggatattacttcttataatgttttgttagaggcttatgctgagttggggtctatcaaagaggcgatggacgtgtttaggcagatgcaggctgcggggtgtgtggcgaacgcggccacgtatagtgttttgttgaatttgtatgggaagcatgggaggtatgatgatgttcgccatatttttcttgagatgaaagtgagcaacacggaccctgatgcggtgacttataacattcttatacatgtttttggggaggacgtctacttttaggaggtggttcctttgtttaatacatggtgg

SEQ ID NO: 37377 - DNA, 662 bp, Glycine max
  Clone ID: PAT_MRT3847_133752C.1
cagcatggagaatatgtctctctcggaaaggttgaggcagccctatcatcatgtgactatgtggataatataatggtttatgcagaccccttttacgattactgtgtggctctagttgttgtttcatatcagtccctggagaaatgggccgaacaagctggtattgagcacagaaatttttctgatctgtgtaacaaacctgaaactatcactgaggtcctgcaagctatttttaaggtcgcaaaagctacaaagctggtgaaatctgaaattcctgcaaagattaagttgttgccagatccatggacacctgaatctggattagtcactaatgctctcaagataaagagagaacaactgaaagctaaattcaaagatgatcttctgaagttgtatgcatgaaatatttaaccttttgtcaatgtattgtttagtgtaagttatgtaatttgtattttcaatatctgaaagtaatatagctaaacttgatgcatgtgtgttaattgtttgtaatatatggcataaaaaagacacactgcacattgtacttgcctgtgaacatgaattatgtacataaaggaaaacgtgttccattagtggttgtacacttgtacatatgcattatatagtcatgcccagtaatggatagtttttttatgagc

SEQ ID NO: 37378 - DNA, 526 bp, Glycine max
  Clone ID: PAT_MRT3847_133753C.1
actaacaacatgtaaattttattttacagaacaaaaaaagtgttctacataaattttgtgtttccactggtctaaatgatgtaaatttagttagcattgttatttattaaagtttgaatgattagctttaataaaagaaattcactaacatgtattacaacactcaagtctaatatgtaaatttaagaaaaaccgttggtataatgacgtgtaggctctgaataaaatatgttttgtttgaagaagaagcttccctgtcgacgattttgaccggaaatccacctttcattagggaggattaaaaagatatgaggtgaggctcatcccctggagtgagcactggaaccaccgtgaacctcctgagaataccagccaccaaccttttgatttgcataaaggccatttttctttcccaacatattctgggaccagcctgattcaccgtgttagttaaggaattcctttccacaaagtttcactttcctgtttgaagtttttccaaccaccttttttggccttaaccgaa

SEQ ID NO: 37379 - DNA, 1389 bp, Glycine max
  Clone ID: PAT_MRT3847_133754C.1
ccccagtactcaactctctccctcacacacttacctatccttacatcatagcaaaaatgggtgtcaccgacagaatcattcagattggaggccagatctctggcaacccgaccgctggcggtcgcgagaagatcctccagaagaaccctgacgatatcgttgtcaccgccgcctgccgaagcgcattcaccaagggaggccgcggcggtttcaaggacacccccgctgctgatctcatggctggtgttctcaaggccatcctcgaccgctcaaagatcaaccctgctctcgtcgaggacctatgtgtcggaaccgttctcgctcccggtggcggcgcaactgagatgcgcgccgccagcttggtcgccggtttccctgaatctatcgccgtccgaaccctcaacagacagtgctcttctggtctccaggctaccgtcgatgtcgccaaccagatcaagactggcatgatcgatattggtattggtgctggtgttgagagtatgtccctgaactatggccctggcgctgtctccgagttctcagaagcctttgagaaccaccccgaggctgccaactgtaaggtgcccatgggtgtcctctctgagcagatggccaaggacctcaacgtcacccgagctgcacaggacgccttcgctgcctcatcataccagaaggctgtcaaggcccaaaaagcgggactctttgacgaggagattgctcctctcaaggtcagtttcgaggacaaggagggtaacaccaaggagattaccgtctccaaggatgatggtgtccgagatggcatcactgctgagtctctgggcaagatccgccctgcttttgctaaggacggttctatccacgctggtaacgccagtcagatttccgatggtgctgccgctgtcctcctcatgaagcgatctactgccgagaagcttggacagaagatcctcggcaagtacgtttgcgcctcgattgttggtgtcaagccccttcttatgggacagggcccctggaaggctatccccaaggctctcgaccttgccggtatctccaaggatgatgtcgatatctgggagatcaacgaggcttttgccagccagtgcttgtggtgtgccaacgagctgggtattccccaagagaagatcaaccccaagggaggtgccattgcctttggccatcccctaggctgcactggtgcccgacaggtctctactcttctatatgagttgaagcgaacaggccagaaggttggcgcaacatctatgtgtgtaggaactggtatgggtatggccgccatctgggttgccgagtagagtttgtgtacaaatatttacagcatgtatcaagagcatttagtatttatctcaatttatcctttctagaaccctt

SEQ ID NO: 37380 - DNA, 729 bp, Glycine max
  unsure (1)..(729): unsure at all n locations
  Clone ID: PAT_MRT3847_133755C.1
ttgtaaatacagaatttttcaacaaagacgattttacaaaaatcatcttaaaagactatcattctaagatggttagaagtgaatggttgtcatctcagggctttgaagccctttttcctttcgctctcgcgaaatccagcagtgcctatactcacacagtcacaaaccctaacaatgacaccaccacattttcttgcttctcctccctttagccatgcccgaatcacgtgactgtcgcgtaaccatcattgaccttgccacctccttatcccgcttgtgtcccatttatctacaatgacgctccaactctttgtaccccccccccccaaagaaccgccaccctcaatagcggaagagcttgtgcttgtcccgactcccaaaacataccacaatctactgtgtgacatggtaaaggatgtgttctgttacgctgcgtgcttccgacgtggtaccctaggatccaattcttctactcttttcttcatcacagatagcttgactttaacattttactccgccatttttactttccgattagagtagaaatcaatttcaattttttttcatccttaagatactctacggagatcttgtgttttttctccgcctcatccacgattatgatactacttctgtgcaaagcattgatatggttcttgggaccaaacaattgtctctcttttcttcctttcaattttgttgtcattttannnntgtaaggctnnnntc

SEQ ID NO: 37381 - DNA, 324 bp, Glycine max
  Clone ID: PAT_MRT3847_133756C.1
ccgggggtgataagactcaaaacacgattttctatttgtttattgcatgattacctagagcacatccaaaaaaaggtttcacttgctaaaatcctctgtggcacaactttccgctttctgtcacttgaacaattacaaaatgtgcaggcgcgcacaatctccttaattacccttggctgtgaaatgaaattatatctcatttggtatcaacaactcttgctttaaggactctgaattgaaaattcctgaaaatcccgattcttgtgttcgggggatgtgactcaaccttaacaaatccccaatatttgaactattgacattata

SEQ ID NO: 37382 - DNA, 384 bp, Glycine max
  Clone ID: PAT_MRT3847_133757C.1
gcctacactgttcgccttgggaacgaggccgggaaaaagcaaaaattcttgggcaccatggattgaacgaccataaagggtttaagggaacccccccggcgcatataaactgtggctctatatttacacgactcctggttgccgcgctatttttatttatactttgaaaatgagcagcggccgggttccctttgaggcctgttgaaaagaaaagacagaaattgttgaaaaagcatttttaattattctccaaactataaagaaacaaggggtggcccggaccccgattatatagatataaagactttcgatggtgtagccgcaccctcctagtagctacttggttaacgcgggcttcacgactggccctcagtaatcacaggc

SEQ ID NO: 37383 - DNA, 183 bp, Glycine max
  Clone ID: PAT_MRT3847_133758C.1
ggagccaaaagttggctgttcttgaactaaataactcctcgtgtggaattaacgcacccgtcattataactaatacttacagttcatagtgctcttaagtacatgaaggaagatgattctgtcatccaagatagccttaaattataaacaagcaagtctattgctttggctaaattacaaggg

SEQ ID NO: 37384 - DNA, 235 bp, Glycine max
  Clone ID: PAT_MRT3847_133759C.1
cacggggttcaaatcatgccgtgtttcgctgtctctctgatcctttcgcattctcactacccttttgatttgtgtcaggaaatcatggatgattgatcaagtccaacaccctacattcatggataaggttgctggtcaactccatctcggttctggtcgttcatctcgtattacaacgttatgatggagcctagcgccacccatctatgtagcagataccctcttttgggaatta

SEQ ID NO: 37385 - DNA, 735 bp, Glycine max
  unsure (1)..(735): unsure at all n locations
  Clone ID: PAT_MRT3847_13375C.1
ccacgcgtccgagccgcacgagaatgtttatcaaattcgatttacaaaagaaatatttcaagattacaatgattatttgaatcgtctaaatcagtatcgccagagggtttggacatgcaaaattactggaaaatctggcttgacttatgaagaggctctggtgtcagagaagcatgctgctgagaaagttcaacagattccggaagaattagtggcacctgctctaaggattatccactacagcatgctccctttgaaggatcttgctgattctattgctgaaaagttgcaggaacagttgtttgtgggcgctcaattgtatggaaaaaagaatgacagagtacgtccatgtaaagtattgaaagtgatgcaggaagatgctgaaaatgtccgctatgtggtagcttggcttgatgaaaacaataatattattgaaagagaagaagtcagctctcaagatttggtacagaagaagccatgttttagtagaaatattttgaagtcttttattcgcaaatctacatatcgaaatgctccttgggttntacatgatanactggcaaaaaaacatggaatctctactgacattccagaggagttaaggagaaagtttttctttcacaatgggctttgtggtctgcaccaaaaaaaaagaaaaaatgagggaagagtcaatcaaatatccaatttgatgatctattaggggaagccctagtcccagatgatccctgtttt

SEQ ID NO: 37386 - DNA, 681 bp, Glycine max
  unsure (1)..(681): unsure at all n locations
  Clone ID: PAT_MRT3847_133760C.1
gaagcttggaaaatagggactgtaaagcaacttagaagttcaagactaggacttgagaagagtgaaagggcaggtcgtccaccaaccaggaaactttctgatcgtaaggcatatgcacgccagaaacattcagcaattagtgcatcagcagattttcttgttgggtcagaagatggacatgaagaattattggctgctgtcaagggtgttatcaactctgctcgtgctttttccagccaattctggaggcagatggagcctttctttggtttgatgagtgaggaggatcttgcttactggaaacagaagataaatcttgaaccaagtggattgatgccaactccagttccttcatatatagatgattgtgaagctgtggctaatgggtttgggttaactggctctgaaagagattttgaacctggtgatcaaacgggtgctggaattgtagcagaacagttacaactagctaaaggagattctaatggaattcccttctgtcaaaggctaatatctgctctgatttcagaggagtgtaacagtgaaagtgaagatatcatgtttgatgcatgtgatactgaatctgaggctgacggagagttggatttgagaagtttggatcaccattctcgatctaattctcatcttgcttggcgttctccttacaacggntataggata

SEQ ID NO: 37387 - DNA, 201 bp, Glycine max
  Clone ID: PAT_MRT3847_133761C.1
ttttccatattctgaggctctgctgttattggaaatagagtgaacatttgtagaaatgtcacatcagttttagttgtatcatcttttcctgtaattgtttcacagggacatgcaataaaacttacattgtaaaaaaaaaaaaaaaaaaaaaaaaaaaaaaaaaaaaaaaaaaaaaaaaaaaaaaaaaaaaaaaaaaaaaaa

SEQ ID NO: 37388 - DNA, 166 bp, Glycine max
  Clone ID: PAT_MRT3847_133762C.1
tatgctttccttctatgcaccatgtgtctttgctgagaaggtctaccatgaacaggtgtcactggcagatattgccgacggtgcttttgatccagtcgacaagatagtcaagggcgatcctggctctggaaagctcatggcgtgttggctgatgtgcacgggagaa

SEQ ID NO: 37389 - DNA, 161 bp, Glycine max
  Clone ID: PAT_MRT3847_133763C.1
ctcagtttggtgtatgcatatttcattaagaaaagttgtacaatgcaggttaacaatgcagggattggtggagctgtaattaaagacacagattcattcacttcacttctcttgaagcgtggggcgagtatcttttccttttttgggttatgagaagagct

SEQ ID NO: 37390 - DNA, 1036 bp, Glycine max
  Clone ID: PAT_MRT3847_133764C.1
tctgactgctgcggctgccacagctttgcgtggggctgcgacattgaaagcgagggccctgaaggaagtgtggaatattgcagcagtgattcctgtggagaaaaatttggcagtagctggtggacataataacaacaataacgcaagtaatggaaattctaagagtagcttcagcggtgaacttgtccctgaagaaaatttcttgggtatatgcagtagagaattattagccagaggttgtgaactcctcaaacgcacacgcaaaggtgatcttcattggaaggttgtatctgtgtatgtaaacaggatgaatcaggttatattgaaaatgaagagcaggcacgttgctgggaccatcacaaaaaagaaaaagaatgtggtgcttgaagtgatcaaagatgtacctgcttggcctggtcgccacttgcttgaaggtggtgaggatcgccgctactttgggttgaaaacagtgatgcgtggtcttgtggaatttgagtgcagaaatcagagagaatatgatgtgtggactcaaggtgtttcaaggcttctctctattgccgcagaaaagaacaacaaaaacagaatttgagccttttgttttgggaatgtgtaaggagggagaagaaattttggcaatgggggaataggaggatcaatcaaggtggtgttagtagcattatagatgttttgtacattgtaaaaaggttaaaaaaactaaaggcaaagttaatgccatatggggtctcacactttactcttggggatctggatggtgtttttttttttgaatgagaaagcgaaacatttgaactgaagtgtgagcccatagtgaaccaattgaccttttgttccttcattattctggaaagaaaatgagtatcttggacttgggggggagtggtagtcaaaaagaagtggaaagaatcatattggagggaaagtataatctttaaggacaaatatactcttgtttgatctttccttgtttgtacatatgggtttggactttatgaaaaaagtggtcaaaagtctaaaa

SEQ ID NO: 37391 - DNA, 394 bp, Glycine max
  Clone ID: PAT_MRT3847_133765C.1
aagggaaaggggggggttttaaattgccccccgaatcattgggggaggaatttttacaatggcaaacaggggtaaaaacaattggtctggggggcaaaaaaattgatttttaaatcaaaaaccaacatggggtgggaccccaagctaaattgcagcacaagcgggggaacaagaggtaaattactacattaaaactttgctacaaaccgaaagctggacgggcaaaaaaaaaaagctttggtttaacctgacatgaagcccaaaatgctttaattgcacccccaaaaaaaacaggggtttgatatatccctatggccggagccccccacgaggcaacattttaaataactttggtcccatcccaagcctttcggagctttcccttttttttttt

SEQ ID NO: 37392 - DNA, 1093 bp, Glycine max
  Clone ID: PAT_MRT3847_133766C.1
caacaaccttagcagttaattagcacaacacaaaaggagagagagagagagagagagagagagagagagagagagagagagatggggagaagcccttgttgttcaaaggagggtttgaatagaggtgcttggacagctcatgaagacaaaatcctgagagaatatattagagtccatggtgaaggaagatggagaaaccttcccaaaagagcaggtttgaaaagatgcgggaaaagttgtagacttcgatggttgaattatctcagaccagatattaagagaggcaatatatccccagatgaagaagagctcatcatcaggctccacaagctcctcggaaacagatggtctttaatagctgggaggcttccaggacgaacagacaacgaaataaagaattattggaacaccaatttagggaaaaaggtgaaagatggtcaccaaacaaccactggaaacaacacacagaatccaatgcccaacccatcaccctccctatctcctcctaaactagattcccatgttgtccgtacaaaggctaccaagtgctccaagttgttattcctaaacccaccccctcacccatcaatgcagaacaagttcaagactgaggcagaagaagaagaagaagaagcaaggcttgtgaatggtgtaattagaaaccaaatggaacacactacatacgacaacgggttcctgtcgtttccggatgaagaaaaagaactctcaacagatttgctcatagatttcaacgtgggggatttctgcttgtctgattttctcaactcagatttctcaaactcgtacaatttcagctgcaatattaataatgttaacaaccacgagcagttatcgccttgttcggaccaacctgatcctatgttctctgatgaagttctcaaggactggacacacagcaattttgcagacgaagcgaatgcttccaacaatcttcgttctttcatttcgttccttgagtccactgaggaaagattaggagaatgataatggcaacaaatattgtacttttgcacgtattaatatgcgttcaccaataaaattcaccaattcgatcgctttaaaaaaaaaaaaa

SEQ ID NO: 37393 - DNA, 1032 bp, Glycine max
  Clone ID: PAT_MRT3847_133767C.1
tttattatttattttattcaataataaaactaatgtaaaaaaaattgttaaatctttgtatggtttgaaacaagctccaaagcattcacacaaaagtttgattaagttattcttttgtatgattttcaaattaatgatagtgataaatgtgtgtatgtgaaacaatttgatgataatggatgcgtcattttatgtttgtatctggatgacatattgatatttggtagtaatatgcatttcataaatgatgtgaagtttttcttgtttagaaattttggtatgaaagaccttggttgtgtagatgtgattttgggtattaagcttataaagaaaaatgatgacatgacttttacccaatcttagtatgttgaaaagctattgaagaagtttaattattttgatgcgaaacatgcttttactccttatgactcatccatcaagttaaaaaaaaaaaagagtaaagaaatttcttcacataaatattctcaaagtatcggatctttgttgcatttgacaaacttctctaggcctgttgatattgcacatgcagttggtagattgaaaagtaattgagggatttagtgatacaaaattgaagttctgattttgatgaaataaaaataacaagtggttatgtctttgctttagctagctgtgtagtatcatgataatctactagacaaattattatttcacatgaaagcaaaaattattgctttaaatactgctactagtgaggatgaatttcttaaaaatgtattatgtgatttgtcattgttaaataagcgtatacctccaattccaatgcattgtgatagtcaaattgttatatctaaagtgacaagcaaaattttaatgaaaaaaagaagacacttaagagtgacacataagtctataagaaatttgatttctcatgatgtcatttctcttgactttgtcaggtcaaaaaataatattgcggatccgcttacaaaagggttgatgtgtcaacaagtatttgagtcgtcgaggggaatgagattaaaacccatt

SEQ ID NO: 37394 - DNA, 186 bp, Glycine max
  Clone ID: PAT_MRT3847_133768C.1
ggctcgagagaaccctgttccctccacacatttggacccttttagccgttcatgtcaatctgtgggcaccgtggcttctgtgctatccatatgctgatgggtatagacgtggatgacgaaaaacctccgttcgtcgaagccgtggcacctgacgtgccttttacccaggaagccacaaaggttgcc

SEQ ID NO: 37395 - DNA, 448 bp, Glycine max
  Clone ID: PAT_MRT3847_133769C.1
attcggctcgagtgcatatgcttcagaaaacgcaggcgagcattcatccaaacactcgaatcgtctctagtacctcaatcaagcgttgttcatgaactccctcaagttacagacactacctttctggctttgttctcgtgcaatcccttgagaaaagtttctgttctgtgcttggtgacgcatgcgcactttttcatttggtgggtatcgttaatttctaagatttcctaaaaattgaaaaaaagaagaagaaacccttgaatttgggagcgttggattgaattgactgtgttgtgttgtttgattgtagcatttaagaaggggttttgggaaatggggaagcctttgttttatgagatcttggaaaaacctgccacaagttgcatcataggaatatgcagcatgatttggttctacatacagaagaaaaatattgggtattcacatg

SEQ ID NO: 37396 - DNA, 1808 bp, Glycine max
  Clone ID: PAT_MRT3847_13376C.1
cgcggcggcggtcaaacacgctggatcattgatgatggagggaggggggaggttactggaaagaggaatggagaaggaagccgaattgggtgaaaaggagtttgaacaaatggtgcgggctttgccttccgatgctgtcaaggagttattgtcgcacggggtatgcactcgctgcatctttcgcctcttcggcctccaaggccccgtctatgcttctcctccctccctctcttccctcttcgatgcaacacgacaaaatagctttttcgaaagaggaatggggaacctggcggtattgggtgataaagagttatacgaaaaggtgcagcctatgagtacagatgctgtgaagctttgattgtgattgctcgtcctctaatgcattgagatattcatttcttctttcactcaagaatttgtaagttttcattaggcctatgtgaaaaccaaatatggatcccaaccttggttccaagaaaacttgcacagtggatgcatctctacaaaggacgccttaaaattttctcttatctatcctcttcaaaatcttctggaatgtaaatcaaatatgggccctttccgcattcgtttaacatatactcacacaaaagggaatgataaatcttccgattgtgctgctgagacttgcaagagaagaaaaataggtgagccaagcatagttggagaaagatcttttagcagtacacttgaaaatgattcctctgactgctgtaaattcttgctagaaaaggcaaatgagccttgccattttacttacagttgctacaggacgcctttctattttggtggaagataccggcagtattcacggaatgtgagtcaaacacgctggatcattgatgatgaaagaatgggagaagcatcagttgaggaaataattggtggaaacatcctccaagcctgccaaggtccggatgttgggtccaggcaggccatttcttgttgaggtgcaaaatggaagacatatcccgtctgaactgtttgtaaaagatatagagaaaacgataaataaaatggagaataaactggttagggtgaaaaatctgaaacttgttggtagtgatggatggaaccttatgcgtgaaggtgaagcagagaagcagaaacaatatgctgctttggtgtggatttctcgtcctctaaaggatgaagatattcaatgtgtttcttcactcaaggatttgaaagttttgcagaggactcctataagggtgctacatcgtcgcagtcctttagagcgggaaaagattattcattggatgaaaacagagacaattgcgggaagttcccaatattttcttttgcacctatgtacacaggctgggacctacatcaaggaatttgttcatggggatcttggacgcacccatcctagcattggatcaattttgggttgcagagctgaaattttgcaacttgatgtcacagacatcaaaatggagtgtttcctgacataatccggttttaaatctggttgcttgactttggagtggacagtggtctgatgaaatgatagactccatgtgcatcttcaactggagctgctttcttctagtagtaaaagatttcgtagaactgtatcttttcgtagagacaagaggacaagtattttatttcggtccccataagttagtgcccttgagcaacgtagaaagaaatcctaaaataatttatgttgagattaaaagaatttattttattttggtctaaaatataattttcattattatacttgacaaaaattgagcaatttaattcttctggtggttaacacaaaaaaaaaaaag

SEQ ID NO: 37397 - DNA, 1532 bp, Glycine max
  Clone ID: PAT_MRT3847_133770C.1
atgcttcagaaaacgcaggcgagcattcatgcaaacactcgaatcgtctctagtacctcaatcaaggtgagagcattcttctcatccccgattcttcgttgatctcttcacaaaacccttttattgaatctgaatagaaccccaaatctttattatttcatacaattgaattgaacttcttcagcgttgttcatgaactccctcaagttacagacactacctttctggctttgttctcgtgcaatcccttgagaaaagtttctgttctgtgcttggtgacgcatgcgcactttttcatttggtgggttttctttatgtctcgatcgttaatttctgagatttccagagaattgaaagaaaaaaaaacccttgaatttgggagcgttggattgaatagactgtgctgtgttgtttgattgtagcatttagaagggggttttgagaaatggggaagcctttgttttatgagatcttggaaaaacctgccacaagttgcatcataggcatatgtagcatgatttggttctacatacagaagaaaaatattgggtattcacatgtgggtctcagttatgagactgctctagaagggcatcattggaggataattacttctgctttttctcatattagtgttattcatcttgtttttaatatgagtgcactttggagtcttggggtggtagaattcggtgctcacttgggccttggtgttgagtactacttgcagtacacacttgtgttggttgttctatcaggagtgctggttcttgcaatgtatcatttgttgattcaaaggttcaagcttgagtattttcgtcgagtgacggctgttgggtattcctgtgttgtttttgggtggatgacaattctttctgtgaagcaaccatcttccaagttggatctctttggttttctttctcttcctatcagttttgcgccgtttgaatcacttattttcacttcgatcattgttcctcaggcgagttttcttggccatttatcgggcattgttgttggatatgctatagcatggggtttgattcatgggatgagcaattactgggcactttccttgttgggatggattgcgcttgtctttgttttgagtttgaagagatctggtgccgttgacctaaactttcttgagattgaatctgttacagatccttccctaccatctgtgcggtttttggcatcaaacagtggcagaacactgcagatgagtgcgttgccaaatggaaatgttgaaattgtctaatgttaaactgatatatcttgtgatatcagatgtttccttgacacactcaatattgatagcaatgtgattctaattcttccaatatagaatttgtttaaagctttagcaatatcccttttcagagtttgcatctttagttatgtgataatgaatgttctctgatgttgtatatccatttgttgaagtgatactgctcgttgcaaatttgctgctaaaaaactcaaaaaaaaaaaaaaaaaaaaaaggagggcggccgccgactaatcagctc

SEQ ID NO: 37398 - DNA, 434 bp, Glycine max
  Clone ID: PAT_MRT3847_133771C.1
aaaacccccaatttttcaaaattttaaaaggaaaatttaaaatctttcaatttttattacaaaatcatccaatttttattactatgttgacaaaaaaaaggatcccgaaaaatttgggcaaaccctgtatccatatttttttcaaccggggaaaaaaaaaaaaaatgatttttgcctaaggaccacttgaaaatgattttaacacttttttttaaaaattaaaaaagggcccaatatttggagcaggccaatatttggacctgaaacaatactttttattctggggggaaccctaaaattgaaaaattctaactgtggtttccttcatcaaccttttattggcgcatgcccaaaatccccaaaaggttaatgaaatttattccttgggtaaaacccctttccaaatgcataaaaaaaatttgccaacatttttt

SEQ ID NO: 37399 - DNA, 177 bp, Glycine max
  unsure (1)..(177): unsure at all n locations
  Clone ID: PAT_MRT3847_133772C.1
gaggnnnnggagcgnangnangcgtncgnaagctngganttngggtcgagacttganccntaaattngtgcncattccgaaanctgnanatnaaggcnncnanntattccaaatngnttttncgantnccacanangannanagggnggactgannatnnagcttggcaatttnaaa

SEQ ID NO: 37400 - DNA, 421 bp, Glycine max
  Clone ID: PAT_MRT3847_133773C.1
tcctctagagcggccgcccttttttttttttttttttatgttgagtcatttattgtaagataatttacaaatatcttgctgtctttagtaatctgaacaatggaccaataaattcttctgacaaggacagcagtaagctaaaaacaaaatcagcttgctgaattcttctttacctcttgtctgaggatgaaacttgattttcattagtccagagccgcagcaccagagatgatttctatcagctccttggtgatgacagcttggcgggtgcgattgaatgtcagagtcaacttgtcaatcatttcagaagcattcttgctggcgttgtccatggccgtcatcctggcgctctgttcactcgtggtagactccttcagggagtagtagatgatgttggccaggctgtattcctggtagttcc

SEQ ID NO: 37401 - DNA, 414 bp, Glycine max
  Clone ID: PAT_MRT3847_133774C.1
caccttcttgtttggatttgtgaagttagccagcattgttagatcagcattgagtagatatccaaggtcaaggtatgcagcatttaaggtcacactagacacatcaaaatgaggactttgggggcgaaaaaccaagtacactataaggactattaagcctcctatgattatgatgagccaaaatattacacacaagcaagcacctaaccatgtcaagggttgagacttctgttccttagggcactttataccgctgaggcggggatcgccgttaggccgctttcgaggctcgggagggacatcggccgagggaggaggttcttgaaaatttacctttggcttaaccggccggaagccttggtttgttggctgtatacgtggacttctttgcttgccatggcgtggctcttgggg

SEQ ID NO: 37402 - DNA, 547 bp, Glycine max
  Clone ID: PAT_MRT3847_133775C.1
ctattggagttggttattttgctatatatatcctatcacatacatatagaaaaaaaacactaacgtactccgatcctagaaggctccttgatatgtgaaagtatgggaaagggtcattttatgcaaacttatccttgcatatgcaaaaggttgttttcgaattcaaacatttgaccaaccagtcacttaggcgtaactttactattatgtcaaggcttgccttgaattaaaaaggcagcaaaaaatagaataattaaagcggtgcttcataaaacaaggtcatcaatttacttgagaataatcattgataaaatgataagaaccttgggaaaaccagaccacaaaaactagctattgtagttggagagcccaaggtcttataaaccctacactagaatcttgtacttccaatgtgggactcaagtgccatgccttgcaaatgggttctaacataaaattaacaaaatatttaaacaggattcatagaatcaggacatttgatcagttgcatttacctggtattcaatttttttttttagtttttgag

SEQ ID NO: 37403 - DNA, 736 bp, Glycine max
  Clone ID: PAT_MRT3847_133776C.1
gcacttccaccgccgctaccgctacagtcctttggacattcctcttaggaaggcggcacgcacccccaccccacccccaccccccccaccccccccgggagtgtaatgaccactgtccttgcgtcaatgtcggagttctgaaatctaaaatgtcgaatataaaaccttatataccctataaactaaggtatataacctagggactagagagagatataggtcttgggtaagtagttggtgacacccatgggaagaaagaattatcttatgaacagtgacatttcattttaccctaagaaggtagaccacgagaatgtaacggcttaaaggtgcagatcacatcacctaggctgccaaagtcccccttctactttgtcttgtttcctcacccctccaatcctaacctcccacgtctatccatgttggataacacctttcaccacttctctttcatctttcctgtcttggtccaatttcccgcaccccattttgggttccattttatcctttttgcaaaatgtatcttcctactgccccttttttaatctccacattatcatttctataaagttcggatttttttaaattacatgaatttattggagataattttattcgagtgagataaaattattataaaaatctaaatttttactttttaagtatttaacacaaatacatgtaactcaagattactactacacactagttaatccagtagggttggttaaatttc

SEQ ID NO: 37404 - DNA, 145 bp, Glycine max
  Clone ID: PAT_MRT3847_133777C.1
ggggaacaatatacaacaaatatagacccatcctacagaaaagtgcatgtgacggtagcctacctgccctctaattttacatgcgtctagacaaaatacaatgtgtaccaagctggcctctcaacactccccattgtgaaattga

SEQ ID NO: 37405 - DNA, 559 bp, Glycine max
  unsure (1)..(559): unsure at all n locations
  Clone ID: PAT_MRT3847_133778C.1
ggctcgaggaaacacacactcaacaaaaaagaaatagaaaaaaagaaaacacaccattcttggtttgctaattaatgattttgggagtgcttggatttgtgttgcattatttaaaatcatgtttaactattaaaactatagggactaaaaatgtaagaatcatgccaaatgaataatttaacctaaaatttatttttaaccaaaatctattttactaaaccaatataatttaaaataaaatttgcaagacactcacttacttacagtttgccttgttcggagtttaaatttcgatttagacttaattttttacaatagaggttctattttgattcatataagatttttatattatatggtcatatattttatgatatattatctatttttttaaacatcttttcctttctcattattattgcttatttctcttaattatagaaattaattatacatatataaattatcatataataatattcactactattctaaaaatctaaactcaggttctaacttctaacagttaattnggaaaccaggcatagcttctttctga

SEQ ID NO: 37406 - DNA, 272 bp, Glycine max
  Clone ID: PAT_MRT3847_133779C.1
ggagagtggtggggtgtgcagaacagcgtcgcagttgtaaccctaatcagaagaagcgcacttcatagcgagtgtcagccaccagacatgggtcgtatgcacagccgcggtaagggtatatcctcttctgctttgccctacaaaaggacacctcctagctggctcaagatcactacgcaagatgtcgaagaagatatctgcaagtttgcgaagaaaggtttgaccccgtctcagattggtgtcattctcagagattctcacggtattgctca

SEQ ID NO: 37407 - DNA, 495 bp, Glycine max
  Clone ID: PAT_MRT3847_13377C.1
tacggctgcgagagacgacagaagggacatcctcataagaaccagcagatgcatgatgagtaaaaacagtaactgcaaggcgcgaaccaaatagtgcctaaaaaagcacaaaacagaaacatacaatgcaaagcagggttttttcccaaaataagtccgatggagttgaaactccaggggcagaggcgcataaggtagacgatgcagtagcaggaaatcgcgactggaaaaggtgccaaatgcgccatcatggaccggcgaacgaagctgtttagctggcaaagatggtgcgagtgagggtacatggatgctccgttttcgatgccgtgagcaacaccagtgggtgatcacagaaattttcccaaaaaagtcatcggagttgcgtcagtgaccggaaaatgtgacaaaaatggggaaaatcaccagagaaggagaaagaagatcgccagaaaatgggtggcaagtataaaagtccaccggaagagggcgacaagc

SEQ ID NO: 37408 - DNA, 514 bp, Glycine max
  unsure (1)..(514): unsure at all n locations
  Clone ID: PAT_MRT3847_133780C.1
gccgctcggatctaggaaacagtgtgcaaaagagcgttcgtagtcgcaaccctacntcagaagaagcgcagttcaaggcgagtgaccagccacnagccatgggtcgnatgcacagccgcggtaagggatatcctcttctgctttgccctacaaaaggacacctcctagctggctcaagatctcttcgcaagatgtcgaagaaaatatctgcaagtttgcgaagaaaggtttgaccccgtctcagattggtgtcattctcagagattctcacggtattgctcaggtcaatagcgtcactggcagcaaaatccttcgcatcctcaaagctcacggacttgcgcctgaaattccagaggacctgtaccgtttgattaagaaggcagtttcaatgaggaagcatcttgagaggaccaggacggacgaggactccaagctcacgttgattattggtgagaggcgaatgcgacgacttgcctggtgttagaagacgactgagaggctcccgccgagctgg

SEQ ID NO: 37409 - DNA, 264 bp, Glycine max
  Clone ID: PAT_MRT3847_133781C.1
ggctcgagctgaaacaccaaattttttcattcaaaagctactacatcatcttggtgtccttcttcactactactactacaaccactactgattgtcaagtctggcagcatgtgtatgcagagacagatcttgagtagccatctgtgttgcttgtgttggtgttacctcctttctcagaggcagaccatattctattatccatgaactgaaccactagacatgagctaccatcagtggcttgccccagagagtgtgaagtcatgc

SEQ ID NO: 37410 - DNA, 130 bp, Glycine max
  Clone ID: PAT_MRT3847_133782C.1
cccacgcgtccgaaagacaccgatttaggggttaaaacataccgattaacctctgatatttctcttagctgcagtctgccacgacaaccgcaaaatctccgaacccgctacttcctatccttcgaaaaga

SEQ ID NO: 37411 - DNA, 1632 bp, Glycine max
  Clone ID: PAT_MRT3847_133783C.1
cacgcttacctagaatttgggctcgagctaaaggttccgctatttcaattcccaaatctacaggctttgtctacaaaacaagcagcgccaacctttcactctgtgcaccgcccatcgcaaacttacaataccacaccacatacatataaataatatctctcgctatggttagcttcgttcccttcccattatttcaatcaaacacttatcatattactaacaaaaatggaactaacattccctcatcaagacgaagatgattccgttgtttctgattgcgagagcggtgtttcgggcagtggagtcgtggtggcaccaccaccaccaccaccacaacaacaacaacgtggttttttcgttaggcttggagaaggtgacgtggttcacgatcttatcaagacaaggtttattcgtggcctcggcatgctcgggcctaaaaccgaggttgtctccgttcgccgaaacgcgtgctccgacgtcgtttcacaggcgcgccttcactcgtttcatgctcacgccagggcggtggcgaggctccgcggcggcgggaatcatgccaacgtgaagtacgcctggtatcgtacgaacggcgaggacgacgtgaacgacatcgtttcgcaaggcttcggcttcgcgcacggcccgaaactcgttctctcccctgacgacgctcctctccaaagtgcgagagggtgtggggttgggaaggacggtgtgaggcacgcgttactgtgccgcgtgattctagggagatcagagattgttcgtgataacacacaacactgctatgaagggtgtgaagagtatgattctggagtggatagtttttcggggcctacaaagtacatcatttggagcaatcgcatgaacactcatgttttgcctgcgtatgttgtaagcttcagagtttcttccttcaaagggatggagaagagtgaagaagaacctttgagacctacttcgccttggatgccattcccaactctgatttctgcgctttccaaggttttgcctccatgtgatattgccctcatctccaagttctacaaagataaaaaagacaagaagattttacgacatgaattgatacaaagagtgagagaaatagctggagataagttgctagttgcggccatcaaatcttatagagacaacaagaagaaaccaagctttctacaatcaaggtcaaagaatggcttagcaacgaggataaaataactttcttcacacgagttctttttcttgggttgacataatactaaatacccaaacttacaaggaggacacacaaaactgctttaaaagcagtgtggcatatttgactaggcctttttttaaaaaaaattctattttttgaggtcgatgtagcataggagaaggaatcttttttttttttcttgttttctttttctcgttgccacttgccagtgggaatgatgtcctccgtgaataaggatatatacatgtaggctctcatggacacattgacccaccccaatgcactgtccctaaaattgtacatagtaattttgttgcttcttctttttctcttgagatatattatttcctcacacacgtattaaattagttgtccaatttaatttgctactgattaaattgttaattcattgc

SEQ ID NO: 37412 - DNA, 144 bp, Glycine max
  Clone ID: PAT_MRT3847_133784C.1
ccaacttcttacttccctaatgaagttaagaacctgaatataaatttgtgttctcaaatatttgctatgaagcgttgatggattaattaaataagtcaactcctagaagttgagagagcaaataaagacctgagaaccttccag

SEQ ID NO: 37413 - DNA, 458 bp, Glycine max
  unsure (1)..(458): unsure at all n locations
  Clone ID: PAT_MRT3847_133785C.1
attacttattcttgatattctctcttgcgttgatcattgcattttattgcatgatgataatttctagagctagtgagcttgtctcttgcggcctggggacancttcaaaactgttacttaaatcttcttcttctgctcctccacttcaaactacatctcttgttggctcaatggtccctaaagttcaatgcccctatcacagttctagtttccctagatcatacatgtcatctaccttagcttctctggccaacgaagaggaagtgccaagtacaggcattaatacactcatagcaattgaataccaacatggggcagttattgtaaacattgagaaccctattgattcctcagttttctcttctttgcttgaagcttcaatatcacactggagggaacaggtacaaatttcaaaatattactattaataactctaatgttcagcaatttctgataac

SEQ ID NO: 37414 - DNA, 385 bp, Glycine max
  unsure (1)..(385): unsure at all n locations
  Clone ID: PAT_MRT3847_133786C.1
tcgagcctcannaagactgaaggcaaaaaaaacagagtaaaggtctggnctcttgaatgatggnnnatagaaggcactgtggacaaggtagtttgctgccattggtggtgcttgttgccaatgaatgcnaacaacacaggcttgttcacttctcttcaaagcagccacactgcaagggatgagtaactatgtctttgtcacctatgcctattctgttgcctttcttgtactacttcctgtcacttttttctacagaaggttttgctgctgaaaatctaaactaaaaaaacatgtttctgagttctaatttttgaagttacaatttaattaatgtttgtttaacatgtctctttgtagatcaagagtggttcctncactcactttt

SEQ ID NO: 37415 - DNA, 139 bp, Glycine max
  Clone ID: PAT_MRT3847_133787C.1
agcctctaaaaaattcccatacccaatccccatgcattttatttataaatatggctccatcaccacgctcaccatatcactataaaacccacttttcgtccatattcattacaaccctataaagacccttcattaacaa

SEQ ID NO: 37416 - DNA, 280 bp, Glycine max
  unsure (1)..(280): unsure at all n locations
  Clone ID: PAT_MRT3847_133788C.1
tctgcttcgcgttgaccaaccagaagtgtaaggtttcattcaatgggcaacgcttaacttctaacaatatcttccgccgtccttaccgcggtcgttgaaaggccttgaactttaggcgttcaagttggtttcccgggcagaatcagaattggcaatctatgccaaaagtcttttccgggcttggctggcaaaagccgcaacgcttgtggccccaaatacaccgngaattaacctctgggagacagagtgctgattaaaattaaaggagccnaagggaaaa

SEQ ID NO: 37417 - DNA, 369 bp, Glycine max
  Clone ID: PAT_MRT3847_133789C.1
ggggtcacaaataccataaattcaaaataaaaacctttatcagcctatttaaaccggttcaagattaaaattgtcacatttgcctaaaacattttacaaggacaaaattttgcaaaaaacagtaacctgggttttaggagagaattcattttcaatttttgaataccatgaaaaccaaggggaacaatttgcctgttaaaaaaattgatgctgctggggcttgggctgataaaaatccctaaaaagggccccctttatttgcccttggcacctcacatttttttatttttgaataggggctggggtatttggacaggatcataaatggtttttggttaggcatccctactaataaggagttcctactta

SEQ ID NO: 37418 - DNA, 918 bp, Glycine max
  Clone ID: PAT_MRT3847_13378C.1
ccctcccccccccccccccccccttctacgcaaaaattgagatagatagggttttttgttcttgtcttgttgtcttcttttgtttgctctttttgtttgtttctccttgttttctgctcttttttttttggtctgtgctttttttgtgtttgttcaagagaaatccagagttattattatgtttatagtcaaacaaggtcagatggaactactttcgccttcattagggatagtcaatgcccgaacctaacatccttcctattaatggtgaagtacttttctagctacttcggcgcctaagaaattctaacattacatataggacactctctaaggtgcgttaattgacttggttcccttgttctgaacactaaagtttgaaccaccttccatgctcatctttcatctttctctttgttatttaattattgagagagcttaattagcactttagttgccatcaagcgacactgcatctctgatcttttcaactgttctctttatcaaactgttaacagttgtcacggaaccaacagagattttcgaagtcggagctgaatccaccagtatctgaaacgcaactgtgagaagacagcctcctccggatccagcctcacatatgggcccgggccctccgttcagtccagggcccatcaggaagaacagcaaagcccgaagggagcaagggccacgtaatctggattaccacctcccaacacaacatttatggcagctacatcaataggagcataaatcacaaatgagcctgtagcatcaatgaaactctcttgaagtatcagcatattgttctggcccacattctgagtattcactcgaagaagagagacacaatttccatggtctctcccgttagcaatatgtgcaagttcgttcacttgagccccggttgacagaatc

SEQ ID NO: 37419 - DNA, 1148 bp, Glycine max
  Clone ID: PAT_MRT3847_133790C.1
tctctcacacaggctcagcctcaatatccgccattgaattcttcttccatttctcttttttctgcatacccatttcgtttttcttcccaaatggccctttcttgctccaaagttttaagcttttatctctcgcccgttgtgggtggtggtgatgttccgaaaaagctcactttttcttcttttttgggtctttctaagggtgttggtggaagcaggagctcgagggtgcgtgctgcttcaaatgcacccgcaccactcgctggggtcatatttgaaccatttcaagagctcaagaaggattatcttgctgtaccgattgcacacaatgtttccttggctcgtcagaactatgcagatgactctgaatctgcaatcaacgagcagatcaatgtggaatacaacgtttacctatgtgtaccacacctttgtttgcgtacgtcgacagaagacaacagtagctctcaaaggcacatgcaaagttccatgcaaggaatcaagtgaaggaagaaagagagcatgccgagcagcttattgagtatcagaacattcgtgatgaacgtctggtgctgcacccaatcacaagtccttcctcagaatttcctcagtcggaaaaaggggatgccttgtatgccatggaaatagctttgtctttggagaagttgacgaatgagaaacttctgcacgttcacagtgtggcagaacgtaacaatgatcctcaattggcagacttcattgagagcgagttcttgtatgagcaggttaaatcgattaaaaagattgcagagtatgtggctcaactgagattagttggaaagggtcatggtgtgtggcactttgatcaaaagcttcttcacgatgaagatcatgtataatctttgaacggcctctgctttctaaatatggtcctatgtgaagttatgtgttgttctgcttgtaggaatagtgaataagtgtttctctcctaggtgataaaaatgtaggaactttgtgttgtattatagttattgtcggtagaatggtagtagtagtagtattattatgtgcaatctcgtatgtttgtagcatgcaattattttgttagaagtaaaaaatgacgtcggctacttgggttcaagtccaaaaaaaaaaaaaaaaaaaaaaaaaaaaaa

SEQ ID NO: 37420 - DNA, 802 bp, Glycine max
  unsure (1)..(802): unsure at all n locations
  Clone ID: PAT_MRT3847_133791C.1
anccacctccacgnngnnnnngnnncgatgaaatccctgagatnnncaatgacttcagaatggcagccaaaaatgccatagaagcaggtnnngnngggnnngagatacatgnagctaatggatacttgctagnnnaatttctaaaggacaaagtgnnngacagagatgatgagtatggaggtagcttagaaaatcgttgtcggtttccactaatggttgtgaaggctgtatgtgatgacattggagctgacaaagttggtgttaggctatcccctttcgccaattattgtaattgtgtagactctaatcctcaagcgttaggcatttacatggcacaatccttgagccaattgggcattctttattgccatgtcattgagcccaggatgctcacaatgtttgaaaaacatgagacagacgtgtcccttttgcctattcgaaaggccttcaacggaacatttattgttgctggtggctacaacaggagtgagggaaacagagtcatagccaatggaggtgcagatttggtggcttatggacgcctgtttttggcaaatccagacttgcccaaaagatttgaactcgatgttgagttaaacaaggctgatagaagcactttttacaccactgatcctgttgttggatatacagattatccatttcttgaaaatgattgttaaaagcacatattaaattttatttagataaatctctcttgtaataaaggagcatttcattactatgatataacaagctccaagcaataatgtgcaaatgtcctacaccaatcttactcaaccaa

SEQ ID NO: 37421 - DNA, 151 bp, Glycine max
  Clone ID: PAT_MRT3847_133792C.1
ctcgagccgctcgagccgattcggctcgagcggtaaccgctacagccgcttctcatgccggcgtgggcggatcatcgccgacgattagcgtccttcctgtcttctactaaaagggactttcttctacgaaacaaacggcaaacagagttaa

SEQ ID NO: 37422 - DNA, 283 bp, Glycine max
  Clone ID: PAT_MRT3847_133793C.1
ccaacccttaagccaagccttcgtaacggtgccaaaaaaacaacagaagggaaataaccccaaaggccaaagaaaaaaaacaaaaaaccaaaaaaaaaccggccgccctaaaggatcaaacctaagttacccttcaagccaagtcaaaaaccctccaaagtggtcacctaattcaattccacgggccgtcttttacaacgtccttaacgggaaaaacctggcggtaacccaactaaacccccttcaacaaatccccccttccccaactggcgttataaccaaa

SEQ ID NO: 37423 - DNA, 704 bp, Glycine max
  Clone ID: PAT_MRT3847_133794C.1
tcggaattcggctcgaggctagctatagggtttaggttaaatactttgagagtagcgtaattgttcggctctcgcaaatacgagaaggaacaaaacaccgcggaagcaaccatggccgaagcagaacacaacgatcccacctcgccggagcgcgaggtccaaaccaaaagcaacaagaagaaactccgcaagaggaaaaggcctcacaagaccgagcagaaacgagatgaggacaagaacgatgctaacattgatagtgcccaaacacaaaccgaagatgaagaagaagaacaaaaagaagaagacacaaacaacttctcatccggaatcatgagcaccgagtctttctcctctctgggcttgtccgaacccacttccaaagccattgcggacatgggcttccaccgtatgactcagattcaagcgaaggcaattccgccgcttctgaccaggaaggacgttctgggcgcggcgagaacgggtgcgggaaaaaccctagcgtttttagttccggcggtggagttgctgtacagcattcagttcacgcctcggaacgggacgggtgttgttgtgatatgcccgacgagggagctggcgattcagacgcacgccgtggcgaaggagctgctgaagtatcactcgcagacgcttgggttggtgattgggggttccgggaggaagggagaggcggagcgcattgtgaa

SEQ ID NO: 37424 - DNA, 2895 bp, Glycine max
  Clone ID: PAT_MRT3847_133795C.1
attttgatattttggtgcgttaaagtcaagttatccaatgtcgtgttgcgagaacgccgtggcaatgacttgaacgctgctttgtttaccatatatttccaatcctcactgcgcgccttgcatgtgtagtccttaaaagcatatcaacacagagactgttgacacctcactcctcagcttggacccttctgtgcaataagtttataacctcaggcagtgccttatgttccatggtgcagctaaagaacgagaagaaaaatagtcttttactatatatattcacgtgaagctttcatctctggtctcaatactattcacacaaactctctctgactagtgatatctatccatggaggccaagaacttgtggcgcttcctggttctttcaatcggtgtggtactagttttacttgtcacttggctgcccaacaaggaggctctagactgcaacctttactctggatggtgcacctcaaagaaccggttctactcttcagcacatcctaataatccgattaagaaaccatcattttccacatatcatcatcacaagaaccaacaccatgaatccgagattcctcaacaccctcttgaccctctaaccatccaagagttcaacaaggtccgcaccatccttttgaactaccctctcttcaagtcctcatccagctacactctcaactccgttgtccttgaagagccagacaaaaaacttgtcctcaaatggaaaaagggtgatctacccttgcctaggaaggcttccgtggttgcatatgtgaagggagactcacatgtgctcacggtggacctcgaaaccggccaggtggtgagccaggaagccatcacctggtcggtctcgggttaccccaccatgaccctagaggacatggtgggagtacttgaggttcccctcaagagcaccgaattcaaccgctccatcactaaacgcggtgtcaatttagcagacctggcatgcttgccaatctcttcagggtggtatgggacacaagtggaggagaatacaaggttgattaaggtgcagtgctattccaaagaaggcactgtgaacttctacatgaaaccaattgagggtgtgactgccttagttgacatgaataaaaaagaggtgctgtcaatttcagataatggccaaaacatccctgtggctaatggaattaacactgactaccgttactccattcagaagctgaatggaggagagttgaggatgctgaatccaatatccttggagcaaccaaaaggtccaagcttcacaattaatgggcacttggtgaaatgggcaaactgggaatttcatctgagaccagacccaagagctgggatcataatttcacaagccaaggtgagggaccctgacacatcaaagctgagaagtgtaatgtacaaagggttcacctctgagctatttgtgccatacatggatcccacacaagattggtactttaagacatacatggatgctggtgagtatggatttgggttgcaggcaatgccactagaccccttgaatgattgccccaagaatgcttactacatggatggtgtctttgcctcttccgatggaacaccatatctccaacccaacatgatttgcatttttgagagttatgctggtgacattgcgtggcgacatgcagagtgccccatcactgacctcaaggttacagaagtgaggccaaaggtgacactagtggttaggatggcagcagcagtagcaaactatgactatatcgtggattgggaatttcaaactgatgggctaatcagagcaaaggttggactgagtggtatcttgatggtgaaaggaactacctatgagaatatggatcaagttcccaaccaagaatatctttatggaacccttttgagtgaaaacattataggtgtaatccatgaccattttatcacatattacctagatatggacgttgatggctctgacaattcatttgttgaggtaaacataaagaagcaagagacctctccaggagaatcacccagaaagagttatctaaaagctgttaaaaaagtggcaaagacagagaaagatgctcaaataagacttcaactctatgacccatcggaatttcatgtggtgaacccattgaagaagacaaggatagggaaccctgttgggtacaaattggttccaggtgccacagcagctagcctgctggatccagaagatcctccacagaaaagagcagcttttacaaacaatcaaatatgggttactccttacaacaaaagtgagcaatgggctggtggtttatttgcttaccagagcaaaggggatgatactcttcaagtctggtccaacagggatcgtccaattgagaataaagacattgttttgtggtacacaatagggttccatcatataccctgtcaagaggactatcctgtcatgcctactgtatcatcaagttttgatttgaagcctgctaatttctttgagagaaatccaatccttggagtccctcccaatttcgaagatgatttacctgtttgcaaggctcgtgattcagcttgagatcccatcagttggtttttagtctaattagatacatgctttatttatgcatgtagcaaatgatgatgcccaaactgaactttaaacctaacttaaagtaaagagggtctagttctgttgattaaacagaatgtataaatattgtaaaaccttttgataccatgtttaattcttatgtataagaaaaattatgatgttaaaaatctagaaagtgacttgaatcaatataaataaatttgtgaattcaatcacagtttgaataaaacctgaactcactgtagatttctttgtgtggtcttcctctgtctgtttcttagtggttcaaataacataatgtttct

SEQ ID NO: 37425 - DNA, 1354 bp, Glycine max
  Clone ID: PAT_MRT3847_133796C.1
aggctagctaagagtgaggcatatatattaatataatcctataaagtttttgaacttcaaagcaatcgaaacagagtcacgaaagccaaaacagcacgaatacagacacttcacacacatccacgataatcagtaaggcaggtatcatatcaccctgtattaatttgccttctttttcttcacacatgctaacagctcaagtttctgaactacagggccatcgaaacacagacacttcaaacaccaacaataatgatttaactttgaagacacagctacaatttttactgagactgcccaaacacggtaaatcctgcatttacatcagtgtaccctccatctatcacaagattgtgaccactaacatacttggactcatcacctgccaagtaaagagcagcttcggccacatcgttaggcacaagatgagcaccttttaggtttgaatatatctcacgaattttgtcttcatcaatattgaaatatttcttacttaacggtgtgacaacaagataaggtgacaaacaatttaccctaataccatgttgtccaagctccaccgcagtgttttttgtcagtccaattagtgcgtgctttgaacttgtgtaggcatgtgtagcacctccacctatgcatccagcaacactagctgtgttgattatgcatccctttttagcaggaatcatgacccttgcagcatgctttgttcccagaaaaggaccaaccaagttaacacttatcactctctcaaaatcagacttgttgttgtcaagaatgcttgttttgatctcatcagatacacctgcattgttaaacatgatatctaatttgccatacttggaaaccgttgtgttcacgcagttttcaacgtcctcttcctttgtcacatcgcaatggacataggaagcagattctaactctttggcaacagagagacccaagtcgtcttgaatatcagctatgactacatatgctccatgcttagagaagagtcttgcagtggctgcacctagaccactcgcaccaccagtgataatcgccaccttcccatcaagccttctaaatggagctaaaaccgaagaaacactagccatgattgagtttttcaagatatgtagacaaggaaataaagatatgttttagagtgcttaattaattgcttatgcgatctttggctcggcctatgtaaggttcggcttggctcggcttgtttactataaaggtcaagctcaagctttttaaaaagtttttttagataaaaaggccaagctcaaactataaaaaaaagcttgttaaacttgacaagccaacttgtttaactaacaataataataataataactttattttatca

SEQ ID NO: 37426 - DNA, 212 bp, Glycine max
  Clone ID: PAT_MRT3847_133797C.1
acgcgccctttttttttttttttttttttttttttttttttaaaaggaatattagaaaatagtattaaaatcgtggtttcctacttggattcacgcgaagtttcctacataaatatacagtgcaaaatttgggcgggaggaattggaatatgccggagagattaacggggggcgtgttggtgacgcgcggggggtgggggggaggggggtgg

SEQ ID NO: 37427 - DNA, 562 bp, Glycine max
  Clone ID: PAT_MRT3847_133798C.1
gttttcttctgttgattgtgggcaacgagcaatgttatttctataaatagggcacatggaaggcgcacaggtgcacatgcatttaaagtgagaccgttcatgattggctgtggtacgcgactgccgctgtatcgatctatacacaaggctgaatgcggggtcactggtaccgtcatgggtttcgagagtgggacggttgatttgatcatgagggcggttgcgattaccggtgtgatctatacagttaaagaatgccgggaactaggagtggcaggagggtgtatcctagagggagaaggaaaccaccttaaactgttgcacatatggtgtgctggaactgtacacatgtgctgtcaaagaaagcatgataactctatacatacaatactaactgttctgatgctatcagagctagcactactgcaagtgattatgccctaattgatactgatactcagactatggaacctactgatttatcattcatgctcagagtgaaagaaatgatgcgttgctattgcatgaccgatgctcctaccccattatacttcccatccttttc

SEQ ID NO: 37428 - DNA, 533 bp, Glycine max
  Clone ID: PAT_MRT3847_133799C.1
aattcggctcgagcggctcgagggactagaccctttggcagtgtctgctgtattctgtgcagcacaatacatgggggagaaagaaatctcaggcatggattgctttgtgctgaaactctcagctgatcagaaagaccttgttgagcgcagcgacaacacggccgagatgatcaagcatgccatatttggttacttcagccagagaagtggccttttggtgtacctagaggactcttacctgaccaggattcaggcaccagggtctcaccccacatactgggaaaccacaatgtcaaccaagattgaggactatagaattgcggatggcgcgatgattgcacatgctggctcatcgaccgcgttgatcaccaggtttggggacaacctgaaggctggaccatccatcacaaggttggaagagtcatggaccattgatgatgttgcattcaatgtgccagggttgtcctcggactgattaataccttctcaggaactacagagagattgttcttcagacgatgagctagactgga

SEQ ID NO: 37429 - DNA, 786 bp, Glycine max
  Clone ID: PAT_MRT3847_1337C.1
aattcggctcgagctcgagccgtttagagagaagatgactattctctcagccatattttgctgcttcaagtcaaaggaagaaaagagctctatggtggaagcaggttctttatctcggaaacccaaaggagatcctcagcgatcttcagctcctattgttgtttcttatttcccagttaactctcatccttctcgcttgtagtttatgaaacaccgacacggacacctgtaatgtccaaaatatagaacgtagtacaggtgtcgtgtcggtgtcgaacactgatactgacgtgtgtcggacaccggatcctgcttcatagcttctagccaatcaaatgcttcaattgaaacatgtgtcacaagttatggtatggagtaagttaaacagtacctccatttttttctgataaaaagatcgcactggaattccaacttatgttcttaacttcttgtgtatattatgaaatcccttatgatcagtaaaccgatctcagtggttttttttatttaaagagtacctcccttaagagagagtaccttattaggtttaaatttaattatgatcttatgcatactatcaaaatctctttatcttagttttttttttttaagagtaactccattaagagagataattgttactcatgcgtacattgacacaggctctatatgtattcttcctatcgatccctttgaaaatttgttttctgggaaccgtgtgtcacgtgtttgtattgtatatcctactagatttgttgaagatagattttcagccaaaaaaaaaaa

SEQ ID NO: 37430 - DNA, 511 bp, Glycine max
  Clone ID: PAT_MRT3847_133800C.1
gttagactctcgacagattcacaaagcgctccaataagtcatactaacaatctcacagacacacggcaaggaaaaggagcacaaagattcaggccaatggggataaccccgagggaagaacaaaggcacagatgacataaaagctcagtcaaatcagcgggagcagaataggacataacataacaagatcacctgcaaatgaagttaaacagaaagtttcataagatatccccaaaaagatgaacaggagaaccagtgccttctctaaaataccaaaacctggtccattctgcaacaaactttcaggcacaaactgccatgagcacaaattttaaaagataaaaagtgaaagatctcaatatagggataataacatcgcagaaaatatcattgaccattctacctgctcgttccattcaaaaacccatcaagctaagctgcaaagcccttcccacaagtccaagtagaatttcttgtgactaaaacccaaacaagatacactgggtaaaag

SEQ ID NO: 37431 - DNA, 1494 bp, Glycine max
  Clone ID: PAT_MRT3847_133801C.1
aattcggctcgagctcgagccgaatcggctcgagcggctcgaggttgatggtagtcatggacgaaggcctgttgctcataggctgagttttgtggagatggttgttccctatggagatccaaatgatccacattacagaaaaaatgcttttgatgctggggaagatggattgggaaaaaatgcacattccctcaagaagggatgtgattgtttgggatacatcaagtattttgatgctcacttcacaaatttcactggtggggtggaaacaattgaaaattgtgtatgtttgcatgaagaggatcatggaatgctctggaaacatcaagactggagaactggcttagcagaagtccgaagatctagaagacttacagtttctttcatatgtactgttgccaactatgagtatggatttttttggcatttttatcaggatggaaggatcgaagctgaagtaaagctaactggaattctcagcctaggagccttactgcctggagagtttcgaaaatatggaaccatgattgcgcctggtctatatgcaccagttcatcagcacttttttgttgctcgcatggacatgtctgttgattctaaacctggtgaagctttgaatcaggttgtggaggtcaatatgaaagtcgaggaaccaggtgagaagaatgttcacaataatgcattctatgctgaagagactttgctcagatctgaattggaagccatgcgtgattgcaattctttgactgctcggcattgggttgtaaggaacacgagaacatgcaatagaactggacagttgacaggctataagctggtacctggctctaactgcttgccattggcaggctctgaagccaagtttttaagaagagctgctttcttgaggcataatttttgggtaacaccatattcacgtgatgagatgtttcctggaggagaatttcctaatcaaaatccacgtgttggtgaaggactagctacatgggttaagcagaaccgatctttggaagaaactaatgtagttctttggtatatatttggaatcacacacgttcctcgtttggaagactggcctgttatgccagtagagcgcattggttttatgctcacgcctcatggattcttcaactgttcccctgcagtagatgttccgccaaatgcatgtgaaatggattctaaagataatgacattaaggataatggttcttcgaaaccaattcagagtgggttaacggcaaagctttaggaacttgaccctccaaaagttatggctctgtgctgctgatatggagaaacatgagtactattctgatatatgttgttgagctcattataattttgaatctagaatattaataaagctattgaaataaatagtggtttcgttttaaagcttgcctgctggtaatattcatttgatttactttgtacccagaatactggcttcaaatttgactcaaggaatttaaccgggaaattcatattttcagg

SEQ ID NO: 37432 - DNA, 176 bp, Glycine max
  Clone ID: PAT_MRT3847_133802C.1
tgtggaggaaacctagatatctgctcgacatctatacagcagaatggggatatgactatacaatctgcaaacggcggtgatgacaaaaagtcaagggggagcttgcaccaaggctactaaacagcaggtattgaatagagctctaagcataaaagcactatctgcattttcttaca

SEQ ID NO: 37433 - DNA, 632 bp, Glycine max
  Clone ID: PAT_MRT3847_133803C.1
ttttttttttttttttttttttttttttttttttttttttttttttttttttttttttttttttttttttttttttttttttttttttttttgggaaaaaaaccaaacaacttcataaaatcaaccccccctttaagggaaggggccccccggacaaaaaaaggcaaaaacaaacggatcttttttatggggggaaaaaggggaatccaaaaaaaaaaaaaagggaaaagaaccccaaacccccccccagggaaaaccccaaggtttaaagggaaaaaaacttaaaaaaaaggcaacaaaaaaatccacaaagggttttggggaaaaaaaaaaaaagcttcctgggggaaaccaaacccccgggaaattttcccggggggggccctggccccaaaaaaaaaaaggccaagggcctttcctggggttcaaaaaatttttggccaaccaaagggggaccccgcccaaagggaaaccttaacgggtcccgaaggggggaaaaaccccttttgggatccaacgggcgggccaaaaaaaaggccccagctaaaaaaaaaaacaaccctaacaggttttccttccttccttaaacccccaggggggggggggggattttccaaccaaaaaccaggtcc

SEQ ID NO: 37434 - DNA, 319 bp, Glycine max
  Clone ID: PAT_MRT3847_133804C.1
cgtaaacagctgatcttaaccaggggggccccatacgggactatgaaaacgctacggtgtccatattgcagaaatagcaacggcggaagtaaggcgcagaaaaaaacttcccacgtagggtccgaacctaaccaagtaatggagctcttcgagaattcatccctgactatccacctggagcccctcatacaatgccaacccctaaccctatttcttctggatcctcataatcacgtgggctttgttcgcaaatgggcctttatgggcctcatagaaaagaatgcctacatgttaccggtgctcgggacaccccctttct

SEQ ID NO: 37435 - DNA, 1253 bp, Glycine max
  unsure (1)..(1253): unsure at all n locations
  Clone ID: PAT_MRT3847_133805C.1
ccacgcgtccgtacggctgcatgaagacgacagaaggggacgctagtttccattgaaattgtcaggtggaataaaaagctagaaaaagaaacaaggttttccccgaaaagggaatagaaatgcatgaatcttcaatgtttgtttgattcttccgatttaatcctcctcgtcactttcagatcttttcttagatctttatttcttgttctccttgtcttctttcgcgacaacaaacctctcccttttctcttttccaaacactttctccctctttgatcttgaataagaccttcaaattctgttcaaccaattgggggggcataaaaagatcatgttttgagcctcgccatcaatctcgctcttcaaattcaattctgggccggtttcaatttcttcaaaagccgcgaaaagtgcagattcacttcgtcgcagtgttgtttgtatctgggtacttgtggtgatgaggtggcaatgaggtgtgtggcagaggaatggagggtattcaggtgaggtgcgataagcttcagggtggtgtgattcagaggagccgtttgcgggtttggttcattcgagtgtgttcaagcattgtgctgtggacatgtctggttcagttggtgacagtgagtgaattatggcattctcatttctttttggggatcagtagtcgaatatatcacacaaatcaaagtcctcttgaagcgcaaaatgaacttgctcaaccacccccaccttttcttcccgcaagaaattatacaagtaatggttttctaagagtgtcctgcaatgggggtttaaatcaaatgcgtgcagcgattcgtgacatggtgacagttgctcgactgttgaatctcacattggttgttccagagcttgataagaagtcattttgggcagaccctagttattttgaagacattttngatgtgagacatttcattggatctctacaagatgaagttcgaatagtaaaaagagtgcccaaaaggtttagtaggataagtggatactctaccctgaagatgcctcctgttagctggtcagatgaaaagtattacttggagcagattctgccactctgtcgcacacataatgtggtacatttcaacagaacagatgcacgtctagcagacactggtctcccacttgatctacagaaacctacgtgttgtgtaaaatttcaggccttggaaatttctcctgcactgtgtcatgtaggcccgagattggatcggtatcttccggagaatggaacc

SEQ ID NO: 37436 - DNA, 341 bp, Glycine max
  Clone ID: PAT_MRT3847_133806C.1
tgctcacgcgtccgcccacgcggtacgcccacgcggccgaccacgcgtacgggggaggtgagatagtcaagaggcagtcgctcacattggcgacttgaaatatggagagtatgttccactgtctacagaaactaattaggtggaaactcccccggaatggcaactggatctaccttgtgacaaaattcctagagtcttgactacaactgatgagagattgttgggctcctgacatgcaggatatgatccttttctctggggcattgaaaagtttgcccctcccaagatgcccctagaggaagaaattctttgtaaagctgcacaaacatggttgaggaatg

SEQ ID NO: 37437 - DNA, 934 bp, Glycine max
  Clone ID: PAT_MRT3847_133807C.1
cgcaaccagcaatccaagagtgccgtgtatggtcttgaccaattctcagatttgagtgatgaggagttcagaaccaccatcctcatgaagaacaccttgcccattgacaacagcgcccccgtcccctttgttggctcaccctctgccccagctacctttgactggagatcctctggtgcggtcacagctgtaaaagatcaagagcaatgcggaagttgctgggccttctccgcaactgaagccatcgagtctgcttggatccttgccaagaaggcaactaacaactcagttgacctcgctcctcaacagatcgtcgattgtgacagacaagacggtggatgcaatggtggatggcccagcagcgccatggagtacgttcacagcgctggtggtcaagaggatgagagccactacccatacaccgctaagaacggaaactgcgcgttcaactccgcttacgtcaaagcgaagattaatgcttacaaagtggctgccacccctaaggacgagaactctcttcaagctggcttgctcgctttgggacctctctccatctgtgttgatgcttccagctggaatggataccaaggtggagttttgacctctagagaatgctgcacttcctgccaattagaccattgtgttcaacttgttggatacaactcggccgcgtctactccttactggattgtgagaaactcatggggaaatggttggggatatggtggatacatctaccttgctatgggaggtgatacctgcgctcttactgccaaagcaacttggcccacattataaagataatttagtatttttataattatattaaagttataatatttttataattaaattttaaatgtatcttttacacgtgatgttacgtaacgatttatttgtgtaatttaaaatataatagaattcgattacggct

SEQ ID NO: 37438 - DNA, 600 bp, Glycine max
  unsure (1)..(600): unsure at all n locations
  Clone ID: PAT_MRT3847_133808C.1
actagctatttaatcccttttttgttggattagttccggggaaaatgcaaaattgatgggaatccagtcacctatcgcgatcgatatgttggacttctcgttatgggtcttaatgactcaggcttcaccaaatcaagataaaaaatttgtgttcaattcaagctccctcattatagtccaaaatccttaaattatatcgagcatggtcaggttagccttgtctgttgaattggttttgccatgacctttgtatgcaaaccagcacatgatggtagggaaaatgaaagtgactattacatcggagtagaggaagaagataggtttgtgagtaaagagtaagagtgacatgtgacaagtctcatgaacttttaaatattttgttaaggatcaataattgatgggtcagaaatacattttatttttgggtataatttgtgtgattcttctcccatcgggttggttcattttttaggtaaggtgatattttgagttgtcactctatgctcaagtcggggatcnaacaccaaaccttgaataaggaatccaaatatcaaattacttgtgttaacaacttttggttatggacatacattctaattg

SEQ ID NO: 37439 - DNA, 364 bp, Glycine max
  Clone ID: PAT_MRT3847_133809C.1
gagctaaaaaaatgctttatttttaataaaaaaattgggcaaagagaaagcccttaacagtccaaaccttttttgttcaagcgaaatgaatagtacaatcccaaactcaagcttttgggtaaatatttaaagggggggggtctttatcgggggaaaaaaaacacttttgggggtgaacacccttttgcttacaaaaacagacacacaaaggggtggttctggttgtataacaaaaaaggcgcttgcaacattccacgagctatttgggggtggatttactggcttgccattcaaaggtttaccaaccgatttttgaatgggaacccaatcccagtaaacagagtggtgcccaaaaccatgccaa

SEQ ID NO: 37440 - DNA, 253 bp, Glycine max
  Clone ID: PAT_MRT3847_13380C.1
atttatatgtttattaagcaattgtttaaataagcatttgttgagcaactttatttaatatcaattaatcttatgtaatagaatctaacatatagagtatcaaaacttatagtccatatatatggtctatttatatagccatcatgtcacgacccactcttgaatcatgaccggtacacagactataatttccttagtctggttagcctaccctatattaaatgacctgtaaaaaaacatatagtatatctaa

SEQ ID NO: 37441 - DNA, 397 bp, Glycine max
  Clone ID: PAT_MRT3847_133810C.1
tccattatttgttccttcattcttgtctccgtttcaagtaggagtttctactgctttacaccttaacccattatccatttgtctagaacatatttttctggtttatgaatatagctcctttaaatctagcaaattatttcctcaaaatgttccagtggatccaaatccttagtttcaaatagacctcctagcttcttcttaagggctgtaagttcagcttcataataatccattaatatatgaacattcacatagactattggtgctgcaattttcccattggctgagagtttaaagaaattggactggccacatgcatatgcattcagggaggagattttagtggtgctattgccagtatgagggtgtgatgaatctggatgttctttcttcctat

SEQ ID NO: 37442 - DNA, 398 bp, Glycine max
  Clone ID: PAT_MRT3847_133811C.1
tttttattttgttttttttttttttttttttaatatatttgtgaattttgtttggagttttgatgtttaaattatttatttttttttaagttataataattatttttgaatttttagatatgtgttttgagaaggttgaaatgcgaaggcattgtaggagaaaagaaagtacataaagaatttgtacagagaggtggatgatttaagtgaaagaaaataggagattatgggtagagagaatagaacagtgttcaagcggtaaatatgaggagcttactgatgtaataaattagcaaagcgcagtgagaaggagcttggggatgtggatgtaaaaataaaaatatgttttaaataactgtgggtagggaaaggaaagaactttgtttataaacgaaaag

SEQ ID NO: 37443 - DNA, 639 bp, Glycine max
  unsure (1)..(639): unsure at all n locations
  Clone ID: PAT_MRT3847_133812C.1
tggttccggtgtttcttctaacacctctgtttcgcctgcattgagtaggccagcggatcagatatttgagattgtgaacctggcaaatgaacttctgcctccattgcctcaaggaaccatttctcttcctgtcagctccaacttgtttgtgaaagagtctgttgtgaaaaaatctcctccttctgggaatcccgggatacaagaagacacaaatggaaatgttcatgaaatatcagctcgtgcaaaattattaaatgataagcctgagttacttaagcaatttgggatggatctcctcccagttttaatgcagatatatggtgctagcgtcaatggtccagttcggcacaaatgtctttctgtcattggaaaattgatgtatttcagcacagctgagatgatccagtctttgttgagtgtaacaaatatatcaagtttcttagctggtgtgttagcatggaaagatccacatgttttggttcctgccttgcaaatttcaaaaattcttatggaaaagcttcctggaattttctctaaatgtttgncaaaaaaggtgtggttcatgcaatttaaccaacttatattggcctggaatgcaactaatatgtttacacaaaccttatcttttggagaagaaac

SEQ ID NO: 37444 - DNA, 176 bp, Glycine max
  Clone ID: PAT_MRT3847_133813C.1
ataggcagtgtgtgtttagaagtatagccattgagattatgcggggatacataaacagtacgtgtcttttggcatatgttatgatatgtttaacatgagtgaaataaatagttggtcttagccttttgtcgatgaaaaacaggtatagaattggactgtgctatgggtggtcgttt

SEQ ID NO: 37445 - DNA, 608 bp, Glycine max
  unsure (1)..(608): unsure at all n locations
  Clone ID: PAT_MRT3847_133814C.1
gtagttgatgccttaactcatgaggatgccagtgttcgcactgcagcttgcatttgcttaagaagtgtctctcgctcaatcaagaatttgagtccaggtcgttttatgaatgaaagggttgtttgtcctctggttcagcttctctctgatctttctacttctgtccaggttgcagcccttggtgccatcagcaatatagtggttgactttatgccacataaatcaacattcatagagtgtgggggcattaaagagcttgtgcaattgacgaagtcaatggattcgtctttaaggttaaatgctgtatgggccttgaggaacatggtattccgggcagataagatatgcaaggaaggaattttcgtggagttaacagcgtcttcaatggctagccttatctgtgatcctgaaccttctgttcaagaacaagctctggccctagttcgcaattttgttgatggatgtgtgtactcagttgaacatgcttttgctgaagatggtatcatactagatgctgttggaagacaattaaaaaaatctacaaagattgaaattgggatacangggatgtatgttctcagcaatattgcaagtggcaatgaatttca

SEQ ID NO: 37446 - DNA, 348 bp, Glycine max
  Clone ID: PAT_MRT3847_133815C.1
ctaggtgatagcgaatgaattttgagtatctatctttgccaattaccacaccggtagcgattgtattacagaatagagtgaataccaacagcgacctcgcctagtagctaggtgcgttgaggaacaagcccatagtgataccaccgatgagaccagcaatggggatggtcatgacccaggagaagaacaggagacccacacgttgccaattgacagctttgaaggtaccattgcacaaacccactccgacggtagcgccagagatgcacatcgaggtggacactgggagcttgtactgggagaagatgaggatggtgatggcggcacccatctccatggatgagccac

SEQ ID NO: 37447 - DNA, 372 bp, Glycine max
  Clone ID: PAT_MRT3847_133816C.1
gtcttgcaattaaagtttttgtctcgcccttctctcttcaactccagggacaagacatcatcatccatggctgcctccctctccactgtcggagctgtcaacagagctcttttgaacctgaacgggtctggacctggggtttcagatcccagttcatacttctttgggagcagcttaaataacggtattggctcaagggtccccatcacaaagacctcctctggaagcttcaagattgttgctgtacaacagaagaaacagattgaccagacccatcagaccaacccggacagatggaacggcctcgcctatgatatctcacacgaccaacaagacatcacaagaagaaagggtttggtcgactcccttttc

SEQ ID NO: 37448 - DNA, 977 bp, Glycine max
  Clone ID: PAT_MRT3847_133817C.1
ttttcaaaaacgctgtgttgtgttcttgaactggttaagggcagctcctccaatctccattggcgagaatcgactcactcccactctctgtatccagacgcaacgcaatggattgggcttttgttcataaaacctgggataagtgggcttctacaaacattggttattctggtcatccgttaaaagctgctttgctaattaattatgacccgactggaccatctcgattgttatctaccattgctgaacaagaagggataagagctaatcccattgaattgagtcactttgtggactttatcaaacaaaataaactccagtccgagctcttcattatcgggtccaatcagtacttggtcacgtcaattcatgagaactggtttagtgcaaggtgtataaacacatcgaagcctgccggtgaaggtgcaattgttatacaaacagcagcttatatcttggttgctctgtacgaaggttccattggtccagcatctcgggctatggcagctgctgatcagttaacttggcaattagggcgaaaaaatctttaaattaatgctacttcagatctgtaccatgcacttaccaaagggctaatttttctgttttactccgattttgtttagatggttgcagccaagtatcttggtgatagagccattacagaaccgcattggttacagtatatgagagggaggtcctcccattatgtatgatatacgttttgaaatagattacttgatacatctgctttccggctttgttttgtatgccctctactacaaggacatttgaaatttctgaaactaaggaatatactattttgagaattctcccacatgtctaggtaatatgaatttaagaatcttggatggataataaactgtgtttaagtccgatatatatagattatgaacattacgctgctatcttttataagtttaagaggttagttgaagagatttagaagaaggaat

SEQ ID NO: 37449 - DNA, 584 bp, Glycine max
  unsure (1)..(584): unsure at all n locations
  Clone ID: PAT_MRT3847_133818C.1
cttgggggggggggggggaaaaggatatcagagcataaggaagtagggtagagggtatataggtagaataaatcgaccgcccagaggacacgatgaggaggaagcccatataaggcacggtaatataaattcaatggaggggtaacccataggaggatacatttaggaaatagtaaacggtggtaaagcggggcccaatatagttaataggatataatcactggaaaattttttatccacatccaccataaccgcaacccggcaggttggtgccagcggcgacgtactcacccgttggttagttgtcactgctggcttactaaaaagtacttgtgctgccgttccgcccagcttggttggcgttgcaagtggccttggtataggcgtaagccgcgtacactgtgttattgtcacccgaagacgtggatttcgaacacgtggtatcaaaagtgctagattattatcaacatctaatattaacgccacacggcatgttggtgccagcggcgacgtactaacccgctcgatcgttgtcactgctggtttcctcacagtacntgtgctgccgtgccccccaggtttgt

SEQ ID NO: 37450 - DNA, 621 bp, Glycine max
  Clone ID: PAT_MRT3847_133819C.1
aggaatcggctcgagcaggagcattgaggaccaaggtggacagcgatggcgcgaatgtcatggttgcattatacgaaaacggtttggtcaccgattgtccaagaggggagaacaaagggcgtgtcctatccaacgactatgttgttagaaagctcgaaaagctctgcactgtcaaagacatctctgccaagaaaacagtatcaggaatggttaactttcccttatgggaaggattcaaaagcagcaaatgtggtttggctgtctttgttcagagcaaatctcaccagatttttggttcacagagttttcagctgccggatgatatatgattctgattctttagtttcatttgatctgcttgctgttatcatattccggttacattgtgttttgttaggctatatgtacagattgtgatatgatttaggataataaatgttgttttctttcttttcttacatattttttcctatgtactttgtccttccttactattgaccctatgtttaggagatggagagagaagtctaaatttgtggcgtgaaaaattttattgattggatttggaaatttgcacttatattgaatctgtggtctgtaatctaattgttgttactttta

SEQ ID NO: 37451 - DNA, 323 bp, Glycine max
  unsure (1)..(323): unsure at all n locations
  Clone ID: PAT_MRT3847_13381C.1
tacgtctcangcacncntacgtaagctcggaattcggctcgagctagggcggtccannggctcncnnntacggnngcgcnnnnngncnctgccccatgcaatagccagtnncncacntggantaggcntgcanaacgagatntggacanttggngtgactannaaacanttnacagncagtgctcaatggaaggacccnnttcaaanttcnanacatantgatncaagttntgaaatncatcanaatntccnccacgatncnngttgtnancnnacnaatncttagnanatcaccaacgtcanaatgnagctactgctncntg

SEQ ID NO: 37452 - DNA, 163 bp, Glycine max
  unsure (1)..(163): unsure at all n locations
  Clone ID: PAT_MRT3847_133820C.1
ggggaaaggtaaggaaacgaangaaanganagggngggggaggattgagagagtgcggtgttggttaaacatgtggaagaaggaagcaagaactagaacgccagacattgcgaggcagagagagagagagaagagaatgagcaggggcccgaagagtccctcg

SEQ ID NO: 37453 - DNA, 425 bp, Glycine max
  Clone ID: PAT_MRT3847_133821C.1
cacacatcgtacgaccgaattcactgcaatcctaattctgcacttcgcgagcattcgaagatggggctgatgatacatctcatcatccttactctgtcagacactactatcaccgttatcgcagagtacatatacaccattgactccggaatggccctgattcagcgacacggggactatcccaggaccagtgcacagccttatctatcttgctaagcagctctatgatggttgcagcataggcgatgctaacatacaagacggatcaaccattatatacgcacttgccattagcagtgacccactcatattgggcaacactatcaccgttatgaccgatactcacactgcagcttgataacacattattactaacgtgaggcacgatactcacaacgtttacagccttcctgatgatcatgctg

SEQ ID NO: 37454 - DNA, 313 bp, Glycine max
  Clone ID: PAT_MRT3847_133822C.1
agcaaataaaatataacatttattaaagtaaagatagtttaaaaaaatcatttaccatggggactagaacatatactgctcaaaatttgtgttaaaagataaaatatatctacaagccaaccaacaaacatacagtaaattcttggaacatgctcataatcaaaacctctcgcaaccctatactaggtctcttaacaccaaatcctgctggaaccccacatcctcaaaactagtgaattagatttctcttttattagatatctattgctggcccaagatcaaataaaatttaccaaaaatcgaaatctcgcaa

SEQ ID NO: 37455 - DNA, 500 bp, Glycine max
  Clone ID: PAT_MRT3847_133823C.1
ttaaaaccattaggattccgttttgttaatctattctacctatttaattaatgtatggccacttgagggattttttaaaaaaaaaaaatcaatcctgtaaacaccttggatggagtcttgtaaaaatgaagacaaacttcccaaaaggtttttataaaaagatcagaggtggtagttacgattcaataaatggatcaatgaaaatcactttttatacgaagttattatattggtctaagttaattcctcctcatttagattagttcataatatatttttttagtgtagtttccttgggtatggctgtatttgtctggaaaagtcagttcttgtgctttcttgaatatttgcagtgaatctgttttaattgttgccaattatactgtagaacagtagaagtgtcagttattgtgttttcttgagtatttgcagcaaacaccctttctgtgtgttttactctataaagtccctttcgtatgatgtggaggacaaattcatat

SEQ ID NO: 37456 - DNA, 219 bp, Glycine max
  Clone ID: PAT_MRT3847_133824C.1
ggaccaaacaccaagttctatttgccgtgatagccgtaatttgttgtcagcgtgctataaaaacgttgtggcggcttacgctacttgacataactcctcaccaaacattgtcgatatctcgcaagatttgttgtcactagacaagcacaaattggtcacatcttccaaggcatcatattcctctaaactgcttagttttcaacaagcctagcttaacaa

SEQ ID NO: 37457 - DNA, 226 bp, Glycine max
  Clone ID: PAT_MRT3847_133825C.1
agaaggaaggggcttgttgccggaagaaccacggcagccggcaagggacaaagacaaggatgaaaaagaacccgtctgtcgttcatgcggggctgaaatccaattgcctctggaacgggtccacaagcaggtgaagcggggggtaccaccagagggacctgtgaaagggactagtactatgtactgggcctccattctgaaatatctaactacggagggggtggag

SEQ ID NO: 37458 - DNA, 451 bp, Glycine max
  Clone ID: PAT_MRT3847_133826C.1
aataggtaacgaccgaaccagcaaagccaagcgcgccacgtttaaagaatcaaggcctgatcccacgccaggcgacgaactgggagaaccagtctgggagggctacctgccattaacaacagggcggggacacaagaaccaagcagaagcttgccaaggcagctgctacgagctgaggccagcatcatagtatggactagaatcaatttccaaatgccaacgctatcagtgccgaaggatccccttgcacatccgcaagtaccacgatagcaccaatatccaaccaggcgcttggaaccttgaaacatgacatacgaaactcacctaactcggccctttccagcacacttgaaacggatactcaatcttctgcactgagtgacagacaggaatcgcacaccacaggggaaactcactctggagtcaacactcgcaagtctaagcaggaaag

SEQ ID NO: 37459 - DNA, 1339 bp, Glycine max
  Clone ID: PAT_MRT3847_133827C.1
gtccttgaagcagacgaacccgtccccgtttttgtccactccctctaatcatgggccgccattcttctaacgtgccccgttcgtcgcggatggctttaaaaccctaagcagctcctccccggagatcctcccgtctcgatccgtgtcgaacacctcgaaggcttcttggagctcgtcgggatccgacccagtttcgagacccgacccgacgtagctcatgagagactcaacggtgatgccgtcgccgtcgacctcgccgagcatgagcgccacgtcgccggggctcggcgacgcgccaaggcgcgtgagaagcgactcgaggtcctggcgcgtgacgacgccgtcgttgtcgcggtcgatgaggcgcaaggcctgcgcgaggtcccaccgcacgtcaacggcggcggcggcgacctcggaccactcgccggagacgtccgggagaacgtgcaagcaaggtaacatgaaaatgatatgaataaagataaaaagtactaagttggtataagccaaaagagtgaaatcgaaaatgaaaagcgagaagagaagctaaaagagatgaattcacatagcagtctgaagaatagagccaagagtgcccaagacggcgaaggcgagaagagggctgacgtcgagggtgtcaaaaacaggggggatgatgttgcggaagaggttgagataaggatcgcagaggtctcggatggcggagagaggctggcgttcccaggggatgttggggaaccaactcagcaaaaccctaaccatcaaaaccccgctgtatatgtcaagccacttcccaagccccgccgccacaaccgtcagcggcgtgtttagggccccactcgcactcggacggtcccgcagagatgccaagaacaaagcacccatcgtggacacgctgttgctgctgctgttgatgttgatgttcaacactggaatggccgccttcttcatcagcaacacggcgagtcccatcagcgtcgtcaccgtgcgagtgctcccccgcagaatgtcgccgtcgctctccatcttgcatttcagcctcagcgaagttggcctctgtgctgaagggagagctagggatttggtaaaggcgagaggtttgaagctcaaggaagttgggttaacaaagggaagcgcggaaatggagctctgacccgctaacaacgccatcgtcatctcaatcaaacaacaagaggctagggatttggccaaggcggagacagacccaaatgtttatcctcctcctcaatacacccttctttttatatctacattaatttattatttccaaaactcaccttcaatatccccttctgttcgtcttctcgcagccgta

SEQ ID NO: 37460 - DNA, 675 bp, Glycine max
  Clone ID: PAT_MRT3847_133828C.1
gtcaaaatatttacgtttaccaattaaggaaaaaaacctctgtaacattattcacttcaaattcaagggaagaacaaatctaattctatacgatgctcctgatactggacaaattaaattacaaacacgcacaaaaagaatcaattcacatgaacaaaaaatgagctaatgagaagttgaatcaccacaacgaacaagctgcatacaaaaaaagaaaagaaaagaggatttatgctgcactctggcctctgcgagacttcgatagaatgtccttgagataatcataacgactgcggtgataatcaatccacaaacacaactgcctaatgacctccctcttctcctctcccaagtccagcatgccatcctctttctctttcatctttttctcaagctctccaactgtcctatttagttgaactacagttgttgtcagattcatcttctctgattcctccttgcttgcttttgcctctagcttctcaacactcttcctcaaagccacttcctgttcttttttaatctgcagctgctccaacaagtggtttttggctctctttaactgctctttttcccttttcatctccctcgccttttccttctcttcccctgttctttttcccttttcatctcccctacatggtcctttgcaaccccaagctcgcactttccagc

SEQ ID NO: 37461 - DNA, 106 bp, Glycine max
  unsure (1)..(106): unsure at all n locations
  Clone ID: PAT_MRT3847_133829C.1
ggtcgcatatagatagattttatcttatagaaataattgaacaaatacattccaattatgtcttcggcgtatncancatcattttccttttncatatccgatgncg

SEQ ID NO: 37462 - DNA, 442 bp, Glycine max
  Clone ID: PAT_MRT3847_13382C.1
caacaaaaaaaatacttcacattaaacaaacactgatcaagtccatggtttaatctaaggctcccctacttttttaattttcccttcctaccccattttttttggccaaccttttcaacttttttttttctccctcaacttttggaatatacatcacatggcatggcaatcatacccctacatatattttaaattaaaaaaaacaaaaaacttgacccaaacctccactgccaaagggcttgcaacagggaattgaattactcaaaaacaaatccgggcatggaatatgttgggctaaccgtcgaaaacaaacgggggaaccaaagggggttggcaaaaacatctccaccgtcctttttgagcccccatttgggtggaaccatgggattgggttcaggaattcgggtccaggaacttaaacgcgaggccaaacttgctccca

SEQ ID NO: 37463 - DNA, 429 bp, Glycine max
  Clone ID: PAT_MRT3847_133830C.1
atgaaaagaaaaatatgctttacaaaaaattgctttcctgaaagggggcacctggagaaattggaagccattgaacttcctacacctcttccccaccaaagggtacaggctattgcagaatcaatagtagaaaatcaaaatatcttcaatcacacattcttatacatatatccctaatataatactatgcgcgcgttagttaatgaatctccaaaaacgtactcactgtttttgaatgactcaaaatgatgcctgatgaagcgccatcccttgaagacgacctctaaccctccattgtgctgaaaccaagcggggtacacagcttgcggctgctgaacaaacaaagaccacaattccaggaacaataatgttgctccttaggggaacatatctctttcccttcctgttgtgatcagaatgctgccttgg

SEQ ID NO: 37464 - DNA, 395 bp, Glycine max
  Clone ID: PAT_MRT3847_133831C.1
gtgtatacacccgaaacggcacaggaggaaacccggactcatagagcacgggatgtcagaactgcaagggcgagtaaaaatagcaagcctcaagcgactgcaaagcaggcgggagcgagagaaagtatcattgaggaggagcgcaagaccagactgcaacatagttggcgcaatgcgctcggtggaagaccatcagaccaatcctgaaaatgcagcgcggactatagaagaagcgcctctcagagggggaaggcccaaacaggaggatacatacacgaagaccaacgtgcagactgaaccaaacatgaaatcaaggagacagccgaagagcaccactaccaaaggtgaatcggctcaaggaaaagaccccgcaaggggaaaagctaaagaagcaa

SEQ ID NO: 37465 - DNA, 333 bp, Glycine max
  Clone ID: PAT_MRT3847_133832C.1
gtgatttcagtgagtgatcggtgttcacttgatctcatcataatcggcagcgtcaactgaagaagatgccggtcagaaacatcgccgacacaaggcctgaagaggcgactcacccccacacgctgaaagcggatgtggctgagttcatcttaaccttcatgttcctgttcgccggctcatgctccagcatcgtctacaacaagctcaccgacaacggcgctgacacccctgccggcctgatgtccgtcttcatcgcccatgcattcgcgctcttcgtcgccggcttcgtctgcgccaacatttgcggggggcaacttaaccccagggtcacct

SEQ ID NO: 37466 - DNA, 265 bp, Glycine max
  Clone ID: PAT_MRT3847_133833C.1
taaaaaaggtttacaaataaagtaacatcaatattataatttgtttccagttaaaagtatattaagtccactaacaataaaacaaactggtctacacgcttacaagcaatctctatcaccctataattaaattcgaaccggaacctgctggcatacaaaatatccctataatgaatccctttaaaccttatcatcttaatgctcatcgttgtttactgattaaaattgatattcccttacaattccacaaaacctacaactacta

SEQ ID NO: 37467 - DNA, 192 bp, Glycine max
  Clone ID: PAT_MRT3847_133834C.1
taggatttgtaggatctcactatttgagagtgtgtatgagagattattcgatgccttatgcgagagtttataacctgttttacatacagtgaatacatacttggtatgaaaaggagatccaagtagatgaagatgttgttcatcatacgtggttcgccttggatagtgttaccacagatggggggaggagtg

SEQ ID NO: 37468 - DNA, 224 bp, Glycine max
  Clone ID: PAT_MRT3847_133835C.1
ggctagttgaagtttcaaggccagtagtaaccttccaatgcttttttaagtcttgtttgtgctaaattctgtcagtacctgaaatcatgaaccacaagccatggctttggaggaaaaaatctatggagaaaacaatccttgcagttggcaaagttgtcagttcttctaaaaccattgaagaagaggcacacaaacttccaacaaataaagaaactggattggaa

SEQ ID NO: 37469 - DNA, 160 bp, Glycine max
  Clone ID: PAT_MRT3847_133836C.1
caatccccttctactttcaccagatctgattcctcttcagagttcaaaccctctttaattgcatttacacctacccaccaaaacactaaaaccaacaaacctgaatgggaactgccctaccctctttactttaattcactcacaacaagggcacaaaaaa

SEQ ID NO: 37470 - DNA, 292 bp, Glycine max
  Clone ID: PAT_MRT3847_133837C.1
gatttttttaaaggatcgttgtcccttgcctcctgttgtactacaatggagaagttactacacacccaaagttcgctcatggcaaaagcttacaatcaacacatacaagctttcaactcaatacaatttgaattagttagaggatttcaatacataatagacatttctaaggattgaaatatgtagtagacattttgttcatgacaaaagttacatgtgtatcccattatttttatggatgtgaacctcaatatgtaattgatatttctatgaaattgtatgcaatacatgt

SEQ ID NO: 37471 - DNA, 255 bp, Glycine max
  Clone ID: PAT_MRT3847_133838C.1
cttccgaggtaaaatgcgcaagttttaggcttgcagtggcagcacacaagatccgagccttgaaaaccattcctgatgaatgcgtagaacgaatcaaggactacattaagggcgaacagtttagatcagactctaaaacagttaaccaacaaggtttcttttatgcaagggaacggcaagtccatcacaacgacatatttatattctgcatagataacaccgtactctccaatatcccatactatgagaaacatg

SEQ ID NO: 37472 - DNA, 353 bp, Glycine max
  Clone ID: PAT_MRT3847_133839C.1
atgcatggatctataaacttaatgtttggccattcttacgcggacaaaacactcatactgaaacacactcatttcgcagcattactctcaatatacaacgcatactaggaccactcgatttggcttcttcatcttcatcactagcatcatctttataaccattgaaatgataacacttttctgcctatagagtcattgcttggacccctttcttattactactagtagaagatgaataccatcagacaagttgtgctaaaaccatgactgcaaactcgacccaaattccgagaataaaaaccctttcaaacatcgtcataattcttgcaatgcgcaacaaaaattcttttttt

SEQ ID NO: 37473 - DNA, 412 bp, Glycine max
  Clone ID: PAT_MRT3847_13383C.1
aacaaaaacaatcaaattactgggcaaaaacctttcaattttaactaaagggccccaatcatggcattgaaaatatttaggggtgggacagaacaagctcctggggggggcaaaccatttttttttttaacagcaagcttatttgggaccacctttcaaaaaaaagccgagggaaggtcataaaagaaccccatcacaaaaaagaaactccctaaaaaaaacttatttccaatccctcctttatcacctttaattagccttggtccgaccccctaaaaatccttttcaagggcggaaagatttttaccgagccccaaaaaaataaccctttttcatggccctgccaaaattccagggcacaaaagcttttttggggtacataaaggcaaatttggggcaaggggggggaaaa

SEQ ID NO: 37474 - DNA, 631 bp, Glycine max
  unsure (1)..(631): unsure at all n locations
  Clone ID: PAT_MRT3847_133840C.1
cctcctctgttttgaaacagaacaagaaacagagtgaacaaagaaccatcgccatgcttgatccaagaacacaccaccccaccaattcttttgaattgtacgacgcagcaccacacaaacctcacacatgggaagctacgaacagttccggtttgtggccttcgaaaccagctttcgaggaggtagaggttgatgattccggaatatgttcacctcccatgtggacaacgagccccgcacgccgcaagaacaacctccgtagcctctcgccgacgtcgaggacgcaagccatagtgagtgggcagagggagctcatggagatggtgaagaacatgccagagtccaactacgagctctctttgaaggacctcgtggagcaccacagggttgttgatgctactagacaagagaaaaatgtggtggaagagagaaaaaacttgagcagcgtgtacatgaagagagaaaaaagtagaaaggttgataataataataagatggcacaggtgaagaggaacgggaacattgatcgtggagggttctacctcaaaatgggtcttccttttccttttggatcanagggacagaagaagaagatgaanaagaanaatgagtccttggggaatagtagtag

SEQ ID NO: 37475 - DNA, 387 bp, Glycine max
  Clone ID: PAT_MRT3847_133841C.1
ctgctttctcagttttttctatgtgactctgtttccatagtccgtgttttctatcattgcttattacccttttgcagatttactttatcaatgtcataaaacttttacatgtttcatcttttttttgcagtactagattgcattgttttctttctcgttttccgggaaagtgatcacatagtaggtgaataccagagctcacaccactcttcaggcaatgaagccacctttaaatgatgacaaaaaattattcttatttatcatgcaattgctttctgtatgaagaagaggtgtaagctttttatccaaaactgaaactgggttctttcacttctcatgaaaaaaacggagtcctggccttctgcattttcttttttttttcctttt

SEQ ID NO: 37476 - DNA, 1002 bp, Glycine max
  Clone ID: PAT_MRT3847_133842C.1
acgctgcgagaagacgacggaaatcctgttccctatggctggtgcgccgtgcgaggtgtagcgataacgaagggatagaggggaagaccttcgcggtcaccggtggactgggattcgtgggaagtcctttcggcttggagcgtggacggaggttgcgccggatctgctctctgcttggagctcatccgaagagttgctcgataggtgcgatcctttgacctccgcctctcttctccatggtcgcgtcctctcaaggacaagggagtcctttgcgtccaaggggatgttgcccgcaaagaagacgtggaaagggtcctccgcggttccgactgcgtattccaccttgcggccttcggaatgtcaggcaaagagatgctccaatttggtcgcattgatgaagtcaacataaatgggacttgccatgttatcgatgcttgcctccacctcggcatcaaaaggcttgtctactgtagcacaaacaatgttgtctttggcggtcaacagatcatcaacgggaatgagacattgccctatttcccaattgatcaccatgtcgatccatatggccgcagtaaatcaattgctgaacagttggttcttaagaacaatgcccgtactctcaagaacgactccgggaatcgtctttacacttgtgctgttcgtccagctgcaatctatggaccgggtgaagacaggcaccttccaaggatcgtaaccttggcaaagttgggtctccttttgttcagaattggcgacattactgtaaagtcagattggttttttgtggataaccttgtccttgctcttatattggcgagtatgggacttttaggatgacaatcttagcagcgggaaaacgccctgttgctgctgctaatgcctacccggtcgatgatgttggtattggatttgctcatgtttctactttggggtatacactggctaatgcgtccttcccagtcatgcatgctctatttctacaggagattgtcaattcttttg

SEQ ID NO: 37477 - DNA, 723 bp, Glycine max
  Clone ID: PAT_MRT3847_133843C.1
tcggaattcggctcgaggggtaatcctattccctatggctggtgcgacttgcgaggtgtagacatgatgtgatgtgatgaattgaggggaatccattgaagaggcgaggcgagttaatcagaaatcagaatgcacttgagcgagaacgaagggatagaggggaaggccttcgtggtcaccggtggactgggattcgtaggatctgctctctgcttggagctcatccgaagaggtgctagagaggtgcgagcctttgacctccgcctctcttctccatggtcgcgtcctctcaaggtcaagggagtcctttgcgtccaaggttagcctgcgtcaatttcatttcttgtttttagtatttatttatttaattaacttttctgcttctgcggtcgactgaacaacctaaacaaaggggatgttgcccgcaaagaagacgtggaaagggtcctccgcggttccgactgcgtattccaccttgcggccttcggaatgtcaggcaaagagatgctccaatttggtcgcattgatgaagtcaacataaatgggacttgccatgttatcgatgcttgcctccacctcggcatcaaaaggcttgtctactgtagcacaaacaatgttgtctttggcggtcaacagatcatcaacgggaatgagacattgccctatttcccaattgatcaccatgtcgatccatatggccgcagtaaatcaattgctgaacag

SEQ ID NO: 37478 - DNA, 192 bp, Glycine max
  Clone ID: PAT_MRT3847_133844C.1
cacaggtgtgagaagacgacagaaggggtaatcgaagactacggattggggcgacttgggaacaagcattaccggcgcccaatataacacttatggttagcagtaaaccccggaatgatctggttaaatggatagctcttccggattcaaaagtaccacaagcggggcatttgggcctatcaaggcccaaaa

SEQ ID NO: 37479 - DNA, 285 bp, Glycine max
  Clone ID: PAT_MRT3847_133845C.1
gatgagctagtgcaaacggaccacacgaggattattcatatatcattctctaaccgtgcactatatccctctcattcactctctagctagactcctcatcatcgtacaagaaccaatgcttgtactctctgttactttttaaccatcgttgaatgaatcacctaaggaaaaacgagtagcttacagcagagcgggttatctttgacctgtgttgtgaacgagataaatcgtgcttgtgtataggtgagtgcatgaagaattaagagatgggtgaagcgggtgaac

SEQ ID NO: 37480 - DNA, 571 bp, Glycine max
  unsure (1)..(571): unsure at all n locations
  Clone ID: PAT_MRT3847_133846C.1
ggctcgagcacaattcaacgaattttaattcccacaaatctaaatcaaagccatcgcactaccctgatgcaccctctcccaaattattttttaaatgtattccatctcattctgtgtaccttccacaaccccactatataacagaccctccatattcaaaatggtgcctttcactcccagcaacaaattgcaacaatcaacaagtagtccaacccgaataaacatgatgggaaaatgtagtaagtcccttatggcgttcccaatcctcctcctacgcaccctatgcttccttttgttctcacaacccctcctttctcaggagaacaattttgttcgtcagccagctgctcaactcatcatcactccccaccatcgctcccattcagacccccaacaggtgacttgggacaaacagaatggactgcatcaaccttaaaacacattgatagcagcgactatgatgtgttcttgttaccaggagacctatcctatgccgattcccaacaacctttgtgggactcttttngtcgtttggtggagccatatgctagtaaaaagccatggatggtta

SEQ ID NO: 37481 - DNA, 910 bp, Glycine max
  unsure (1)..(910): unsure at all n locations
  Clone ID: PAT_MRT3847_133847C.1
ctaagttttcaaaaacaatatataaggtgtttggagctcaagacagattatcacattggttggatctgtctcaaacttatggaatgtcaatatgaactgcaaattgattcaaataccatagacttgaactttgaagaatgtgttaaaagaagtggaaagttgtagcaatatgtggatggctgtatataacctggtgagaggtatgatttccttgcagaagagggatttagtctcagcagaagatttcatggcacaggcttgttcattaggaggtnnngagagctgcctctttctatgtcatggtgccatctgtatggaacttgttcggcagtgccatggttctcagttcctatcacgggccattaatagtcttaccaaagttcatgagcattcacttattcccttaccttttgtctcggtattggtagctcaagcagaaggaagccatggttctaaggagaggtggaacagaaaccttcggcttgaatggtataattggccaccaggaatgaggcctgcagagctctactttcaaatgcatatgcttgcacgacagttgaaagttggaccaaacgctagcatagagtccactcagagtcctcatagatgggttattcgagcaattcacatgaacccttcttgcatgcgatattggaggattttacagaagcttatggaagagacttgaaatgaagaaacacatttaaggagcgggttgtcacgagcaatcgtatttggttgttacatttctattgaacttgggatgggaaatagataaacaagtcgttttttcaaataaagttgtaagtggaaatatggaatgctgatttcatagacagatcaaagcagttaaatgacacctttcgatacttcgatactctagtgtaactactaccagaaagaataggtc

SEQ ID NO: 37482 - DNA, 220 bp, Glycine max
  unsure (1)..(220): unsure at all n locations
  Clone ID: PAT_MRT3847_133848C.1
ctcggatctccgnagnaantctggagctaatacgcggatcaaaccttgacttttggaagggatgcatttattagactaaaggtgaacacaggttctggccttcgctttgatgattcatgataatcgtcggatcgcactgcctgtgtgccggcggcgtatgatttaggtttctggactagaaggttccgatcttccgatagtggggtggcatggtggtgac

SEQ ID NO: 37483 - DNA, 216 bp, Glycine max
  Clone ID: PAT_MRT3847_133849C.1
ctcgagccgattcggctcgagtaggtaacagggagttatccttgcagtctgataataatacagctaactagtatgtgatgtatctattgtcttgtttgttttcagaggagctgttttcaaatcatgggcgacatgtgtatattataaagatatgggaaagaggtggtatatttttgtggtatgtttctctttcaactccctatatatatatatata

SEQ ID NO: 37484 - DNA, 460 bp, Glycine max
  Clone ID: PAT_MRT3847_13384C.1
ccacgcgtccgataagaaaggcgtcgtttgccggcatgcgtggtgagcaaggacgaaagaagatgaagatgggtgaactcgaaaattcggaaaactataaaggaggggaagaaaaactgaacacgttgatctcctttaactcttgacaaattgaacactttctcttctctcaagtggcgtgttagttcattcaccaatttctatgactgcttctgcaattcacatggatccctttgtttccacttcatcatcccttcttattataattctccgatctcccatgtttccctgcaagagggcctcaacaaccatatcaacgaggcgcgcatcagaaccatgcttcatcgccgaagttagtttcttcttgttcacggtcacaaatcgagacgcgccttgccgggaagttgcagaaacaaccttcaccatcaacctacgattaatccatgacgaccaagtcctc

SEQ ID NO: 37485 - DNA, 457 bp, Glycine max
  unsure (1)..(457): unsure at all n locations
  Clone ID: PAT_MRT3847_133850C.1
gatcataacaactagagaagtacactttgctcaagaaaaactcaagcgtgagtaacggggaaatacataagtgttctttgtttctagctttttttttagctctttttctttttttacatgttgcatagagaacactgagagatgcgcatgttacagattccaaatgaagagcctctgacagacagaagaatatatttgtgtaccttttcttttttgtcctttatatgttacttggcctttgcttgccctctaggggattcgttcactttagtacctacttccaacttaagacctccacttgtactatatgcagatatttggggacgggaccctcgctctttctctcgaatgaggttgtgtccagtcccaacttagnaatgtatcctgacactctaccagttccagcaatatctctgatattgccaagagtggacganaaaaagacaaagacaaagaa

SEQ ID NO: 37486 - DNA, 450 bp, Glycine max
  Clone ID: PAT_MRT3847_133851C.1
ggatggaactggcaactggatttatgaaaaggtatttttttcttaatgacttattattattgcacttaaaaccccaaacccaaagcaataagcactagaataatgatacagtaccaaaaacaacaaatttaattaaaatatattaatagtgtaaatttttttaattatctctcagtcataaattatcaagtatgataaaactgttaatttctgtaattattacttgaaagttatatttaatttaatttttaaatatttagtagtataaaaatctttagactcatcgtacataaaaaataaactaaaaaattattagacaaaagtgcataatatgatgtgttgcatttatattggaagatattttattccattacatcccttgaattatcatcaggcatgccctgcccggtttggattcgtggagttttgtgcttctcactggataccatc

SEQ ID NO: 37487 - DNA, 423 bp, Glycine max
  Clone ID: PAT_MRT3847_133852C.1
gtccggaattagtcccggagctcctgctcactaggccgcggttcgccctttttttttttttttttttacttttgcattcgaatccatgagattcacagattaggattatcttcaaatgctatacggagacattaaaagagactcctgattagaatacgacagcgaggttataaagttaccaacgtgatccatcaatgatgctctacctgttcccgtagatcacagagatccatatgttcttgcatagctgccttgagaaggactggtggtttgccagctgactgttttggaacaagatctgggtccttcgacttgaggctcctacgtgtgtgcatgggctcgcaggtcctctggaaactcccttacgtgcccggggactcatgagtcaagataaccattcgttgcccgttttcttgggatcat

SEQ ID NO: 37488 - DNA, 320 bp, Glycine max
  Clone ID: PAT_MRT3847_133853C.1
aagggggggggggggttctagacaacaaggccgtctccaaatgggtcggaatcgtcgtcctcgctagcaaccaagccagcggcggcaagctctacgaggctgcatgctcgttgaagtccctgcttcaagaccgcgcctatttgcttgtcgccgagcgcgtcgatatcgccgccgctgccgccgctagcggagttttgctctctgaccaaggccttcctactgttgttgctagaaatatgatgttggattcaaagtccgaattggtggttcttcccttggttgctaggatggtccgaactgtggatgctgcggtgaatgca

SEQ ID NO: 37489 - DNA, 1457 bp, Glycine max
  Clone ID: PAT_MRT3847_133854C.1
acggctgcgagaagacgacagaagggggaaagagggaggccacactttcccagtgagcaaacgccaaaaacgcgtggactcaaaaactcttttctccatcgcagttcataatcccccctcatatccgcgtctgcaacaccactttcacaacgacgccgtttaaactgccacatctcaaactcaataatcctcgctccttcctttttccttctcttgcgccagcatggccgttgctgacccagggttccacttccaacacctccaatcaagcctcactccgaacctaaggtctggaatttcttcaagcttccgttccgccattccgccaccaccaatacgacgccgtcttccgctaaccttcaccatcttcatcatcaccataaccaccaccaccaccaccaccaccaccacaaccctaataatctccccctcgagggttccacttcccacacctccaattccgtttcctccgtcgcgagatctcttctcccaacacgacgtcgtctcaagctcgatccctccaacaagctctactttccttatgagccgggcaaacaggttaggagtgccatcaggattaaaaacaccagtaaatctagcgtagctttcaagtttcaaacaactgcacccaaaagctgtttcatgcgtcctcctggggctatccttgcacctggtgagagtatcatagcaacagtgttcaagtttgtagagcaaccagaaaataatgaaaagcctgaaaaaagtggactcaaatttaaaatcatgagcttgaaggtgaaaggatcaattgattacgtccctgaactgtttgatgagcagaaggaccaagtagcagtggagcagattttgcgagttgtttttctagatccagagcgtccttgtcctgctttggaaaaactgaaccgacagctggctgatgctgatgctgcccttgaggcacgtaagaaacctgcggaagatgcaggtcctaaaattatcggggaagggctcgtcatagacgaatggaaagagaggagggaaagatacctcgcaaagcagcagggtgaagtggttgtagattctgtatagggcgttggtcaggaatatacctataggtaatgacattgcagccaaggaaaatattatcttaagagaaacaatgattaaaatcccagcgtctttttcttagaaaattttcaggtgaatggcaagtgtactttggagaaaactatgcgtgggtgtggtgatctgatcattctctatgtagataaatgtcattttgtttttaggcttttttgtcgtgggaataattttgatggattgatgtgaaatagtttattcaagttctcatgatcaatgatttgctgtcagtctgttttgctatgatttcatttaggtgcagatggctgagattctcgacaaactatgataaaaagagatattgattttaatggttagtttggtattgcgctgttgcc

SEQ ID NO: 37490 - DNA, 407 bp, Glycine max
  Clone ID: PAT_MRT3847_133855C.1
attgtttttcttatactgaatttgaatcttaggggattggggattcacaggtcgggggacattccacatttttatcattttcatacacgtacctttcatccatgaaacccctcacaaaccatatatcaccagtttcatttcttcaataaatcaatgatacaacgctcttctattgaaataatgacttctatctgctttttaaacttcatcaatctctttatgagaggatcttatcaacaaaaacacattcaatgacttcataaattaaatggaaagcaaaagattctatttcaccatatccttattcaacatttatgaatgcattttacaactttcttaattgatctgccgaaaattccaattttgaagattaatgcctagcaattatttgtaaccagtcctatgtt

SEQ ID NO: 37491 - DNA, 238 bp, Glycine max
  Clone ID: PAT_MRT3847_133856C.1
cccacgcgtgcgtacacgcgtgcgggcatttgtcagctcactcattaaggctgctgttaggggacaacataagggggggctaggtacattagttaatagagatgatgatgggtatcaacatcatcatgatggagctaaatgtgtgtatggtgctatctttcatttgttgaaggtactactagtgccttcttacatatgattaattttcagcagttcatgaattgtgatgattaataac

SEQ ID NO: 37492 - DNA, 282 bp, Glycine max
  Clone ID: PAT_MRT3847_133857C.1
gggggggcataaaagtttataaaaccttgatttttaaaagtttagttgggttaatctgggccttttacccaaacttttcctttttggccccaattattaaaagattttgataaaatgggggaaaagaaaccgccttcccccggggttaaagggggtgaatggtaaactaaacttgttccttacaatggggggggaaaaaaatttttatttaagcgggcttttttttttttcaaaaccagggttttgacttgggaggaacatgtttcaaaagagccccgggtt

SEQ ID NO: 37493 - DNA, 448 bp, Glycine max
  Clone ID: PAT_MRT3847_133858C.1
attgttcaattggacttttacccattctttttttcacttggcatgttaatttaagtttggttaattccccttagtgtctcactatttatatatgtgcaatatttaatacaagctcatgccttggtcactgcttaattttttgttgctctccatgcaattgtgaaccatatggtataacacatagaaggactttgaagaagtagaagtggggagggggaagttgaattttgttattctttattttattttttttgttatggactggaatttgaaagcaccttcttgggatttggtggatcatgtggataaggcaacaaccttacaacaaaacataggaacaaaggaggagcaaaacagatttggagtttatagaatgaaaggggagttttctgttgacttgaagcttggtcatcatcatgtggggaattctggcactgaatcagcacta

SEQ ID NO: 37494 - DNA, 2186 bp, Glycine max
  Clone ID: PAT_MRT3847_133859C.1
gccacgcttccgttcacgcgtacggaaaggtccagactcttctagacattaaatacctctccgaaggaagccaaccgaccaaacaacaataaaatgaagaaagaaaaaactctgcattcaattcgattgattcacaaattgcaactccttttcctaatcaacacgaacacaacacacacagagaaagatggattttgaactgagaagagcgagagagaagcttgagaaagagcagagggagaggaaggaaagagcaagattgaagcttctgaaggaaaagaaggccaaagaagaggctcagaagcaaaaagaagccatcgaagctgttcaaagatctcgtcgtattgatgccgcccaagctcaactcaaggctgaccaacagatgcaagaaaacctacttgctggcagaggaatagtgttttaccgactactagaggcttttttttatgaaggtgctggagataagatcaagctacctccttcttgctttgcagaactgtctgagcagggtacttttgacaagggacagggacccttatactttcagttgtcgttagttcatgaagaaagcacttcaagcatccaaactactgataaagagaaacaggggaggaccacccattctggagttttagaattcactgctgatgaaggttcagtgggtcttcctcctcatgtatggaataatttgttttctgaaggcactccaaaacctcccttagttgaaatccgctatgtttggcttccaaaagggacatatgcaaaacttcaacctgaaagagtaggattttccgacttgcccaatcataaggctatcctcgaaacatgtcttcggcagcatgctactctttctcaaggtgacattttaactgtaaactatggagaacttgcttacaaattaagggtccttgagttaaaaccttcttcaagcgtatctgttttagaaacagatattgaagttgacatagttgatcctgatacatcttcagaaaagacagatgagcatgttttaatgccacttgtattcggaatgtcacaaattggaacagtagaagaaggaaagtttgtgtattacaaattttccgtagacaatgtaacttgggagaaactttcttctgggaattcttgtgttgagttaaaattagaatcagagacagatgggggggacactgatcttttcatctccagacatcctctcatatttcctacacgacaccagcatgagtggtcttctcatgatattggctcaaagactttgattcttagctctaaagataaaaacatgggtgcagggacttacagcattggtgtatatggcttcaagggaattaccaagtataaaatatcagtcatggtccaggataatttcaaccaaaatgttggtcagcaagcatcatcttccatgtcatctatggaactggataccgaacaatgtaggaactgcaagcattatatacccagcaggactattgcactacatgaagcttactgtagcaggcacaatgttgtctgtcagcatgcaggctgtggagtggttcttaggattgaggagtccaagaaccacattcactgtgacaggtgtgatcaggcgttccagcaggtagaattagaaaagcacatgaaagtttttcatgagccacttcactgcccttgtggaataatcctcgagaaagagcaaatggtggagcatcaagcttcagtttgtcccctgcgtcttattacttgccggttttgtggtgatatggttcaagctgggagttctgccatggatgtccgtgacagattaagaggattgtctgaacatgagagtatttgcggttctaggactgccccctgtgattcttgtgggcgttctgtgatgttgaaggacatggacattcaccaggttgctgttcatcaaaaaggctaattctgatattttcatcttaacagcaacttgtgaaagattgcatctaggtaataaatagaaaattaaaagaaactggaggaaattgaaagatacaagcagattgatggtggagcagaaacatctctatgttctactgtggacaactggctggatatatcaccctgttgttgatcttgtcattcattatgtatgaaattatgattatgaatttaagattgtgatttacctcgctatttcgttatggaaattgtttggtttgtggtaaaaaggtccgcag

SEQ ID NO: 37495 - DNA, 364 bp, Glycine max
  unsure (1)..(364): unsure at all n locations
  Clone ID: PAT_MRT3847_13385C.1
tgttgggggggccgngggnggcgggggggggcggggnnnggnggnnnnnnnggggnnnggggggggnnnnngtgtggttttttggggnngnnggnngntnnnnngngnnnggggaaagaagngnannnagnanatnnngntgggngtgggnaancaaaattnngggntnnggagtgtatatttagnggggncatgggaattagtgggggggggggggggaanngtttttttgtttgatgaaagaattgtataattaanggaaaaaaaaaaagaggggggggggggacaanntgcccgaatgggaaatgggaaccggaggaaagggacaatataatttggggactaccaattgggggggnggaaa

SEQ ID NO: 37496 - DNA, 725 bp, Glycine max
  Clone ID: PAT_MRT3847_133860C.1
acttcagtcgggcattgaagttctggggtgctttagtagttagttctattatgatttggccattaaaaaatgtctgtcataccaaattctaatgacactaccattttcagcaagccttcctttttctttatgcttttatcaggaaatctattgatccaggcttttccaacatgaatactattcctactctttttttgcgttaagaaagactaagtttgggaagaaaactcccttacgctccttaggtcaattgtggtttttatgtagtctccatggttggatggttgcaatttttattttttttgcaatgcactctatgtttcaagtgatcctctctctagccacaatttgtcctttaatcaaaggtactttcttggaaagttttaacactgcatgttaagaatttcttggcaaggtctgggtggaagggagaagccaaggatagatggaagtggtttgtataatgttcgatcagtatatatatgtgtgtgtgtgtgtgagagatctgtctgcgttgtaaatcttgaaggggggtggaagttcttgtggcataagctagtacctttaaatgtgattatgtttatttggatggtggtgaaggatcgtattccagtaaaaataatctatatcgcagagggattttgagggctgaggaatgtttttgtgtggggtgtagggaaagagggaaaaccattgagcatttattctataactgctctttcttt

SEQ ID NO: 37497 - DNA, 588 bp, Glycine max
  Clone ID: PAT_MRT3847_133861C.1
aggcagcatttgacgtctgacactaactaaacctacggctggtttaggtctggtctccaaccacggttatgtgtagctagagcgaggtaaggcctgcgtaactccagcttctcaccagtgagagctgcttgtactgagattagaaccaacccagaagctgtcagtcatctccttacggagctgctggcagatcatcacaagcttggtcccttcatgcaaagcccttaccatatgcagcacggctcttgagtcaagaaatattaaaagataatggaatgctgcccaactcaaaggaatggtgactttgacagactgcaggatataatccctatgaccatggcttttttaaacctcatgagaagggttacttggacgggaataggaggatggaatacacctttagcaagagacattaccctgttactactggaatgacaatggcctggcaagtagctgctgcaagtgctacatcatacacagctcacaggatttggggcttggcaattgcagtttatacataccccaattccaattttgttggcagacttttgggacccagaggcaactctataaaacgggtagaagctt

SEQ ID NO: 37498 - DNA, 282 bp, Glycine max
  Clone ID: PAT_MRT3847_133862C.1
gtcgtttcaactcgcggcctctgaacctcttcgaaaccctcgttaaaacctaccgagactccgggtccgctcccttcgtcttcgatttgttgatcaaggcgtgtttggattccaaaaaacttgacccttctattgagatcgttcgaatcttgctctctcgcgggatcagccctaaagttagcaccttgaattctttgatttctagggtttgtaaaagtcgaggggtggatgaagggtatgcaatttaccgcgagttttttcggttggatgaggaaaacaacg

SEQ ID NO: 37499 - DNA, 339 bp, Glycine max
  Clone ID: PAT_MRT3847_133863C.1
tttttgaagtaaacctctcatattatggggaaaaacattgaacaacgcctactaccattcaagccaactttattattttactcacaaaattttatattacacaaaatgacattggtggttcacctgtccacataactaagtactgaaagatgaaactcaccccatcttccctataatttgtgattccagcgatgaaaaactagcggatttagaaaaatcaccacttgatatgctatgttttttaaacaaaggaaatacttctcactttcttttcatattaaaagatggcggggcatttaaaccttcatgattggagtttaacttgtcccattcataatt

SEQ ID NO: 37500 - DNA, 285 bp, Glycine max
  unsure (1)..(285): unsure at all n locations
  Clone ID: PAT_MRT3847_133864C.1
nanntaagagtcacangcacgcgtacgtaagctcggnattaattncnggananaaggngntcactagtgggcggcngccgattagtgagctctcganncgggaatagnttncggannnggtanctgnaggngtnncnagnttnnnntatagtgagatttanagagnntggngnaannannnnnatannnnnnnntgtnnnaatnntannngnnnanaannnnnnnnaaaaaaaattnaaaaaannnnnnggtaannnnnnntnngngtgnnnnnnnnnnnnnnnn

SEQ ID NO: 37501 - DNA, 180 bp, Glycine max
  Clone ID: PAT_MRT3847_133865C.1
accagtcccgaattccctcctcgactccacgcggtcgcttccatatatcatcctcttataattacatatccatttataaccattgcaacttctaggtgaataagggcctactccttcttgaatagcatctttaactcattttctaatattttaaatagatccttattgatgagtcaaatt

SEQ ID NO: 37502 - DNA, 309 bp, Glycine max
  Clone ID: PAT_MRT3847_133866C.1
gggggcaaaaacaaaatttaacacttttgtaagcacagctttgccctgaaattaaacattttacaaacattattgggcaaaaatttttattttttcaaactacatccccaattcataatttattgggcataaaatcaaattcaaggacccctcctacagatggaattattcaaagagatacccttgttaatttcctttcccagccgttccaccaaaagtaggtttttaattgtaaatgaaaatatctcccactttttgagcataaggggtgtttggggatttcctcggacccgtgggcggacccctggg

SEQ ID NO: 37503 - DNA, 498 bp, Glycine max
  Clone ID: PAT_MRT3847_133867C.1
ttgactcttttatacattaaatggacagactgtttcttcatggcatttggaaatttggctgttgacaccattaattttgaggcttttccccacaagctggggcagtttggacagattcaggaaaaagttgtattgaaatattgacaagaggtatttcttacagataggccaactcaagcgcgtgctgcaccactctctattggctgatgggtgcccatatttatatgctatggggcatgatagctgagtgaatccaataccaggtgattttgagattggtgtatagttggcaaccatagacaatatgtgtgcatatgggctcaatcctggtatttcaggttctcggatttcgggcaccagaccttagtatatttcacagcaaactgattggaatctaatggcaacagcgagaacaccattgaattttgatcctagcaagcagagcttttggcaatttctattgaccttctcggtggaggaattttagcgcacaaaact

SEQ ID NO: 37504 - DNA, 289 bp, Glycine max
  unsure (1)..(289): unsure at all n locations
  Clone ID: PAT_MRT3847_133868C.1
ccactcgtttctaaaaacaagtacttnagaactaaaaatgaggaaatggcttcctcaatcatctcctccccanctcttaccaccntcaaccttnccagttccttcataatttctccattcacctgcctcaaatccatggctgtcttttttactattaataccaacaattacattacctccatttctatcaacagttgaatagtacaattcatgcatttattgccaccaattttcaataacaaattcgagactcttttctacttgccagacctttattattcccaattgg

SEQ ID NO: 37505 - DNA, 146 bp, Glycine max
  Clone ID: PAT_MRT3847_133869C.1
acgcggacgcgtgggctggacgcgtgggcgtgacgctgtgggcggacgcgatgggcgcgacgtcgtgggcgggacgtcgtgggcaggacgctgtgggatgtggactctatggaatatgcatgggatgcggggcacttacatgagac

SEQ ID NO: 37506 - DNA, 464 bp, Glycine max
  Clone ID: PAT_MRT3847_13386C.1
gcccacgcgtcgaagaatggctcaagcaatggcatcaatggctggcttgcgtggttgctctaggctggttggaaggagccttaggtgagtggctccacacgcttgaatgtggggagtggagcagggggcctcagcacacgtgcagggtccagtttgtgccaacacaacaagtgagtggtgaggtcaaagcagccgttaggcagtgctttttcttgttactggtggcttggtcactttttcttttatgatttattctgtacgcatgtatattttacgatttttttatttatctataatttatttttttttatgtaatgattttttctacacatttatttttcttcatctatattttttttttaattatattttttttttgtatactttttttttactttattattttttgtctcacatcatttttttgtcgtatattttatattttttgacatgtttattttttt

SEQ ID NO: 37507 - DNA, 397 bp, Glycine max
  Clone ID: PAT_MRT3847_133870C.1
tttttcatttaacagtgatatatatttatttgttatggtttactactgaatattgatagctgatacaaaagtgtaaattaattaattgggtaaattaattgtttacggcatacaaacacaaataagaaatatttatttttggctgagtgcctcagttacttaattagcatcctgaattgggaccaatgacagtgagccaccgaatatctctgggacctgactttcgtccatctcttctagcagtgttgatttcaccttatttttttccacaaatactatcttcttcttggttttgttgtcaatgaatgggtaaataattttccacactttcataaaaatgtatggtgcattcacaataaacaactttcccaatctctcagggtagtaatcctgcaaa

SEQ ID NO: 37508 - DNA, 257 bp, Glycine max
  unsure (1)..(257): unsure at all n locations
  Clone ID: PAT_MRT3847_133871C.1
aaacccggccgagcncacgcgagcgggcgcgcgtccgctaaaccctatggcctactaagccaaagccaaaggcaacgcagcgangggcctccaagactatcctgccgccaaccaccacnacnccgaagccancgcccnggcacccaccaaccaaagccacaaagccaaccgatccgacgcatacacctccctcaaaaactacgcagatgcataagcagaagccaaaaagacagaagaactcaagcccgactggtcca

SEQ ID NO: 37509 - DNA, 613 bp, Glycine max
  unsure (1)..(613): unsure at all n locations
  Clone ID: PAT_MRT3847_133872C.1
gggtggttttttttttagagtaaggaataacaagatatcaaatcagaatgtttaaacaggcttggcaccatttcacttcccaaggaaagcttcattatatagcaaacatatgaacacacattgatttgatatcacaaacttcaggggcaggcttaagtgaaggtacaagggttaacattaacaagttcaagaggagcaatcaaacatgtgggggtgtgatttcctcggtaagctcggttgaagcattcagctttctgcctctttcacttctgctattatcagcaaatttcaagcttgcatgatgggagcctttctccttctcctttgagttccactcagccaagtagtaatcttcctctgtgacctttttagatgaaggaccagaaaacatgccaccccattggggaaagtagattaagcatattggcaggctgcatattatgatcatggctcccattagagtgattcctctttcttttgaaaacctggatcctttgaagaaaattagttgggtgacaactgctttcctctttcttttgaaaacttggattctttgaagaaaatctactgggctncaactgcacccacattgcctcctnctcctgtcattcca

SEQ ID NO: 37510 - DNA, 716 bp, Glycine max
  Clone ID: PAT_MRT3847_133873C.1
agaacttggaatgcaacattcttatatttcaaaaaaatttgttgaactaaaacaagtacaacagaaaagaaataaagagagaaacaagaagagctggatactatcgaagaatggtgaccctcatgaaagtatgaaacaatgaacttaatcctatctagaggttcacatgttttttttattaacatgactcactccctggcaatcatcaatctttatatgtaaaatgctatagtttattctgttttggtaaattgtgcagcttcaggaaaagagaaacccaaatttatgtcagctgaagtaaacgcttcaacattcctagcttacaacaatcgcagatgactaactcctgccttttgatctcatctaccggtaaatttctgatctacagctaacaaagggggcttcactcttcagaggcacgtatgcaaatcttctctagttgtatgggccaatctggtccaagaacttgtggatttaactccattgcaagacgaaaatctaaaacagatgcactggcagatcttgttgctgtctgcatacatcttccaggtagcaatacatttgaactggttaccaactgtctgttttgctgtcttagatgctcatttccaaatcttgatccagctaaatccataaaggactcaatcaacctcttcagatacgaatccagtgcattattcaatagatttaacaatccactgtttgcagttaaaccc

SEQ ID NO: 37511 - DNA, 368 bp, Glycine max
  Clone ID: PAT_MRT3847_133874C.1
gatcaacaaacagagatcgttttcattcagagggagcaggttacagggggtcggttcacgtttcatacaacccataatttgaggaattattatacattggctagccaagagttcccacttatgactaaacgcaatcctagacgctaactgatatacaaacatagctcagggattatcttccgacatagggtagaccgaaggtaacaaaaaatgataatggtcttattacgtttcaagggcaagaaagacatctaatatgtttactttatgatgctgacatcttgctcatcaatggatgacaaagcaaggctaaatggtgcctaccatactgaattactgaatccatgctatttatacaataacatgca

SEQ ID NO: 37512 - DNA, 407 bp, Glycine max
  Clone ID: PAT_MRT3847_133875C.1
gtttatttactcagtgggagaatttctgatgctctgaatttttttaatggtgtacggcgccagggtttggcaactaagaagttatatgttgccttgattactggtctctgcaagttcaataagatagacatttcacgtgagtactttttcagcatgttaagagttggattgaatccaagccttgaatgctatgagctacttgtgcaaaagctttgctcattgcaaaaatatagtgaagcaatacatatcattaatgtatctcagaaaatgggacgtccagtaagttcttttattggcaatgtacttctttatcattctttgatttcaccacaactctatgatacatgcaattatttaagaggtgcggaagagggggtattttctggtaattcaacactttgctggat

SEQ ID NO: 37513 - DNA, 231 bp, Glycine max
  Clone ID: PAT_MRT3847_133876C.1
ggccaattactgtggaggaactaagccaaccaccagaagggtacccttcatccaaagtagttcttactggccttgaagcagagtcattgatgtttatttcagtaccctttggtgaagacaacataacattctatgatcgcataactagtgccttgagagaaagtgatgctatagccattagaacaagtagggaaattgagggtaacttttgtgactacattgcatcacagt

SEQ ID NO: 37514 - DNA, 2248 bp, Glycine max
  Clone ID: PAT_MRT3847_133877C.1
gagagcgatgctaataatgtttggtatgtatgtatgtagtccggaggctggctaacaggtgagagtcagacacgcacacgcgtaggtttaatttcatctctcaaagaaatgaatccattgaatatttgtatccttgcttcgctttgcttgcatgcttccttccccattcaaatctctctcagttgtttgttatttaattgaatttaattttgtgatcggaatcggaatcggaatctgagtggatgtggattgggtggtgaaccggtgaaagatgcgacgacgggctgccgagtatcggcgcccggcacgacggaggttttcatattggatctggcttctccttgctttctcctccatcctcggattgctcctcttccttctgcagcacaatcaccaccaccaagatccgcttcatcatcctttgcccgagagaaatgcaagagttgaacattttgctaaggagggcttgaattttactgaagagattttaagtgtagcatcattttcgcggcagttagcggaacaaatgatcctggccaaggcttatgtggttattgccaaagaacacaacaatcttcaccttgcctggcagcttagctcaaagatcagaagttgccagcgtttgctttcgaaagctgccatgactggtgagcccatcacactggaggaagcagagccaattattaaaagcctttcttttctaatgtttaaggcacaagatatccattatgacattgcaaccacaatagtgacaatgaaatcacatattcaagctctcgaagagcgggccaatgcagcaatagttcaaagcactgtgtttgctcaaatagcagctgaagcagtacccaagagtcttcattgctttaatgtgaaacttatggctgattggctgaagatgccatccctgcaaaaacgagaacatgagagtagaatctccccccggctcacagataacaatctatatcatttctgcattttttcagataatgtactggctacatctgtagttattaactcaacagtcatgaatgctgaccatccaaaacagttagtctttcacattgttactgatggtatcaattatggagcaatgcaagcatggttcttcagtagtgactttaaaggggctaccttagaggtgcagaatattgaggaattttattggttgaatgaatcttattctccaattgtcaaacagctacacattccagaatcacgatccttttattttggaccttatcaaggtgcaaatgttgagccaaaattgcaaaaccccaagtttttgtctttactaaatcatcttcggttttacattcctgagatttatccactacttgagaaggttgttttcctagatgatgatgttgttgttcagaaggacctaaccccacttttctcactggatttgcatggaaatgtgaatggagctgttgaaacttgtctagaagcctttcataggtactacaagtatctcaacttctcaaattcaattataagctcaaagtttgatccgcaggcatgtgcttgggcatttggtatgaacatttttgacttggttgcatggaggaaagcaaatgtgactgcaaggtatcattattggcaggagcagaatgctgatgggacactctggaagctcggtacgcttccacctgctcttttaagtttttatggtttgacagaaccacttgacagaagatggcatgttttagggttgggttatgacctaaacattgacaaccgcctcattgaaagtgcagcagttattcattttaatgggaacatgaaaccatggctgaagttagctataggcaggtataagccattatggcacaagtacataaaccaaagtcaccctcatctacaagattgtgccgcaggttaaaatgcactgcttctcatttgcttatggattatgcaatctcagattattttgatcagtgattgcataggccattattgtagagtcagaagtagaaagttttgactttgctaggaattttgttttgttttcccttttaaattttatttttctatcagtgtcttgaaatagaaaatgattactttatacactaaagtttaaaatgcgttaggtaaagaggtgagagaattcatttttttggcttttggggctatcttttctcattctccaagttgtagatttattttttctttagtaattatttgtaataattataagctctttcaaatagtgatgtaattgaatggaaacattttttcccctaaaaaa

SEQ ID NO: 37515 - DNA, 440 bp, Glycine max
  unsure (1)..(440): unsure at all n locations
  Clone ID: PAT_MRT3847_133878C.1
cttgtcctccaactcaccaaccactgtctttcatgtagcgnatcctcaaaacccacactatacttacactatagcagggaacgaatcttagagtttgctgctccctactcactcttcaccccaccggcccccccccncacccaaagggggcngcccccccnctcccccccccggnngnnnttgggggcccccttttccccccggaactgtnccggnttttttnnttngggggggggggggggggccnccccccccggggggggggggcgcccccccccccccccccccccccccccgggccccccccccccccgggcgcccccggggggggggtttccccccccccccccccccttctttttttggggggggggaaagaacgggcccccggggggtgcaaaacaccggggggggggggggcttccccaccgggggggggg

SEQ ID NO: 37516 - DNA, 154 bp, Glycine max
  Clone ID: PAT_MRT3847_133879C.1
ccacgcgtccgatttttatgtatcaatgagagacatcctagaaatgcttattttgaaatcaaccgagttatcggttgattaaaaaataagcttttttaggatgtctttcattgatccaaaaaaatcgcccccgtggggcggccggtatattttt

SEQ ID NO: 37517 - DNA, 380 bp, Glycine max
  Clone ID: PAT_MRT3847_13387C.1
ggagtcaacttttcacttgtcttttttttttttttaagggaatggtcaagcggaaacaagattagacggcacccaactggtgtccaaagggggtttccccatcccgaaaaaacataaacttttttacctacatacacatttttccaaaaatgaatttcctgccacttttttaaaagggagaaatcacaacctttgacacctctacaggttttgcccccttacaaaataataccctcccctaccacccttttttttgaaaaaaaaaaaattttaaaaaaaaaacaacattcggaggcgcccgtttttttttttaaaaccccccccccccccccccttttgcgccccctgcccccaaatctcttttccaaagggaatttttt

SEQ ID NO: 37518 - DNA, 382 bp, Glycine max
  Clone ID: PAT_MRT3847_133880C.1
tccacgcgtccgggttgattatgccaatcgcttttttaattatttggttttcgattaactatttttcctcactttaattcactggacaatggatgtcaggacttagggcataatcgcaagttcacagtgcttgacgagtacaagtcaatgcatatgtaaaattatatgctggttcaatagcatgggaatgcattctccgcgtggtttaatttttgcattacttacagaaattgtgtgctgtgagtaatgtgcattgctttcgctgcattgatgaagatcgattctcgactggcgttgtacctcaagtttttctctagtatttactacaagaagtccttttaagaacatttcccattctagccatcataatgatttgtttccg

SEQ ID NO: 37519 - DNA, 166 bp, Glycine max
  Clone ID: PAT_MRT3847_133881C.1
cgcgaagagatcttgactgattcttaaaggtaggaacttgagacttgtttctctcagagatcgcttttcctaatgctgatttcgaggtcgcttctgacggaggtgctgttgtcactaggggcggcgcagccgtatttgctctgtgcattcccattatcatggggct

SEQ ID NO: 37520 - DNA, 135 bp, Glycine max
  Clone ID: PAT_MRT3847_133882C.1
cttctctaaaatcaactaatttttctgtttttattacaccaataccctatatacttgtgtaattatcacacaaggggaaaaatatctcttacatataacccctcacctcattacatatcttcctgaactacaaaa

SEQ ID NO: 37521 - DNA, 149 bp, Glycine max
  unsure (1)..(149): unsure at all n locations
  Clone ID: PAT_MRT3847_133883C.1
cntgagncaggntccgccccantnactngnacnttctgttgattggncagacaccnggncctgtattctttttggggatgctgctggtgctgtactagtacaggcctgcaacngtgaagaagntggtttntttggttttgatttncnta

SEQ ID NO: 37522 - DNA, 358 bp, Glycine max
  Clone ID: PAT_MRT3847_133884C.1
aaataaaaaaaaaaaaaaaaaaaaaaaaaaaagggaaaaaaaaaaaaaaaaaaaaaaaaaaaaaaaaaaaaaaaaaaataaaaaaaaaaaaaaaaaaaaaaaaaaaaaaaaaaaaaaacaaaaaaaaaaaaaaaaaaaaaaaatggggccgccccccccctttatcctcctttaccccggatatttattccgccccgttccctttgggctcccctcttttcctttttaggactcttatttacccttggggtttcacgggtcttacttttttcctggggaaaattttttcccctctaaatttcctcctaaaataataatccgcaaaaattaaaatgtaaaccctgggtgccccaattgg

SEQ ID NO: 37523 - DNA, 451 bp, Glycine max
  Clone ID: PAT_MRT3847_133885C.1
agcatgggaacattggaccgacatcattccgttagtcactgcgggcggcgcctttcttttctcaaccgctcccaccactatcaacagggtgacttggagattttacttctacgcgaccgctcagaatgagatgcagcgacgaatgaccgtggccaacaaccttcattactttaggcgcaagaagatcttcgacctagggcttgtaaagatcggcctcctccaccgcatgactggtaccatttgggatattgtgctgatgctgggtaagacgcgcagcgacaacgtaatttctatggacactgatcttctgcgcttggaaggcaccgagactagctactttacccaggccggtgcactcgagtgcattgtaaatcattgcaagatgaacatacatgctgggctactgatgaatggtgtggtaggcaatgactgtaatcctggataccgatgc

SEQ ID NO: 37524 - DNA, 380 bp, Glycine max
  Clone ID: PAT_MRT3847_133886C.1
cgcgtccgaatcaccagatatctataatactaactcattataataataagaaataagaagttgcagtggtaaatcatgattttttcaacttcatgacttcgtattttttttctggttatttctagttaaatctatttcactactgacatatgtaccaccagatatctgtagtataaactcattatttcacataaaaataagaatttgagtctgtgaagactgtgctttcaaacatcactgcactccagtgtaagcaacacatcgatgtgctgtctcaaaacaagatagaattagaacgaaaggaatgaacaaacggaataaaggaaataaagaaagaaaggacagaatataatgaagaatgaaagaataacgaaggaaaa

SEQ ID NO: 37525 - DNA, 431 bp, Glycine max
  Clone ID: PAT_MRT3847_133887C.1
ctactgtgagggctgctgcgcctgctggtgccgccgcggcgttactgccgggtcccaccccgccggcggggtttggatctttgcggggagggatacacaagccggtcaatgctatgcggccgatttaataaacaactctccttaaagcttcacttcacgtttgtgccgcctgacatgattgataacatgaggaggatgctttccacagcacatcttggagaggggtctattgacctgtagtgtatatcaaccatataagatgcattagatggggccgatttgttggatgatggaaaagactaccacactgattctgaaaccaccgcttgaagaaatgagcttctcaagatgaggccatgatctcattgttgtcgttatcgctggggggataggctgacaacactgctaattgtgggaggagcaaatagtgc

SEQ ID NO: 37526 - DNA, 310 bp, Glycine max
  Clone ID: PAT_MRT3847_133888C.1
aaggctgatgtaccatgtcatctcagctagtgctatatagtatgtgatgcatttatgggtttgacgtcaaacgtgtgttgccttgcttttcaatgctttgtaccgaatcatagtgtcatttatttgttcattacatttttattttagtatgtgtgatcttgttacctattacccgtttaattgttttagtttgcatgcaatgcaacaaggaatcagtttgcttgatgtgtttgtacatagttaatgctgaattgttgcttgtaaagtaaaattaggtacttatttgcacggggcatgtaaaaaaaaaaaa

SEQ ID NO: 37527 - DNA, 281 bp, Glycine max
  Clone ID: PAT_MRT3847_133889C.1
cacttccaagcctttccatttgcttcgctcgagttattattttgcacagagagagagagaaaggagacagatttgaattgagtggtattccaacgtcgaaagcagagaggagaaacactaaggtttctcctaaagtgctctatttttaattctctctctttctatatatctatgtgactccgcctacatcactcagaccggtggtcatgtccctcattttacaattcgggagctgcaaggttttggtcttgtgttaaaatgttgggagaacccacccttgg

SEQ ID NO: 37528 - DNA, 288 bp, Glycine max
  Clone ID: PAT_MRT3847_13388C.1
tcgtcccgcgcccgaacggctgcgagaagacgggggaaggtgttaccacatgcctgcgattcttccctttccctctctctctctctcactttctctacctgactatgaatttctggcgcattaaatcttctctgcagaaaaaaaagagcttccacaatggaaagcgctgcaattgctcgtaacgacagcggcgtaatacgcaatatcatttcctttggctcgttcttttcacccgctccaactccctatggaattgcaaagaagaagaccgtggacgagttcaagcca

SEQ ID NO: 37529 - DNA, 319 bp, Glycine max
  Clone ID: PAT_MRT3847_133890C.1
cttcaacctttcataacattactttatttaatcaaatgacacaaggagaaggaccaaacttttaggttccacaattctgcaaaatgtctacacatattatcatgcaagttcaaaaatacgtttggacactttacatcagatttgaccaaaaatctaattttcatccgttgcatgaatttttactttggtctcatatatgcagataaccatgaaagatgacagtttcgaaaagtgattaccaatggccgtattagtcgatccatctccagcatgatgtcctccaataaacaaccttccccttttcttttgtagggggaaa

SEQ ID NO: 37530 - DNA, 525 bp, Glycine max
  Clone ID: PAT_MRT3847_133891C.1
ttagtgacggatccaaaaatattatgttgtggggacaatacttatattataaattaattttttatattgaattccatattacaagaacaatttataattacacttgtgtattacattaagagggttttaaaagtttgtggggacaattgtccccattgtgtctcaagtggatttgtccctatggtggcggtgacgaaggtggtattagtggaggtgatggtggtgtcaacagtattggtggcaatgatgataatagtgccggtcatggggtggtggtggtagcaaatggttgcagtgtggtggtgacaatgacaatggtagtgatggtgacagtgttggcggtcgcagtggtggtggctacaaaaggtgtcattatcaaatgtgggaaatgtttatttttttatacaaaactctaaattcacaactttgttttgttttgaaaatgagtgtaaaaatgtttcgaaaatgatttaaaaaccatttcagctccatttttgtcaagcacgttttgttttgaaaattaca

SEQ ID NO: 37531 - DNA, 257 bp, Glycine max
  Clone ID: PAT_MRT3847_133892C.1
gcggttgcaggaaaagccgtttcacttatcttttcacacacagagatggcggattcggtgagactgcgcgtgatgtaccagtatcgtggcatagatatcatgtcaaagaagaagcaaggtctcaagcgttactggattatgctcaaacctcctaactgcattggtagaagggacaccataaagggttgctgcagcaacattcctgaatggtgctattctgaagggtttggccccttcaatcccaatcctaatggcag

SEQ ID NO: 37532 - DNA, 375 bp, Glycine max
  Clone ID: PAT_MRT3847_133893C.1
gctagatattcgcaggtcccaaatgcattttaatcctaatactgcacttgttgatcattcaataattctccttacgatgcaaatatgcgtaaaaactctgaccggcaagaccatcacccttgaggtggaatcctccgacaccatggacaacgtaaaagctaacattcaagacatggtagggatcccacctgaccagcacagacttatctttgcggatgaacaacttgaggatggtcgcacccttgccgattacatcatgcaaaaggaatcaaccctccatctcgtgcttagcatcaagggtggcatgcatatcttctgccagactttgaccgagaagaccatcacccttgaggtggaatcctcggacaccattgg

SEQ ID NO: 37533 - DNA, 1592 bp, Glycine max
  Clone ID: PAT_MRT3847_133894C.1
ctcgagccggctcgagacggctgcgagaagacgacagaaggggggtcgtgtgttgttgtatactataatagcagaatcgtgagtaacagcagagcagaacaccgataaatcgctatgactgctcagacccaagaggagcttcttgcggccgaccttgagcaacaaaagatccatgatgatgagcctgtagttgaggatgatgatgaggatgacgaagatgacgacgatgaggatgacgacaatgttgaaggtgatgcatctggtaggtccaagcagaccagaagcgaaaagaagagtcgcaaggcaatgctcaaacttggaatgaaacctgtcacaggtgtcagtcgtgtgactgttaagaagagcaaaaatatcctgtttgttatatcaaaaccagatgttttcaagagcccgacttctgacacatacattatattcggcgaagccaagattgaagacttgagctcacagctacaaactcaggcagcagagcaattcaaggctcctaatgtgagcaatgatggatcgaagcctgaaacctctgctgctgctgctcaagacgacgaggatgtcgacgagactggtgtagatcccaaggatatagagctggtgatgactcaagctggtgtgttgagatcaagagctgttaaggctctcaaagctgccaatggcgacattgttgctgccattatggagctaactaattgatgatggtcagatttgggataattttagaatttgcaatgtggagctatttttctgttagtcaaaatttttgctctcctttggtttgaaaagtggtttgctaattgtatctttgcttcattctattttctgtgtaattgtctgcatagaaagaaaagactgtagactcattctctacaattgtatgttcactgccaagaatgacaatcataattagtattcctattggttagtagagtttaagcttatggttcattgtatggcatataaacaagtgtgaggtgttccttctgcaccgtgagcacaatgaccaaagtcaccaaacacaatctagaatgagatatatgtacgattacatgtcctttatagcagtcttgaagtttctgttgatggcggaaggcggaagcagcacaagtgttgtcgtcggtgagggcatcgctgacccaagtctggacgtcgttcatgtgccagacgaattcctctccacgctgtcttgcaccgttctgtatgcctcttgctttcaacatcttcttcatgtggccctgcatgaggacttcacgaactctgctgggttagggttggagtgtgtggtgatggaagattttgggaaacggtggaccatgcagatgacaaggttcatgacaaccaggaaagcaagtttcatgagtgtagttgcaatgtctaattaacaaggatgcagcttttcgatagtggtgtataatgttatatggccaacttcatttctagctcccacatatagggggttggaagtccaaaatatatttttaatttggatctcactaactaactataaaggatgtgaaattaatcaaaataaaggggaagtaaaaagaaggaaggaattaatagaaataaaaggatgtgac

SEQ ID NO: 37534 - DNA, 325 bp, Glycine max
  Clone ID: PAT_MRT3847_133895C.1
taacagaagcactacccaggaagaagacacagaagaacgaacaaatcacgagggagatacaaaagcttatggatgccatgaccacaaagctagagataattacatacaaaagcgtagggggacaggcacgctcgctaaagctggggcacccgctgaccatacatataagagcgtatgtgcgtgcatgggagaaggtgagtgaataaatgacagaggaaacaaatggagagagagcgccgaaggaagagagatatcgatagctggagttgagtggctctacctagggaggggaggcaatagaggggaagaaggagctagaaatggg

SEQ ID NO: 37535 - DNA, 407 bp, Glycine max
  Clone ID: PAT_MRT3847_133896C.1
gcttagcacctgacgtaaatcggctttgccatcgtcatgggtgtcttttaaaaacagaaaatgcggcgcttgggcaacgataaagccaccattgaccgcgactatgcccgtgggaatattcaaaccatcggcgaataccgaacagcgattagcgcgaccatcaccatccgtgtcttcacacatactgatgcgatcagagcccttgccatcggcacgtaattcattggggtaatccagtgattccaccacaaacaggcggccacgctcataccacgcaaaggccacagggttggcgatatctggctcagccacaaacagatgcagctcaaaatccttttcaaccatgctcaaggccatggtttcctgcggtttgagaggatgatgatattgtggcggcggagccactt

SEQ ID NO: 37536 - DNA, 284 bp, Glycine max
  unsure (1)..(284): unsure at all n locations
  Clone ID: PAT_MRT3847_133897C.1
gcagagagaagcagactccttagtttcaggggacctagtgctaaagcctacagccatgacctggnacctaaaggtgaagatgctggggggcaaggagttcctggtgtccatgacaaactccatgatgctgtcagaactgaagaagcaggttgctcagaagagtggtgtgccagctttccagcagcgcctggcccaccaaagcggtgaaatgctacaggatggtgttgcccttatcaggcagggccttagttctggcagcacagtcatgctgatggtagagaact

SEQ ID NO: 37537 - DNA, 314 bp, Glycine max
  Clone ID: PAT_MRT3847_133898C.1
aaaaattgatatgcttgaccaatgtaaatgattggcaagaaaataaagttttgctgagtacctaaaagggattttctgattctggggactactcatttaatctttacactcggaagggctctgttcaaacaatgaaaatgttcctaaccttgtttaggtgcctacgtaaaaaacgggcagaaccagctgcctagggttttctagttccacgagcaaagcaggcctgcacattgtttacatggaaggaagaaacagaccctggtagcctccaagctcatatgccaaaaatgccgcggggtataactggtttcacc

SEQ ID NO: 37538 - DNA, 368 bp, Glycine max
  Clone ID: PAT_MRT3847_133899C.1
caagaatgcgcgaatatgcttagcttgcgatatggatgctacgttctctgctgtgttttctggtgatcgtgctccttataggcccgctaagtttttatacagttggtggcagcacgcagcaaaccttgccacttatgaacaacaggatgcgcatgagtttttcatttccatgcttgatggaatccatgagaaggtggagaagggtaggcgtaagccacatactgaaggcaatggtgactgttgtattgctcataaagtattctctggtattttgcgatcagatgttacatgtatggcctgtggtttcacatcaactacttatgacccatgcatagacatctcactggacttagaaccaaatcaatggg

SEQ ID NO: 37539 - DNA, 622 bp, Glycine max
  unsure (1)..(622): unsure at all n locations
  Clone ID: PAT_MRT3847_13389C.1
aaacaaaannaacacgaattggaaatgcagtgagaagcggatttgcagagtgaactgggcactgagcgcactcctggtttagggaatagatctactgcatgaaaggggtttagggtacagatctggcatcatttcagtggcggcgcccagttgtgatagtgtttgggtggttgtggtgtcgacggtggcaacatgcagaagcgatggtgtttggatggtggtggtagtgagaatttggtggtgattcgaaggtaggaaggtcgaaaaagaatggaggcgccgactatggattatggccggatgcgttcaacgataaagaagatgaatacaatcatgaagacaaatccttattcaacgctgtgatttgcgaattatgaacatttatgttgaggggactccttcgacagggtttttacctaaaagagtttgggacttttggaaagaattnnnnnnnnnnnnnnnnnnnnnnnnnnnnnnnnnnnnnnnnnnnnnnnnnnnnnnnnnnnnnnnnnnnnnnnnnnnnnnnnnnnnnnnnnnnnnnnnnnnnnnnnnnnnnnnnnnnnnnnnnnnnnnnnnnnnnnnnnnnnnnnnnnnnnnnnnnnnnnnnnnnnnnnnnnnnnnn

SEQ ID NO: 37540 - DNA, 352 bp, Glycine max
  Clone ID: PAT_MRT3847_1338C.1
ccgacgcgtgcggacggctgaaaggggcctcacgacggaaactgctttaatgcataattgcagataagaacagaccttcttcctttagatacgcggaacgacggagtgatttcatgctagtgggacataagctgtttacaacagaggccaccgagattgtcaatctgaatttgcatgctattgcttctagtctggattcgatgctggaggtcgtgcattaagtgctaggaggatggaacttgccgcatgtgccactaccttgatgcctagagccgcgataacattgtatccctcaactgccaattcatacctaaccgagcatggaggagcacactcttgatactgctcatgc

SEQ ID NO: 37541 - DNA, 1847 bp, Glycine max
  Clone ID: PAT_MRT3847_133900C.1
ccccggcgccacgccccgagcggctccgcacgaagcgccgcgtagattaccggccttgggcgccggatctgcgcgagcgcgctctgatcggaagctgctccgtcccggcccccggcgccggcgccggcgccgtgcttgcgccggtctctgctgtgttttctggtgatcgtgctccttatagccccgctaagttcttgtactcggggtggcagcccccgcctcacccgcccccgttgcggcatcacgtcgcgcgcgagtggctcattcccttgctcggccggatccatgacaacggggaggtagcgcggcctcagccgactactggcggcaacgatggcccgggtcgtgcgcggacatccttgccttgcgatatggatgctatgttctcttctgtgttttctggagatcgtgcaccttatagccccgctaagtttttatacagttggtggcagcacgcagcaaaccttgccacttatgaacaacaggatgcacatgagtttttcatttccatgcttgatggaatccatgagaaggtggagaaggttaggcgtaagccacatagtgaagggtgagggtttaggtctcttgcttgttgccctaggagttgacaattgctcaagcaattagggctaattttcaaccacaacctgctgtcgtgatggtgttagctgctacattcctgtgagtccctgcaatggtgactgttgtattgctcataaagtattctctggtatcttgcgatcagatgttacatgtatggcctgtggtttcacatcaactacttatgacccatgcatagacacctcactggacttggaaccgaatcaagggggttctaccaaaattactactgcatcatccaatcattcttgcaatggtgagccagattgcatgaattcaagccaaaactgtggaacatctaccctgatgggatgcttgaagagatttacaagagcagaaagattggggtcagaccaaaaatttttctgtcggcagtgtcaggtgaggcaagaaactctcaaacagatgtccattaggaagcttccccttgtttcttgcttccatataaaaagatttgagcactcttcaacaagaaagatgtcaaggaaagtggatcgctacctgcagttcccattttcactggacatgtctccttatctatcatcaacaattttaaggaatcgatttgggaataggatctttccttttgatggggatgagccggatgcttcagatgagttgtgttcagagtttgagttgtttgccgttgtcacgcacagtggtaagctagacgctggccattatgtcacttatctgcgattaagtaatcagtggtacaagtgtgatgatgcctgggttactcaagtagatgagaatattgtgagggctgcacagtgttacatgatgttctatgtacagaagatgctttactataaagcaactgataaacaggttgcctcatgattgggataagagatggtccaaatcattgatatgccatggtcaatatcgattttcattccaaaaatatgccatggcttttacattcatacatgaggaaacaaaagcaaaggaaaatataatgtattcgcatcccaactagcaaatctatcattttcagagatgaatttatactttaaagttggagctagaaaccagccagaatttttgaggccctccaactttttggaaactcaagggcatggattttttataaagttgtttatgctccccccctccccttcctttttttttccccgtgctttgaaaatcagtgccttgagggcttcccagatgttgcttcatataaggagaaattagatacaaaaaaaattgcaactgggctc

SEQ ID NO: 37542 - DNA, 2250 bp, Glycine max
  Clone ID: PAT_MRT3847_133901C.1
cacgcgtccggagaatgatgacagcatgcaaatgcatcatcaaacaactaataaattgatgaagccttaggtcacattttactttctcagttctcattattttcagttacactctctcttctcttccatggaatcgtaagatttgaggacaagagcttccacgtttatcaggttgtgatctcaaaatggggaaatcaccaggaaaatggatcaagaccgtactatttgggaaaaagtcatccaaatcaaatatttcaaaaggaagagagaagtttgttaataaaaaagaagcagtggtttcttccaacgagttggaaaatggtttgtctttagatccaacccccgatgagattgctacaaatgaggaggaccatgaactggagaatgaagaatcagaaaatattttacctgacaatcaagaaagagacattattggatctgttgacccggatgcaccacctgatccagagaaaatcaggctggagcaagcagcatcaaaggcacaagctgctttcaggggttacttggcacgaagggcatttagggccctgaaaggcataataaggttgcaagcacttattcgtgggcacttggttaggaaacaagccgttgttacattatgctgcatgtatggaattgtaaagttacaagcacttgtccgtggaggaaggattagacagtctaatgaaatccatgagaagtgcaatctatttaagcctctggatgcaaaacttggtgagccagttggtatctccacaaaaatttcaaagctgactgcaaatactttcatccataagcttcttgcttcatcaattacaataatggcactgcacctgcaatatgttaatggagatccaaattcagtcttaagttggttggagcgctggtcagcatcttacttttggaaaccagttccccaacccaagaaaattcgagactctaaatctcagagaaagcagggtaatgtttcaaatggggaagctcaaattaccaagtcaaaacgcactaccaggaagcttcctattgcaaattttgaaacagccctggagcaaacaaatcctgaattcgagaaaccaaaacgtaatttcaggaaaacaccataccaagtgtcagatccagagcaagaaaatccacaaagtgagcttgaaaaggttaaacgtagcttgagaaagattcataaccctgttgttgagaatgctggtcagccagaagttgaaagtgagacccccaagcagcatttggaaatgacgaaagttattccgggtcacgctgttttagaacaagcgaccattacttctgatgataagatcaagatggaagaaacttcaaccatctcgaatgtgcctgatgtcgaaatcactccaataccatcagtcaacaaggaagtgtctgagattctaaacaattatcaagtgtctgtagaatcaaagcccttgtcagagactccaactaaagataggaacacttctcatgacgaagttaaaaacaagctaggcaacctaccagagactattttcaaagatgaaaactccctattaacaaatggagatttgagtcatagtgatctgacaggtaatgaaaaccagaaacctacccgtaaaatctcaaatttgacaaagcaggagaatggagaagacggcataaagaacagtccaaaattaccaagttatatggcagcaactgaatctgccaaggcaaagttgagggcacaagggtccccaaggtttggacaagatgggactgagaaaaacaacactgctggtggttctgggaggcattctctgccatcttcaactaacaaccagattagttcgcattcacctaagccacagagatcagttccggcaggtggcaaagggggaaacaaaagtgacagaacagtaccatcttctaaagcagggaatgggaaggtaactcaagctgagtggaggaggtaagtgagggaaacctggttttcaggtattgaacacgaggaggttgaaaattgtgtggggtcgtctttgattaaagttgctgaaatcataggaccattgtatgagctggtttgatcagcttattttccctgaattctgggttgtgagttgtacaatataggttttaagttttgcatgctgcaacttttaatgtcttatgttctgtttgtctctggcatgattccttgtctgtccatattgaaccttatctgtgttccccaaacttccgtgtttggacaagtatgatctggtaacacgaatactttcaaacaaaaaa

SEQ ID NO: 37543 - DNA, 214 bp, Glycine max
  Clone ID: PAT_MRT3847_133902C.1
ccggaattcccgggtcgacccacgcgtccgcggacgcgtgggcatacatatctaaattaatttttcagcttcaacattgctttattgcgatgcttgtaaattgctgagttataatttcataagttagtatcgcttaggtttttcattgaatgacttccataacttgtaatgtaatttaacatacattattattcagggatttttccatgtttcc

SEQ ID NO: 37544 - DNA, 2450 bp, Glycine max
  Clone ID: PAT_MRT3847_133903C.1
gacattacttgtttttatttttcaacattttaactttcactctcttcagagacatgatgacagcatgcaaatgcatcaaacaactaataaattgatgaagctttaggtcacattttcagtttcactctctcttcttccatggaattgtaagattttaggacaagagcttccacgtttatcagattgtgatctcaaaatggggaaatcaccaggaaaatggatcaaaaccgtactatttgggaaaaagtcatccaaatcaaatatttcaaaaggaagagagaagattgtcaataaaaaagcagttgttgcttccaacgagttggaaaatggtttgtccttagatccaacccccaatgagattgctacaaaggaggaggaccttgaactggagaatgaagaatcagaaaatattttacctgagaatcaagaaagagacattaatggatctgttgatccggatgcaccacctgatccagagaaaatcaggcaggaggaagcagcaacaaaggcacaagctgctttcaggggttacttggcacgcagggcatttagggccctaaaaggcatcataaggttgcaagcacttattcgtgggcacttggttaggagacaagctgttgttacattatgctgcatgtatggaattgtaaagttacaagcacttgttcgtggaggaaggattagacagtctaatgttggatttgaaatccatgagaagtgcaatctatttaagcctctggatggaaaacttggtgagccagttggtatctccacaaaaatttcaaagctgtctgcaaatactttcatccgtaagcttgttgcttcatcaattacaataatggccctgcgcctgcaatatgttagtggagatccaaattcagtcttaagctggttggaacgctggtccgcatcttacttctggaaaccagttccccaacccaagaaaattcgagactctaaatctcatagaaagcatggtaatatttcaaatggagaagctcaaattaccaagtcaaaacgcactaccaggaagcttcctattgcaaattttgaaccagccctggtgcaaacaaatcctgaattcgagaaaccaaaacgtaatttcagaaaaataccacaccaagtgttggatccagagctagaaaatcctcaaagtgagcttgaaaaggttaaacgtagcttgagaaagattcataaccctgttgttgagaatgctgttcagccagaagttgaaattgagaccccaaaggagcatttggaaatagcaacagttattccaagtcacgctgtttcagaacaagcaatcattactcccgatgacaagatcgagcaagaagaaactttaaccatcttcaatgtgccagatgtcgaaatttctccaagaccatcagttaacatggaagtgtatgacattcctagcaattatcaagtgtctgtagaatcaaagcccttgtcagagactccaattaaagatagaaacacatctcacggaaaagttaaaaatgagctaggcaatctaccagagactattttcaaagatgaaaactccctattaacaaatggagatttgagctataatgatctgacaggtaatgaaaaccagaaacctacacgtaaagcctcaaatttgacgaagcaggagaatggagatgatggcttaaagaatagtccaaaattaccaagttatatggcagcaactgaatctgccaaggcaaagttgagggcacaagggtccccaaggtttggacaagatgaaactgagaaaaacaacactgctggttctgggagacattctctgccctcttcaactaacaagaagattagttcatattcacctaagacacagagatcagttccagcaggtggcaaggggggaaacaaaagtgacagaacagtaccatcttctaaggcagggaatgggaaggtaattcaagcagagtggaggaggtgagtgagggaaacgctggttttcaggtattgaacacgaggaggctgaaaatcgtgtggggtcatctgtgatggaagttgttgaaatgataggaccattgtatgagctggtttgatccgcttattttccctgcatcctgggttgtgagtttacaatataggttttaagctttgcatgctgcaacttttcatgtcttatgttctgtttgtctctggcatgattccttggctgtccatattgtatttttttctcccttcagtgtgtgtgatcattaacatgtaccttatttgtgtaccccaaacttctgtgtttggacaagtatgatctggtaacacgaatactctcataggagatttcttcggccttcagaaaacttcttttggcatttcaaactcttcagatagtagaggatagatcatattgtagtgtctagctagtgtttggactaaaaatttctctaaacacagtggcttgctgaattatacctatctgtctttacttt

SEQ ID NO: 37545 - DNA, 233 bp, Glycine max
  Clone ID: PAT_MRT3847_133904C.1
cggggaccgacccacgcatccgtccacactccctcttcatcaatcatcattatctactttttcaacacacattaaaatgagggagggcgctttactttcagggagccctaattccttaaccaaatctattaaaaatatttttaaatgtttttctactagcactgcattaatccaaaattaaagtacttcttaaactaatatttacaactcgtacacataaacttttactacaa

SEQ ID NO: 37546 - DNA, 213 bp, Glycine max
  Clone ID: PAT_MRT3847_133905C.1
ggaaggcatggatgtttgtgttaaaattataagaaacaacaaggactgttttgaccatcgtcttgacgatatcaaagcatctcaagtatgtccataagcgtgatcgtgcagaccagtgtcacagtctacgattatgtagttataactattatcgtgaatactaggtaatagtatgtggcataccaaaagcaagcttgtatgatgatcatgcat

SEQ ID NO: 37547 - DNA, 245 bp, Glycine max
  unsure (1)..(245): unsure at all n locations
  Clone ID: PAT_MRT3847_133906C.1
accgggncggaanacgcggttcgacgagggtgtccaagcaagggcttaccttgcagcatccactgctgatgcttcccttggaatgtgggaaatgctgggaaaccccatcaacttcaggggagccacaaggccaactacatctgcttctaatcctgcctacttcaagactgtggctcttttctccaaaaagaacgctacaccaacacctgcaaaaaaagctgctgctgctgctcctgccaatgatg

SEQ ID NO: 37548 - DNA, 362 bp, Glycine max
  Clone ID: PAT_MRT3847_133907C.1
atgagcgagatagaggaagtgcatgaacgaatgaaggctgacatggaggccatgaaggaccaaatgacctccatgatgggggccatgttaaatatgagacagatgatggaggacaacacgaccggaggagaagtgttgggaagtatgggcggcccccgtatggtgcaaagcaagaattctttcccgccatacagcttgccacctaactatacaccacccaatgcggtgcatgtgcctagcgagaacgccaatcactatgttctcattctccttgaaggccagcaaccccagttaaggcatgcaccctttgctcaacctgtgggagaggcctacgaagagccctgggatcacgctttgggcca

SEQ ID NO: 37549 - DNA, 2458 bp, Glycine max
  Clone ID: PAT_MRT3847_133908C.1
ggctcgaggggaagctctgcaagtccacgggcaagtagtgaaattagggatggggcacaaggatgcgtcgcgtaagttgtctaaggtcttcaccttcgccgctctctccccctttggcgacctcaactacgctcgtcttcttctctccaccaatcccactctcaactcttactactacaacaccctccttcgcgccttctcccaaacccccctccccacccctcccttccacgccctctcccttttcctctccatgccctccccacccgataacttcactttccctttcctcctcaaatgctgctctcgttccaaactccctcctcttggtaaacagctccacgctctcctcaccaaactcggcttcgccccggatctttatatccagaacgtcctccttcatatgtactccgagttcggcgacttggtcctcgctcgctccctgtttgatagaatgcctcacagagacgttgtttcctggacctccatgattggcggccttgttaatcatgatttgcccgttgaggccatcagtttgtttgagagaatgttgcaatgtggagtagaggtgaatgaggccacggttatttctgttttaagagcccgtgctgattctggagccttgagtatggggaggaaggtgcatgcgaatttagaggaatggggaattgaaattcactctaagtccaacgtttccactgctcttgttgatatgtatgccaagagtgggtgcatagtgaggaaggtgtttgatgatgttgtcgacagagatgttttcgtttggactgcaatgatttctggcctcgccagccacgggctttgcaaggatgccattgacatgtttgtggacatggaaagttctggggtaaaacccgatgagaggacggtgaccacggttttaacggcgtgcaggaatgcaggcttgattcgtgaaggtttcatgttgttcagtgatgtgcaaaggcgttatgggatgaaaccttcaattcagcattttggctgtttagtggaccttcttgctagagcagggcgtttgaaggaagctgaagattttgttaatgcaatgcctattgaacctgatgcagtcctttggaggaccctcatatgggcctgtaaagttcatggcgatgctgacagggccgagcggttgatgaagcaccttgagatacaagacatgagggctgatgatagtggaagttacatacttgctagcaatgtttatgcatccacgggaaagtggtgtaacaaggcagaagtgagggagttgatgaataagaagggactagtgaagccgccaggaactagtaggattgagattgatggtggtgtgcatgagtttgtgatgggagattacaatcaccctgaggcggaggaaatatttgtcgaattggctgaggtgatggataagataagaaaagaagggtatgatcccagagtttcggaggtcttgcttgagatggatgatgaggaaaaggccgttcagttgcttcaccatagtgagaagctggctcttgcttatggtctaatcaggataggtcatgggtctacaatctggattgtgaaaaacctaaggtcttgcgaggactgtcacgagtttatgaaactaatctctaagatatgcaaaagagatatcgtagtaagagacagaatacgtttccatcattttaaaaatggagagtgctcttgtaaggattattggtagcttcagaattgtccttgtgaagaatgcccactgtactgtcacattgacaaatgcagatgccaaagaatgttccacagtagcatggcaaacaaaacatgcgaacaaaaaaaagttgtgaagaatgtcccgtgtacagtcacatgacctactagctttgatgcctaatacgggcattgatgaatgcaaatgccaaagctgagccgtgatcgcagattctgatcaaatgtcaataaacgggaaatgttgttatcaataaggttcgttatattggataatgagcattccagatcggatatacttcgatctataatccatgacaaacgtccacgttcagagtgtatattagtcatcataataatttttgggacaaattcattggtttctaatttctattcggttatgcctaataaaactaattcagaaagtatataaaagaggagcagctgcaatcattctttggaggttctttggtcagatactgtgagcaatttacagaactgcaggtatggggtaaggatgtgtttgtaacgctacgctgtgcttttgcataatgataattatgtaattatgtgtattgcattctttttttagttaaagatgttgacaataatattgagtgcatttagtaatcatgagggcttttgcataattatgtgtgttgcattctttttttagctaatttgtattattgagtttatactttgatctaatcgcatattgtcaaatcattaaaaggtttaacaattattggttatt

SEQ ID NO: 37550 - DNA, 566 bp, Glycine max
  unsure (1)..(566): unsure at all n locations
  Clone ID: PAT_MRT3847_133909C.1
ggatcattctatatttcatttactagtatatatgtagatgctgaagagttccctttcacatagagatataaacacgtcccttcacagttcacatacagatattaacacaagttatacttcattagtcagccaaactacaagtctttaaaacttgaccaaaaactgatcccaagacgttcccttccacttccaccacataagagaacctagattaactttcctggatccaatctccaactgcaattcacttatcctctggtggactattcgctctaataatgtacaccttgaatgcagtgtgcttaattaattgaaaaattacagcatctccgtcagctaggtcatgaccaaccgcaaaacctttccatccaccactaagtcctgtttttcgtgccaaatatattgttggatactcattcccatcctcatcaatcaaagtcatcacttcgtccccttttggaagattgctcttgcagaaatggactggaaggcccagccagaatcccccgctgatgtgggattgtagnnngannnnnnnnnnnnannncagnttctagnnncgacat

SEQ ID NO: 37551 - DNA, 399 bp, Glycine max
  Clone ID: PAT_MRT3847_13390C.1
gcatacgttgcgtacaatgaaagctactctgtggggaatgtactatgtttacaaaaacggtgctgactttgacaacatcgtcggcctgaaacccggttccttcatcgaagactacaacgttcacaaaaaggactttcgggttcagcttatgaacacggatcgggttggggagaggcacctagatctgacctacacccacatcaagggcgacaactcgaccgtgttgcatggaacctttgggtatgattgtgcgaacaaagttgttgacaataacactctcgactgatggaactgcaaacttaagtacactctatgatcacaaggagctggccacgtttgagctcatctatgacgaggtcaagatcacacgggacttccacgtatcgcggaagatctacg

SEQ ID NO: 37552 - DNA, 283 bp, Glycine max
  Clone ID: PAT_MRT3847_133910C.1
ttggggaactaaaaaacactatcgcagcgagcctgactcttttgttgtcttctcttctctgtcttgagtcaccatgttgagggttatctcacctgaacgatgctctgaagagcatgtacatggctgagaaaaagcgcctgcgcctactcatgattatgccatccttcaaagtaattaccaaaactctttctgcaatgcaaaaacccccatccataccatagtcatagtattgtcaccaccacaggcttagttcaatagtgcgtgaaatggaactgcccactga

SEQ ID NO: 37553 - DNA, 646 bp, Glycine max
  Clone ID: PAT_MRT3847_133911C.1
gctgcactcgtccggaatcttgtatactgtacagccttcgtttttttttttttagatgtaaaatgggtaggtgattaatttgattgctgttgacactttaataagatataagcaagggctattagtttttagaattgtcttatagagacaatttcgttgagattaatattatagtgtccttatggaatcaactcaggcaatttttcagcatcatcttcttcaattattgaaccaatttctccaatgcccctgctacttcccacattcttccagctgcttccaaatgagatctcaccgtcataggttcctctggtgatgatcttgggattctcttcctgagtagttttgattatttctgaagtggagttacttgatatctcttgttcattggttggtgcaatgctcttttcctcctctccacttatcatgtgagaaggagggcttgtgagcactacattatctgaggtgtgcacaatatccactgatcctcttactgaattgtcacattctttggaatgcaaagtatctgagtgtttgcttgaagttgagttgtttttggacacagattgtttagctcttttgtgccaattttttaggtccctagaaaccctctcagtgaaaatttctctcctcatgctagaaccca

SEQ ID NO: 37554 - DNA, 1359 bp, Glycine max
  unsure (1)..(1359): unsure at all n locations
  Clone ID: PAT_MRT3847_133912C.1
gcatatatagaccaatacatagaagcaatggagaaggttaaactgaagcaagggttgaaaactgcaatgagcatatccagcgagggaaatgcatatctgcaggaagctgaattctggcgcctctacaaggcggccgcgtctcgccgcccgctgggcatgaaaactgcagctgggattgtatatcttcttgcttgtttgttagaaccttttatcccatctttcactcttgaagtatttaagcagctaaatttgcctgcggatacacatgtttcacttagtgatgataaaggagatgttgatagggtaaaaagaccctgggatatcataagtgctggtcataaaattggaacacccaagccattgttcagggaactgaaagatgaagaggtggagttctacaggaagaagttcgcaggaagtcaagctgataggattgtgcgtgcagaggccgaagctcagaatgttgctgagcaactgaagaaaacgaaagtttcagatggcaatggaaagaaaaaaccaggaaaatcatcaaatgaagccaaaaataaagctgctgctgaaccagatattaccatcacaaggcttgatatccgggttggcctcataataaaagctcaaaaacatcctgatgcagatgcactatatgttgaagagattgacgtcggtgaagaacagaccagaactgttgtcagtgggcttgtcaaatttataccactcgatgaaatgcagaaccgaaaggtctgtgttctttgcaacctaaagccagtaaccatgaggggcattaaatctcaagcaatggttcttgctgcttccgatggtgatcacaccaaggttgagttggttgagcctcccagttctgctcaaccaggagaaagaattacattccctgggtatgaaggtaatcctgatgaactcttaaacccaaagaagaaagtttgggaaacattgcaagtcgatttgcacacaaatgaggaactggtggcatgctacaaaaatgttccactcaccacatcagctggcgtttgcaaggtttcatccataagctgtggatccataaggtagacaacgagttcaaaaagagagaaaaaaaggaaattaaaaaagaaaagaatttgcttttttatctgttgccttttttttttttgccgtaaatgtagaatttgcttcgtgtaatttgacattttgacgtgctttcttcatcttcatttttactgcccatatgttgggtgagctgtagccaaattatttgcattgttttttattaaactttttaatttaatctacagacttcgtaagcatataaattggggtatctatctaatttttcctatttagggaccnnnnnnaanaaaaaaaaaa

SEQ ID NO: 37555 - DNA, 496 bp, Glycine max
  Clone ID: PAT_MRT3847_133913C.1
aacacaagttaccattggatgaaaatgtaagagtacatctgccctttggcatcataagaagctcatacaaaaacaaaaacagtttgattttccattaacacaaattcctgagcatgcgaacaaaaagtaactagtagctttctgacaaacatacacgaggttctatctaaaattctcaatggaaaaccaagcatatactaatgagttgatccttctcaagtctgtagtctttccactaatgattggatggaaaaaaaactcacaagtatggttggtgtgaggattgcaaactagtactagtacccatataacgaccatagttagaaggaggagcattagatgctgcagtgtatatagattgaccaggaacttgataatcatatgtgattgtgccatcatggggatacctatcaggatttgctgcatatggtgccctaacagggggaacctgcctacccaaaacaacagttgaagcaacgttaccaccagatgaatg

SEQ ID NO: 37556 - DNA, 415 bp, Glycine max
  Clone ID: PAT_MRT3847_133914C.1
aaaaaatattttccttgggaaaaaaaaaaaaaaaaaacggggggaaaaatgggtaaaaaaagggaaaatttaagccccctgcttaaaaagggggtgccccccccccaaaaaaggggaatgttaaccatggcaaaaaaggggggattgggggggagaaaaataatcccgggggatgtggggggggaaaaccccgaaaaattttcaaactgaaaacccgagaactgataagacccttaattcaggggggggggggccccctttcaggggcgggggaaagggaacaaaccctgggtaacccacgtgtaaaatcccaaagggtcccgggtaaaatttttaaaaaaacggcacaagggggggcaaaaaacaccaagggggggggggccaagctaaaccctggggtttgggttaacaaaaa

SEQ ID NO: 37557 - DNA, 244 bp, Glycine max
  Clone ID: PAT_MRT3847_133915C.1
cagctctagactggccagcactagaagacaggatcataccaactattagaccataaagggcaagagctttagcgaaaatgaggatgacaatcattcctacaaagacatgtggctgctgtgcattggctcatacacgagcatgagcgacaataccaatagacatgccagcagaaatgacgagcaagcacacagcaatacctgatgagagatgtgcataagcatgacagacgtgataatgattggt

SEQ ID NO: 37558 - DNA, 2011 bp, Glycine max
  Clone ID: PAT_MRT3847_133916C.1
cggaattcccgggtcgacagcgcgtccggtcgtctgggagagggggagatggaagacggggaagcacccggtcatcttcgctcttgcaaatgtggcgagagattgaagatgaacatgtggtgaatcaagttcaaggaagatctggtgaagtacctcttgaacaaaggagggatgggttggttgcggacctttcacgagaagatagactggatatccaagaaagagggcagcgacatgttatagaagataccgttttgggtgagaatgaatctgaaacatggtcacagtcgcaaagtcagaatgaatcccatgatggaaacgaggacttaaacaattccagctgtgagaactcttctgacttgggagaagttgaaagggaaagagtgaggcaaattttcagggaatggatgaatagtggtgctagggatcatgtatcaaacatttctgaaagaaataacggttcaaggggagaatggcttggggaaaccgagcaggaaagggtgagagttattagggagtgggtacaaatgagtagccagcagagaagtgtttcgtctggggaaaacagggaagaaccatctgctgaaattgatatgcaaattgaacgtgtgcgtgatggactcgttgttaaccagattgggggccaaactgagcatacacggaggggcatacgtaaattatgtggccgacaagctatgcttgatatgcttaagaaggctgagagagaaaggcaaagagaaattcaggagttgttgaaccatcaggccgtgtcacaattcccctatcgaaatcgcattcaggcattgcttagaggcagattcttgagaaatgatagacctgttgataataacaagcccctttctgttgcagaaagtgaattgggcttcttgaggcgaagacaaactgtatcaggtctaagggaaggatttttctgtagaaaggagaacagtggttgcagtcaagcaaccagcaatgcagatacctcatctaatgttgaaattgattttaatacaaatgaacaaatgggatcaagcagttcacatatagtcccaattgtacatcctgaacagtctgaccctaatcacagaggaagcaatagacttggggtatcaggcagccagaactgcgtacgaggtaccgcgtgtgagaatttacattggcaagaatctactgctcaagtagatgagttgcagcatttgccaattgaatcactagattgtcaatcgtcattaagtgctggtgttgaaagaggggacaaccctgagcaaaatcttgatgtgatgccaactgaagataatgctaatgaaattacccaacaaagcttgcgaattgaagattcagagcatagtaataatcaagaattcagtgaggtgcataatgagccgtctgagctgggtggtataaataatagtcaaaacaattcttcaaattacaacattcatatggaggataatgttgttgatgatgtaaattggaatgaatctggtgctctagaaggagaacagccagaagaagtttttgaaaatgaaggaagtgagtggtatcagaataataccgaatggagaaatagcactgaggaaaatgtcgatgataatcagctcagcaatacagcaaatgagtggcctgacaacagtttggcaaacgaggatggagaaaactctcgtctgcaagaatctcatgaagtgtggcaagaagatggtggcttccaagaggctgtggaaaattggttgggaggaccttctgatcatgaaagtgctccagttggtagaattcgtggattttattttcctgaagatgacaacgtgtacagtgttgaactcagggaacttcttaataggagaagtgtctctaacctccttcgcagcagttttcgtgagagtcttgatcagttgatacagtcatatgttgaaaggcaaggtcatgctaacattgactgggaatttcaagaaacaactccttcttctgcctcagtagagcaggaccttgagcagcatagtagggatcaaattgt

SEQ ID NO: 37559 - DNA, 271 bp, Glycine max
  Clone ID: PAT_MRT3847_133917C.1
gaatacggctcgaggtgagagggaagattaattagttgacttgactatgccaaagtgaacgaaaatcaatgaagaagaaaaagggttaaaaacttgtcgagaaagctaaaaggatcagttgaagcaatatattgaagaggtggtttcagcagttgttgagcttctacggtaagtggagtcgaccccgagaatggaatggcatggcatcatgacttggtccaaagtctaacaaatattaaacaatttgtgtcatggggcacttggattcaag

SEQ ID NO: 37560 - DNA, 741 bp, Glycine max
  Clone ID: PAT_MRT3847_133918C.1
ctcttcttcattttccaaaaacatattttgctagaattgaacatgaacaagatgactggtcttgctcttggtggagtggtggcggctattttaatggttctacagtacgcagaggcacagacaagttacgttgttggagatggcacgggttggagagttccacaagatgcttccacataccaaaattgggcttctgacaagaatttcacagttggagatactctatcattcattttccagacagggttgcataacgtaattgaagtgtcggaagagtcatacaattcgtgcagttcagcgaatcctataggtacaacctacaacacgggccctgccaacgttacactgaacagaggtggtgaacattactacatttgtagctttggtaatcactgcaacaatgggcagaggttagccatcactgtctctggctcttccaccgcctttccaccagccaccaccaccgttccgccaccactttcgttttccgcgccctcttctttccatactactgtccttcccttcctcttcctctccgcatttgtctttatagcgttttagatttatggaccttagattcaataccatttatccatgtccccttataataattacatactttaatttgtgattcatatatgtatctttcttttttaccttgatatgtttgtgtgcacgatcgagcatgtagtaatattcttcgggaccggttggttgatcaataaaaagattctgtttttt

SEQ ID NO: 37561 - DNA, 333 bp, Glycine max
  unsure (1)..(333): unsure at all n locations
  Clone ID: PAT_MRT3847_133919C.1
cgagaactagtctcantttttttcttttctctttgtcccaaaaaaaaaaaatctgcctccttttttttatcaaatctatctcttcttcaaaaataattgaaaatggggctgtctttcaccaaattgttcaacccactgtttgccaaaaaagaaatgcctatactgatggtgggtctccatgctgcaggtaaaaccaccattctgtacaaactcaaacttggaaagattgtcaccaccattcccaccattgggtttaatgtggaaactgttgaatataagaacatcaccttcactgtctgggatgttagaagtcaagacaaaatccctccttta

SEQ ID NO: 37562 - DNA, 310 bp, Glycine max
  unsure (1)..(310): unsure at all n locations
  Clone ID: PAT_MRT3847_13391C.1
aacttnagaagacgccttaatacggttattacaacacgacagaactaagggctacttggggccatttaccaattaataaacactttcttacatgcaacccactatataaccggtgttaacaacgaattccatacaaataatcacttggaaccatatctttgaatcgtacatacaagtatatcaacctattttttgctaaacgcaaccctcacactcagaggtattttattcatctgctataccacgagtcttaaattcttaacgcccaaacctatacattttagctaatccaacatcaatttgaactgaa

SEQ ID NO: 37563 - DNA, 2291 bp, Glycine max
  Clone ID: PAT_MRT3847_133920C.1
tacggctgcgagaagacaaacaaacaatgctctcttcttccattttccttctcaatccaccactctaaccctcgcacgcttcgttcaattacaaaaatggacagatcaactggccgtggtggtggtggaagtgtggacatgtttctccgaaattataagttgggaaaaacactcggcattgggtcctttggcaaggtgaaaattgctgagcatgtacggactggtcataaagttgctataaagatccttaaccgccacaagattaaaaacatggaaatggaagaaaaagttagaagagaaatcaaaattttaagattgtttatgcatcatcacattataagactatatgaggttgtagaaaccccaacagacatatatgttgttatggagtatgtgaaatctggagagctctttgattacatagtagagaagggtcggctgcaagaggatgaagcccgtcatttttttcagcagataatttctggtgtggagtactgtcacaggaatatggtggttcatagagacctgaagcctgagaatttactcttggactcaaaatttaacatcaagattgctgattttgggttgagcaacatcatgcgtgatggtcactttcttaaaacaagttgtggaagccctaattatgcggctccagaggttatctctggaaaattgtatgctggaccagaagtagatgtctggagctgtggtgtaattttatatgctcttctctgtggcactcttccttttgatgatgaaaacattcccaatctcttcaaaaaaataaagggtgggatatacactctgtctagtcatctatcacctgttgatatgcatttcatagcagcaatgcttgtggtggatctgaaaacattccaaatctcatcaagaaaataaagggcggtatttacactcttcccagtcatctatcacccagtgctagagatttgataccagggatgcttgtggttgaccctatgaggagaatgaccatacctgagatccgtcaacacccatggttccaagctcgacttccacgttatttagctgtgccaccaccagatacaatgcaacaggccaaaaagattgatgaggagatccttcaggaagtcgtgagattatgatggagcagatttcaataggcagaatcttctgggaacaggatacaacatgagggcgaagttgcttctccagttgttggacaccacagcacagggtatatggattatcaaggggtaggaatgcggcaacagttccctgttgagagaaaatgggcccttgggcttcagtctcgagcccaaccacgtgaaataatgactgaggtccttaaagctctacaagaattaaatgtttgttggaagaagattggacactataacatgaagtgcagatgggttgctggcactgctggtcatcatgaaggaatgattaacaattctctgcatagtaatcattactttggaaatgattccggcattattgaaaatgaagctgtttctaagtcaaatgtggtcaagtttgaagtgcagctttacaaaactcgtgaggagaaatatctgcttgatcttcaaagggtccagggcccacagtttcttttcttggatctgtgcgctgctttcctttcacagctacgtgttctctagtgaagctcacaagtcgcaaaggagaccttgaggtgtcttgtgtggcatgtgaataagcttacgttgtacatatcaatgccctttcagtatgggtatatctatctgtttgtactttttagcatacccccagtttttatgggttatcatgattggggaaacctaaatatggaatttgctttccttaatcatggtgtctgactaggtctgtctttttaaaagtgaattgaattttcttgatcccgtgaaatccctgaggattttatgaaagcattcgcctccaacagagacatccatttatggtattgaattttgtgttgtaattgactacttatgtctgtcacttggaagccgaggggttgtttgcctaggctgcatcgaacatgagcttgcagataagcattttctccccgcttccctacttaattactgcctcctcttatggatgcatgttatttgacagtcatggtttattatgtattttagaatccatgtaaactgagtgagtatatttttcgggcagtcataatgagttatgattgacgaagctgcttgatccatgtggtggcatgtattgctatgtgatgactgatgagtatattttccgggaagacttaatgagttatatgattcaccaagctgcttgatccc

SEQ ID NO: 37564 - DNA, 296 bp, Glycine max
  Clone ID: PAT_MRT3847_133921C.1
ttcatgcgtacgaagaggcctactagattgtaatagaagatgtatgctgaattgtttcatgtttccgctcagattgacacaaggtagtaagaattgcctcaataaggagtttaaagtaaagtaagatgcacctcgtaacacttatgccgcgactaccctatgtgaagaccccaactatgtcttgatgccctgggacgcctttttgcacgagactcgggtacttaactagaggggtcgttacgagctcatgctctttgagatggccttttttgttcgatagcctagtgcgaaatggc

SEQ ID NO: 37565 - DNA, 363 bp, Glycine max
  Clone ID: PAT_MRT3847_133922C.1
aattgaactagttggtatctcactacaccacaggacactgcactcttttcaaaaccctaaccatggcttcagctccatcatcgccagaaactcctcccaacacaaacttcactgccacctctactcctccactcaagatttctcccgcaactcttcccaatcccaataacaaacgcttgctgatcggattatctatagggtttgcccttttatcttttgttttgatccttgtgattgcctttctcgtctacttccttcatcgggtaaggaaaaataaacgacataagagcttcgggagaataccacttcaagatggattctacgacgttcttggtgaaggtggttttggccatgtctacaaag

SEQ ID NO: 37566 - DNA, 398 bp, Glycine max
  Clone ID: PAT_MRT3847_133923C.1
ttatggaatagtgctatttccattttcaacaataaaaaaaagtgatacaattcgatccacctcttcaccattctaaggtggtggtggtgtcaattctttgaagtgatcatctacattctacaaactctctatacacttgtgggagtcacagtactcggtcttttccactccaccagacgccgcaagaattgctcaacctctgatggatcttgcaaggtataggaagcatctgtttcttttgcaactctagaaacaagaatcccaattccttgacccctactgcgcaaaaccttaaaagcatcctcatcagttcgatcatcaccaatatatattggaaatacatcattcgaattctcgtatcctaatgattctaacaaaaattcaagagccttgccctt

SEQ ID NO: 37567 - DNA, 1152 bp, Glycine max
  Clone ID: PAT_MRT3847_133924C.1
gttgagagcaacgctaaagggcatagcaaggcattttcccacagcaatagtgaccggaaggtgcagagacaaggtatataactttgtaaaattggcagaactttactatgccggaagccatggcatggacatcaagggtccaacaaaaagccaaagtccaaagcaaggtaataataataaagcagtgctgttccaacccgcgagtcaattcctgccaatgatcgatgaggtgtacaagatcttgttagaaaaaacaaagactgtcccaggggctaatgttgagaacaataagttttgcttgtccgtgcactttcgttgtgttgacgaaaagagttgggcagcgttggcggagaaagttagattggtgctcattgattacccacaacttaggctaacccaagggagaaaagtgctagagatccgtccaaccatcaaatgggacaagggcaaggctcttgaatttttgttagaatcattagggtacgagaattcgaatgatgtatttccaatctatattggtgatgatcgaactgatgaggatgcttttagggtaacaaatgctgccacgcctagcttgctagttagttagttaaaagttttgcgcagtaggggtcaaggaattgggattcttgtttttagagttgcaaaagaaacagatgcttcctattccttgcaagatccatcagaggttgagcaattcttgcggcgtttggtggagtggaaaagatcgagtactgtgactcccgcaagtgtatagagtttgtaggatggatgtagatgatcagttcaaagaattgacaccccccccttagaatggtgaaggggtgatcgaattttatcacttttttttcttgttgataatggaaatagcattattccattattattattaaatttttaaggacaaagtccgaacaaatagattcctacacacgtttgcatgcgcatgcggatagtgaaaggcagatgttttatgccgcagttgcaaatggcccccgtcaactttgttgccatgaattgtacttatcgtacatgtggccaatatatatactgaaaaagattactacaattgatctccaacttcaaaagccgatttagacattcagaaatactagtaaattaaatgagttagtttagacattttaatgcggt

SEQ ID NO: 37568 - DNA, 337 bp, Glycine max
  Clone ID: PAT_MRT3847_133925C.1
ggcatctcacatcattggatacccccgtatgggtcccaagagagagctctaatcgcgctctcgagcatctctgggatggtcatcatcatcgcccgatgattttcatatggtgtcttgtgatctcagggcattcatgtatgaagctgattgctgatgctgggatctattacatccttatcaacactttctcttacttgatcccgttctattcgctcccagtcccctacgtgccggttcccctaggctcagttggaccggttgctatattgcgtttgatacgctacccttcatggctacaggtcatgccaatcttccagctatggctattatcatttgg

SEQ ID NO: 37569 - DNA, 501 bp, Glycine max
  Clone ID: PAT_MRT3847_133926C.1
tgtcctatgatgggtctgatcggtttattcttcgcattgccattctccgactgattctcttttgtatcaccgttttcgctgtacctcctgggctgtggctgtatcccaacctgtacgaagatgttggtttcctttgacagttccaagccattatgggggtggcaagaggtacgctatccatgttcctgatgcagaacaatcactgaccaaagatttatcagactggcaagaagaaaaagaagtctaagaaggctgcgagtagcgcagctcaaacgtcaaatcctcaggctacagagtctgcccctgcagcaaccgatgagaccgcacccgcagcaactacaactgcgacagaaagtgccgatgcagcgggtccagtcaagcgtgatctcgcgcctcgagctgaagaagatgaggagtgattttatagcttggcatatggcaacatttctcaggtgcctgtgatattgcattttctgcgatcaaaatttcatgagcttttca

SEQ ID NO: 37570 - DNA, 403 bp, Glycine max
  Clone ID: PAT_MRT3847_133927C.1
aatccaaaatctcttcaaacagcttagctttcaatttaagttccacaatatatagttaggtcttttctataggttatggacaacttcatatcaattgctttgacctcgataagtgcaatgtgtgccacatatatgacgaatattaaaacaatctgattctgcatttttacaaatgcataattattatacatgctagatgctatggcaaacttgaacctattaatatggttctatgattatataacttatctcgttcatactctcctccttcacctttctgcttatttccactcatatgttgtacaatcaaacctactacatatagcctcttgactcattttccttattccatgtttataccataaacttgcttatctcatctaaatataattcatcctattta

SEQ ID NO: 37571 - DNA, 1709 bp, Glycine max
  Clone ID: PAT_MRT3847_133928C.1
acatgtagaatagcaatacattctttacgcacaattgattgatttgattcctaaattcaaaattcagttgcaataaaaaaaattgttttaaataagttttacattttttttcaaacatattttaagttttttttgggtccatcgacgttacaatcctggttgcgacacacattcctcaaatgcagaagctacggtttttgccgtttgtataagaacaaaatctagcccatatatacacgctagaagtatagcagctacaagatattgttaatcatcagaagacaatttttgcttcttccatttgtaagcagcttccaagatcttgagattggttgtctggctttcctcggggaataaatagtcgatgaattcttcaattctagtagaaccatcttcagtggcaacatgccttctcttcttgagcttcttgggcagtttagactggactaagctaacatcacccaactctccagacgtagcctccatgttgagccatttctccaatagcattgccctttcttctttcaaatctggagctgatgatctgaagtagttaagagcttgctcaaacacccttctagcacactgaatgcattgcttcttttgttcttcttctggtaagtctaaactgtccatatccatagctgttgcctcaaattctgcataacttaaccataccttcaagtgctttgttcgatcaagaagcctttcataaagtgctcttgctctctcaaattcaccctcagcagtctcaaagttaatgtatgccttccacaacagctcaggcatgtccaaagctggttgagcgattgcaagctcaaaaattgctcgagctcgatcagtctcagataaagatctctccagttctgcatacttgctccaagcataacaattttcaggcgaccactccagatatttttcatacagctttctgcatcgatctatattaccaagctgcagttctatctctatatacttcttaaaaatcttatctttaggagcctttccaatggcatttcctaatatttgacgagcggccttgagattcagctgacgtatttcaaactgggctgctagaagccatatctttgcaaacgaaaacttttggtgaggtatctggttgagacactccttgtacacatcccttgttcgctccatgtctccagcatcaagctcttcatagagtgcataattaatccacaaatagatatagcgctgccaatagcgcttttcctcagccggaggaacattggctatagccctctcataaacctccctgattctctccttatcccccacactttcttccaaccttatgtaatcgaaccaggaatcataattcaacggattcttcttcacttcatcctcatactgaaaccttctcttcccaacaatagcatcctcaatcccttccctgtccccatactgcttctcaaatgccacaaacttacgatacaaatcctcgagccgtcccttgggaatatgatcaagagcaaacttatatatcgcccttgcacgctcagtctccttacacctttcctcaaactcggcaaaagcaacaaagaactgcacagcttcctcgtcatcggagaggctatccacggcactgccggccccgaacctggaccagcccgctccgccacagatcatctcaaacttggcatagcgaatccaagccccaaccctagggtggcactcgaccacccgcg

SEQ ID NO: 37572 - DNA, 364 bp, Glycine max
  Clone ID: PAT_MRT3847_133929C.1
aaaataaatgtcgtgtttgcccttggcacttgaaacaattaacttctgctccaagggacctgagctgatggcagaactaatgatactcataacttcgtattattttaggttttcttgttgaaattgtgcaaggctttacatgcagagcctcactttggcctggaattcctctttttctctttgcttacctttggacaagtccattttctttatccagagactgccatttatgttatttgaacataattaggagaaaatataactttttattgcacttgaaagctttataaaggtggttgtctgcttttttcattcctgggctatcattttttatttgggcatcgtgtccttaactagtggcttt

SEQ ID NO: 37573 - DNA, 558 bp, Glycine max
  Clone ID: PAT_MRT3847_13392C.1
gccttggtccaattctccacaaaattataccaaagcatccaaatgctcttacacccttatggataatatatcgtccatcatggaaccctgaatgcatgatttaacaacactatgctaatggcaatcttgtaacataaatacacatgaaacataggggcaaaacctgatccctgaggatttgaatccatgctaaaagcctagactatatccaacggaagggatttgccatgatgtgctaactaaagggccctcaactaactcatgagctatgagccaatacgcagaagcagataaatgatgcccacaccaagttatccgaagaccaacgatctgagcaaactattgcaccagcgactaccacataatatgggatgactgagatcagacagatcacgcttaccacaacatgctctgaaagtatagtcttaccaccaaaaaagccatatggatggggaacgttgaaatacacccatggaccctacatacacaatgagatatgctatcttagcctgtgcgacgtctattcgaaatgtctgtacaacccattcgacctgctca

SEQ ID NO: 37574 - DNA, 2736 bp, Glycine max
  unsure (1)..(2736): unsure at all n locations
  Clone ID: PAT_MRT3847_133930C.1
aattcggctcgaggtgaagaactccaagttcttggtgcctgcacaagaccttctcaacgagttttgtagccttgacgcaaagcaaagcgacttgggaaagccaacaaaatcgttgaataagaagcagtgggaagaggaaaataacggtatcggttcctcgaagaagcattctctgacctctctagagttcgtggagttgcagaagagaaagacaaagctgctttcgatgctggaagaggttgacagaaggtacaagcactaccgcaatcagatgaagagcgtggtgtcgtcgttcgaagcggtggcggggaatggtgctgccacggtgtactcagctttggcgttgaaagccatgtcgagacatttcaggtgtttgaaggatgggattatggcgcagattcaagcaacaagaaaagccatgggagagaaagacccagttgcaccaggcacaacaaggggcgaaacgccaaggctcaaagttattgaccaaacactgaggcaacaaagggcgtttcagcaaatgagcatgatggaaacccatccttggagacaccaacgtggccttcctgagcgagctgtggcagttcttcgggcttggctctttgagcatatccaacaatgttagcgaaccgatgccgaggctcatattttagcacgccaaaccggtctctcgagacgacaagtttcgtattggtttattaatgcaagggtgagactatggaagccaatggtggaggaaatgtacttggaggaagtgaaggaccctgaaaacaacatagcttcctcagaaggggctactgatcaagacaatgatataaacccaaataatgttgaataccctccacctccttcttcatcacgatcagaggatcagaagccatctctggttcgaattgactccgagtgtgcatcctccatcatcaacaaccacagtaccccagataacaaaaacgacccaaagggccacgaacagtgctttgggccagccctgcctgctttcgctcgcactctctccacccctcgcgtacagcctccttcgggagtttggttcggcgtgggcccgacatccggtctggggtgtccctgtcgctaggcttgcacaacagatgttgtcacaagatgggtatgtgagttctaattctaaagttgcaagtgtttatcaacaaggacatttcctggtgaagaactccaagttcttggttcctgcacaggaccttctcaacgagttttgtagcctttgtgcaaagcaaagcgacttgggaaagccaacaaaatcgttgaagaagcagtgggaagatcaggaaaataacggtgtcggttcttcgaagaagcattctctgacctctctagagttcgtggagttgcagaagagaaagacaaagctgctttcgatgctggaagaggttgacagaaggtacaagcactaccggaatcagatgaagagtgtggtgtcatcgtttgaagcggtggcggggaatggtgctgcgacagtgtactcagctttggcgttgaaggccatgtcgagacatttcaggtgtttgaaagatgggattttgtcgcagattcaggcaacaagaaaagccatgggagagaaagacccagttgcaccaggcacaacaaggggcgaaacgccaagacttaaagtcattgaccaaacactgagacaacaaagggcgtttcagcaaatgagcatgatggaaacacatccttggagaccccaacgtggccttccagagcgtgccgtttcagttcttcgggcttggctctttgaacattttctccatccgtacccaagcgatgttgataagcatattttagcacgccaaaccggtctctcgagaggccaggtttcgaattggtttattaatgcaagggtgagactatggaagccaatggtagaagaaatgtacttggaggaagtgaaggatcctgagaacaacatagcttcctcagaaggggctactgatcaagacaatgatataaacccaaataatgttcaataccctccacctcctttatcatcaagatcagaggatcagaagccatcactggttcgaattgactccgagtgtgcgtcctccatcatcaacaaccacagtaccccagataacaaaaacgatccaaagggccaagaacagtgctttgggtcagtggagcttgatttttcatcatacacacaccactcctcgggcatggtttcttacggaagtagtgatcagaatgggaacaacaaccagagtggggtgtctttgacgctagggttacagcaacatggggtgagtctagcgttcccgccagcaacacagagttcactgtactatccaagggaccaaattgaagattgtcaaccagttcatcagtactctcttttggacggtgaaggacaaaacctgccttacaggaatttgatgggagcacagcttctgcatgacttggcaggatagattatatatattaattcttgatttgaggaattgagattaaaatggtgagtataatcaacaacaaattaagattagtctctttttttttcacttttagctagctacgtacaaaattattatatagtacacaattaatgcttaattccatacataaagctatatatactcggttaatttgataaacgtacagtttaatttctacatgtgtatttatgttataatttggaatgcggacgcctaagtcaagagatccgggggcccggtttcgccggtnttnaaaaacatcatcgca

SEQ ID NO: 37575 - DNA, 388 bp, Glycine max
  Clone ID: PAT_MRT3847_133931C.1
gcggaacgggcaaataaacaataactttgccggaaacctgggttttcttcgggtcttttctcagggtctttccccattgggggttttactaatccccaacctcctttttaccaaaaaaaccttttttttttgcttcaatttattcaaacccatttgctagaaggggaaaaaaaataaaatcccgcccatttaagcccccttcgaattcactggtaaaaagggagggtaaatacctaaaagaaaacaacggaaagccaaagaccccaaaagttttagtagggttagcccttgacaaacattcccttttgggccccttcactctcacccccagcagagtatcttccaagtggggcccaggggttgggttttcccgcaccaaaagggactt

SEQ ID NO: 37576 - DNA, 242 bp, Glycine max
  Clone ID: PAT_MRT3847_133932C.1
ggcttgaacgtgtggctcttaacacacaccgaggagatccctttcgccatgaagcccttacaggaactttcagaatgagaagaaactcgaggacaacgacttcaccggcgccgttttcgaagggcagttgtaccgccccgatgaggctaagaaccttgaattcttggccacgcgcgctgagaattacgccactcttttgggggctttgaaggagcctcgttccggtcttgatggcgctcttc

SEQ ID NO: 37577 - DNA, 481 bp, Glycine max
  Clone ID: PAT_MRT3847_133933C.1
attcaactttttcctctcaccctaggttcctcttcaacctctccacactttttcagagacaaattccccttattttctcccataagaattaatcaaccccactttcacttaccccacgatccggctatctcaaatcaaccctctctcacagactaacaaacaaacaaaacaccgtttcattatgtacaacccgccaacaccatgtatttaaccattctccttaaccattcttgacaaaaacaacaactctccttttttttttttctccttctcctcttcttcactctcaaataccagatcctcccatttcaattatttccccccttcaaaattccaataccataatcccccatctctctccaaatcctacaattttcaaaatattcttattctctttctctattcccatcacaattcacacccaatccacactctcccctcacactcccctcactctcctcccccaaccaccaattttttc

SEQ ID NO: 37578 - DNA, 225 bp, Glycine max
  Clone ID: PAT_MRT3847_133934C.1
ttccaggaaggtttcccgttatcactgtatgacgtcctccttctttgggggggggggggggaatagggggtaagtgaattttggaaacggatgcaggtggggatatagtatttttttttaaaaaaaaaaccaaatcaatcataaaagcgaaaatgcgtgaggaacgtaaataggggtaccggcagtgaacgtaaatctcaggaggaaagcaggtataggcagacg

SEQ ID NO: 37579 - DNA, 761 bp, Glycine max
  Clone ID: PAT_MRT3847_133935C.1
ggcaattgttttaagttaacacggctgacccagatgtaaagcctaagtaccctgttcctgagcaggcccataagcccagaagcaaaagcttgacctaggttacacatcaataaattggattgcagagggacagagaaaccctaggcaggaagcagcggcaacagaggagagaagatgaagttcaatccacgagtgtcgagcagccgccgcaagagccgaaaggctcacttcacggcgccgtcgagcgtgcggagggtgctgatgagcgcccctctgtcggcggagctccggtcgaagtacaacgtgcggtcgatcccagtccgcaaggaggacgaggtgcaggtggtgcgcggaacatacaagggtcgcgaggggaaggtgacgcaggtgtaccgtcgcaagtgggtcatccacatcgagcgcataacccgcgagaaggtgaatggctccaccgtcaacgttgggattcacccctccaaggtggttgtcacaaagctcaaattggacaaggatcgcaaggccattctcgatcgcaaggccaagggtcgtgccgccgccgataaggagaagggtaccaagttcgctcccgaagacatcatgcaaaccgttgattagtctctttatcatacaaaccaattttatgtatgggttttggtagcctttttctatctctccattttgcaggattttgttttcttttcttatgttaatcaaactgttttatcccatgagcttatcattaactattttaattcgtttcc

SEQ ID NO: 37580 - DNA, 387 bp, Glycine max
  Clone ID: PAT_MRT3847_133936C.1
gtgtgtgtgtttttttaaaaaaaaaaatttttcactgatataggctaaaagccattaaacaagataaaagtcaagagcccgtccaaacagcataacaaaaaaaaattgggatttgaaaatttaaaacggaatcacatgagtttatcacactggataattgggcgcatcatgtgggcgtgtccatactaaactcaactaaagtggcctcaaggatatcctccactaaacatgactaaaaaaatctagggggacttggtttttttttccccttcctccagactctggatttccttttgatacttgcaaatgcggttgttgtaccagttaaaaaaacttgcttgtccacacaagtattacattcctttgagctttgaatatagaatttct

SEQ ID NO: 37581 - DNA, 552 bp, Glycine max
  Clone ID: PAT_MRT3847_133937C.1
ggctcgagtgttcttctgcttctgttttacaaggtgattggatcggatccctttctcttatttccatgttctgtgttaactataattcatgcctttgcctttgctagggtttctcgtcctgctttctaatttcatcttcaatcgcccgtgttgtttatatttatcactctcccatcaatttattccacgaaccaaacttcaatctcgaattttgaaatctgaatctgtgtaaggaccgatgtagtaggtagtggtcaatctcggtttagcgccctgcttgttcttgaaaccagaatttggggaccttaaaagtcatgcaacatttgaattccatagtttattcacttgaatcgtttaaattggaaatagtagttaatagacctgcattcttggtttgatgatttggcataggttcaaataattggaaatattagacactatgtttatgtatatgtatatgttgattattttcagttttataattgcttgctgtctattggcaagtcaatgttctagttctagcaagtgttgcaatggaagcaaagtcggata

SEQ ID NO: 37582 - DNA, 1042 bp, Glycine max
  Clone ID: PAT_MRT3847_133938C.1
cggaatcggctcgagcacgttcgctcctcgagatatcatgccaaccgttgattagtctcttttgcccccttctcccacgcgtccgcccaggcggcgcacgcgtccgcccacgagtcagtccctcggaagcagcagcggcggcaacagggagagaagatgaagttcaatccaggcggcaacagggagagaagatgaagttcaatccacgtgtgtcgagcagccgccgcaagagccgaaaggctcatttcacggcgccatcgagcgtgcggcgggtgcttatgagcgcccctctgtcggcggagctgcggtctaagtacaacgtgaggtcgatcccagtacggaaggaggacgaggtgcaggtgatgcgaggaacatacaagggtcgcgaggggaaggtgactcaggtctaccgtcgaaagtgggtgattcacattgagcgcataacccgcgagaaggtgaatggttccaccgtcaacgttgggattcacccctccaaggttgtgctgaccaagctcaaattggacaaggaccgtaaggccattctcgatcgcaaggccaagggtcgcgccgccgccgataaggagaagggtaccaagttcgctcccgaagatatcatgcaaaccgttgattagtctcttttgcccccttatcatacaaacaaattttctctatgggttttgctaccctttttctattgcaggattttgtttttcttgtgttagtcgaacttttttatccttttattttccatctgcttattattaactgccccccttttaatattttaattcgattgctgtggttgcattttcgtttccccatgagcttatcattaactattttaattcgttttcatgcgtgaggacagtgatgccagttatttcaagcgaatctctatctcgctcgcacctacggattgtcttgtatttttcgttaacgtctccgttatgtggctaatgctgaatattcttcatttgtatgtgaaaatttagtactagaatgaatgccctggtgatgtagcacactttttgtttctcaaaaa

SEQ ID NO: 37583 - DNA, 780 bp, Glycine max
  unsure (1)..(780): unsure at all n locations
  Clone ID: PAT_MRT3847_133939C.1
caaattttcagtttcttcctcgcttttctgcaaaatcatctaaatccgtgagtttcttctttctctttatccttttccaattacccgtaactgtccaatcgttcagtggaatatgttttctaccttcttgatctgcatatgaatttcttccttttttatttttgaagaaaaccattgatttttttcttcttcttaaatgtatgtaccaaaccaatatgttgtatttatgtgttacatttctgttgattcatagaccaaccaatgttgctttattatagtttataattcaatttaataatttcgagatgcttaggttagatgatatggtttctcctgaaatacatcacctatgtgttcgcaattgtttagtcaataatgaaaacaaaagttctgcttttgcatgcaagatcagctcggggattgtttaatatttatggcttggattggagaatgcccattatattgttatttgtaaagctatgcgtgattttttcctcgtggttgtgtaatcaatgtgttaattttttgaattagcaggtttctgatcctgaatcatcagtttttcccttgaaagatgggaggtggcaaggacaaacacaatgaagaagagaaaggagttttctcacatctggctcatggagtagctcaagctgctcatggttaccctccaggggcataccctccacctnctggggcataccctncttaccaagggtacccacctgctcatggctaccctncacaggtggctatcctncggctggttatccccctgctggc

SEQ ID NO: 37584 - DNA, 325 bp, Glycine max
  Clone ID: PAT_MRT3847_13393C.1
gccctatgtactggtgagaaggggtactgacagctgacaaagtcaacctaatctaagggtttctatatctaataaatggatcgacctgatacttcacgatatgacaccggaggtgcattaaacaccttgagacaaatctaaccctaactgtgtagataaacatctataacttacccctaggtcacgatggctgtgctgtgaaattcatagacaggactagatattctaccggcagaggctacatcactttcatggatgccaagaccaagagctttttaggaaaggctgctaagcatgcagcagacgcattcagaattgacggcag

SEQ ID NO: 37585 - DNA, 185 bp, Glycine max
  unsure (1)..(185): unsure at all n locations
  Clone ID: PAT_MRT3847_133940C.1
gagatgtcacgggaggatctancttatcactctctagaatgattataagcgacccccttcttgattctagatgccttaaacacataggattacaattttacaggtttaatagatatagagttgtagagtattagtcgttggtggaccattattggaatttttgttttttgtttcatattcccggg

SEQ ID NO: 37586 - DNA, 139 bp, Glycine max
  unsure (1)..(139): unsure at all n locations
  Clone ID: PAT_MRT3847_133941C.1
aacntatcgtagtaagtcgnaatgaagtcgaggtanaatctatgaggggtatgcactccnccangccatccnncgttngganctcgcaggttcgngatcttaantgatcanttgatgaagatccncactgatagatggn

SEQ ID NO: 37587 - DNA, 2338 bp, Glycine max
  Clone ID: PAT_MRT3847_133942C.1
gcttggaaatcgtgggcggacgcgtgggcggacgcgtggggccatataatttttttttatttgaaataatgtccgggatcatccacaagattgaggagaccctccatgtgggagggcacaagaaagaggagcacaaaggagaacaccatggtgagcacaaaggtgaacacaaaggagaacaacaccatggggagcacaaggagggacttgtggataagatcaaggacaagatccatggtgatggccatgacaagggtgagaaaaagaagaagaaggacaagaagaagaaggagcatggacatgaccatcatggtcatagcagcagcagtgacagtgattagatcttatatgttaagcaggtgtacggtacgatggtagtgaggagccagaatccctcttcctgctttatgatataatacaaataaaatagcgattccggaaatcatgtctgtagctgctctttttatttatgtgataaatgtaaaacgctttggtttggcttggccgttgtgcattaggttgaaaaaataaatgttataattactcagaatctaaaatctttctcaaaaaaaaaacctggccctatggattgatgcttcccaaattttcagtttcttcctcgcttttctgcaaaatcatctaaatccgtgagtttcttctttctctttatccttttccaattacccgtaactgtccaatcgttcagtggaatatgttttctaccttcttgatctgcatatgaatttcttccttttttatttttgaagaaaaccattgatttttttcttcttcttaaatgtatgtaccaaaccaatatgttgtatttatgtgttacatttctgttgattcatagaccaaccaatgttgctttattatagtttataattcaatttaataatttcgagatgcttaggttagatgatatgggttctcctgaaatacattacctcagtcggagtttagtaggcaattgttcattcaattataaattacatgcaaattttttttttatgtgaaataaatgtccgggctcttccaattctcaaattttcacgtttcttcctcgcttttctgcaaaatcatctaaatccgtttctgatcctgaatcatccagatttttcccttgaaagatgggagagtggcaaggacaaacacacatgaagaagagaaaggagttttctcacatcgtgggctcatgagtagtagctcaagcatgctcatggatttaccctccaggggacataccctccactctcctggggcataaccctccttaccaagggctacccacctgctcatggctacacgcaacaaggtggctatcctccggctggttatccccctactggctatcctcttggttctgatgtttaacccgccctgccggttacctgccacatggtgatgctggatcatcgtgctccacatggaatcacatgcacccgaacactaacggtatgggggtaattgccttcctggtgttgctgctgcggctgtagctgtgtatgagactcaccatgtttcccatggccaccatggatatggtgcatatggaggatatggacacatgccccatgggaaattcaaacatcatggcaagttcaagcatggaaagttcggcaagcatgggaaatttaagcatgggaagtttggcaagggtatgttcaagaagtggaagtgatgatattatattaattttctgtacatacaaaccgcgattctggatgctgctgcacattgcttttataataaactctactttgtttgatgtccatctatattttggtggaactctagtatttttttttatagtcaaagatgtatcatcccgttcatattctattattctagaaagtgcttattctagaaagtgaacgtcaaatagatgatgctctggatattatgtgcgagcttgcagttgctttagaaaagcattgacttgttcatgccttttctgtttttttgctttgtataccatttttagttttaacctttgttggctttcttagacagaacggagtcatcacattcattgtctttatagtctatacaagtctccaaatacacgtaatataatacacgtaatatgttttatagtcgttcatataaagactttacgtgtatttggagacttggatgtatagactatagtgttctggtgaaaatatttttttgttggagacagtacactattggttcatattcaacataaaaaaacttggatgttgggctaagtgacaagtcaaagccatgctttcctgttgtctatgtaaaatttttttctacccactgcttaacaaaatgctatttgaaatgggatacttcaaaagggtttgat

SEQ ID NO: 37588 - DNA, 1290 bp, Glycine max
  Clone ID: PAT_MRT3847_133943C.1
atcttctttggaaatgtgggttgaagaagcatcattcaccattagatgactaaagtttttttgtcccaggtcaagtatttgaccgaaaatatccagattgtgttagatgctgttcgaacctcatctgttgttgaagttcagggtgacaaaataaggagaagaaatgattggaggagatggatcatgcctggtggtcaggttcctaatgttagaggttctcaaaccgttggacagctggctgaacgagttcaaaacattactctggagagaactaacaataacgatgctggagtattagatgtttcacagaatagaccttttggggatttgaatagtcaatatctccattccactagcgagggtactgctcaagtcggtattcaagtttcagatcattctatttctgcaagaaattagagctgcagatgttctttaaaacatttttttgaagaatattcttcagagggaagcaagaagcaggagggatcatggtctcaatttttacatattgcacagtgggacatgatttctcgtgaggtatctaggaaaacatgattgagaaatgggaggaaaataccttttttataaaacagaaaaaaaaccaaatggtaaaaaatggcccgtaaaaggcgcattttatatattctgtgttttcggagctagtagcatgactcttgtgattacttgtttatatggggtgtaatgttcctattctggtgatgggatggtagcttgctttaatgtggggattctttttttttttattcccctgaattcccctaagctgctttttaaaatcttggggtcatattcccacctggattaggagcattatatgtgagatcaatgatcatgggtgttgaatgagtttgatagctactagttgatgactgtgagtgaaggggaaagatggctttctgctgatggagcttgtcccacaactgctttacagaatgattgtatgatgctatttccccccacatcatctttggaatgaccatacttggtttttgttgtcctcggttttactttatttaaactcttactaggcataaattgcccctgtggcctgtggggttattgaaaccaaaactattaatttgcagctgtatgtgatcgggatgtcttaattatttcatacccctacgttctaacatgtactgatgtaattcgtttaatttttttgttttatgctattcgtatgatcttttattagattattgtactagtctgcatgcaagtacgatgaacgggtatgctttcaaaaaaataaagaataaattgtcattt

SEQ ID NO: 37589 - DNA, 616 bp, Glycine max
  Clone ID: PAT_MRT3847_133944C.1
tacggctgcgaaaagacgacacaaggggatttgcccacgcgtccggcaaaaggccatataatttttttttatttgaaataatgtccgggatcatccacaagattgaggagaccctccatgtgggagggcacaagaaagaggagcacaaaggagaacaccatggtgagcacaaaggtgaacacaaaggagaacaccatggtgagcacaaaggtgaacacaaaggagaacaacaccatggggagcacaaggagggacttgtggataagatcaaggacaagatccatggtgatggccatgacaagggtgagaaaaagaagaagaaggacaagaagaagaaggagcatggacatgaccatcatggtcatagcagcagcagtgacagtgattagatcttatatgttaagcaggtgtacggtacgatggtagtgaggagccagaatccctcttcctgctttatgatataatacaaataaaatagcgattccggaaatcatgtctgtagctgctctttttatttatgtgataaatgtaaaacgctttggtttggcttggccgttgtgcattaggttgaaaaaataaatgttataattactcagaatctcagatctttctcata

SEQ ID NO: 37590 - DNA, 782 bp, Glycine max
  Clone ID: PAT_MRT3847_133945C.1
cttactctagccatattcttcgccacctttctttctccaccttccatctccattcccctcccctaacttcccttcttatcattacaccactctctctctctctttcatcgcttacctttttcgtatacataagcattccctctcgttaatttcattagcatatcacacaaatcccactcttactcctttgccacgtacgccaccgctgatcaattcaggcgatggcgccgcgtctctggtcctgcttccgcagcagcagtagcaagggcagcaccaccggcggcggtgtctccgacgcctccgcctcgcggcgcgtggtgactgcggacctgacatcggaggagcagaagcgcgggggcccggtggtggtggagatgttctcgtcgcaggggtgcgcgacttcgccggcggcggagctggtgctgtcgcggctggggagaggggatttcgagctggaggcgccggtggtggtgctggctttccacgttgactactgggactatatgggatggaaggatccgttcggggccagccagtggacggttcggcagaaggcctatgttgaggcccttgggcttgacaccattttcacgccacaggttgtggttcagggaaaggcccagtgtgttggaaatgacgagaacgcccttgtttctgccattactagtgctcctaggttccctgctccaaccttccaggcaactttcaccaggcctgcaccagattcattgcaagggtccctaacaggagcattgaggaccaaggtggacagcgatggcgcg

SEQ ID NO: 37591 - DNA, 1076 bp, Glycine max
  Clone ID: PAT_MRT3847_133946C.1
ttacggctgcgagaagacgacagaaggggaatgaaggaggtttcctttccatcagtttcagttccaccaaaattcaaaaatctctcggcatggggtgcgtgtcttcgaatttgctgaaccaagacgaagacttcagcacccaacttggctcctccgcactgggccaccacatcgtgtccctcacctccaccacctacggcctcctcaccctcgaccctccttccacgcctccttcccgctttaccctcggatctctcttcccctccgaaccagaggtcatcaactcatgggagctcatgtccggcctcgacaccgacagcttccgcttctctcctttacctttacccaaacccaaagaaaaccgcctcactcccccaaccggttccaaactcttattaaccccaactctggcggaccggttcgagaaaatatgcccccccaacggtgagaagcgcgtggtgatctatacgacgtcgttgcggggcgtgcggacgactttcgaggcctgcaacgcggttcgcgccgccttggagggattcggggtggtcgtccggcgagcgtgacgtgtccatgcacagcggcttcagagaggagctcaggactctattgaaggggaagcaggtgatggtgcctccgagagtgttcgtgaaggggctctacatcggtggcgccgatgaaatgcttaaggtcgccgaagagggtctccttggagacttgcttgatggcttgcctagaaagaaggttggggctgtttgtgtgggttgtggggacttgaggttcttgccttgcttcaactgcaatgggagctgtaagactcttgttaaggaacaggggaggacggttgtggttaagtgtacccattgtaacgaaaatggcttagtcttgtgcccgctttgtacttgattactttttcacaatcatgtcatcactctcttcactgttcatattaacctgtattcctcctctcttctcttggtgatcttgtatcccgattcaccattttcaaatcagccttcattgttacagagcctgcaattgcgcacattagtatttatcaatggattttcattagtatc

SEQ ID NO: 37592 - DNA, 640 bp, Glycine max
  Clone ID: PAT_MRT3847_133947C.1
ttcccgggtcgacccacgcgtccgatctaatccaaattagaattagatttccactatgcataaagaatccttacaagcaatcacaaccaatctatagtttccaccccggataaagagacttaagcacccaacactagggtcctttatgaataagagcctaagagaaccctactcttagcccaaactagaatcacctattctagcatgccctaagtgattcatgcacaaacaaaaagatgtgtaaaaccatacacgaaaaccaagagtaaagatagacacaacctgatcaatcctttccacaaaaccttgcttgactgaagaggcgttcttttgaactcaagaaagtgacacaactcacttatcacaaaatatattcataatcaaaaaatttaaaggtgagttacttcttctaagaaattttcttatcttctttctttaactaataacaacacatgatcttacctcattcagaggcttattgtgttattttctagattttgagagattgagatatgtttacaagagaacacaagttggttatttatagagaaaatggctataaccgcctgtaatcgattaaatctacaaggtaattgattaaattcaatgaaataatcaattagattatcttttttatcga

SEQ ID NO: 37593 - DNA, 1295 bp, Glycine max
  unsure (1)..(1295): unsure at all n locations
  Clone ID: PAT_MRT3847_133948C.1
ccaagaattcggcaccagcttagaaagtgggtgagattgaaaagaagaaatctggataacgcgattcaggaacaccttctaacttcgattcatcctatgacgatgaatcattgaaatttaacccaacaaaacaaacctcaaaccaaatccttaaactttgcaaaatataataatggctttgagaagttgctctgcccttttacgcagcagtttcttccaccaactccctcaatccacttatgcttcttccagaaccttggtctcaatcttgttccccagatccacttcacccacctgcattcatgaatcccacaaagacatgcacttagcaccctctttcagcaagaggaacctcaaccttagcattcttctcacgacgtttctgtggggtcagggtgtgttgttgccaaatgcccgtgatgcactgttgttggctcaagaattggagcttcagagatacacggattccgaggaaggtttcactcttcttacaccctcttcttggactaaggttgataaagcaggggcaactgtgttgtttcaagaggcagatatgggaagtaacaatattggggttgtggtaaacccagttcgtcttaagacccttgaagaatttgggactcctcagttcgttgctgataagcttttacaagcagaaagacgtaaggaaagtacaaaggaggtcgagttgattacagtagcagaaagatcaggggagggagggttacagatttatgaatttgaatacaaggttgatagtacccggggagggatgaagaggatattttctgcagcttttgtagcctcaaagaagctctatcttctagatattgttcactctgataaactagagattcctcttgacccaaataagagaatgattttagaacaagttcttcattcctttgatgcagcagcttaaactgtggtataaaaaatccggttcttctgatttttttattctttcttgagttttgatttgattcctaagttatggataatgacttatgttcaaatccttacattgaaagtcaccattgtcaagctgactgaaaatttgaagtgaatattacactaattctagtgttaccaccgtacttgtaaccggcataatacttcaacatgatatttagttaaaagggaaaaacagaagaatgcttgtgtactagtgtatatttatagacaggtgatctattagttttttatttttatttttcttggggtagatganntgccatttacgtattcgggtggtgattttccaanttaattatttcctaggtgaatgctcatat

SEQ ID NO: 37594 - DNA, 370 bp, Glycine max
  Clone ID: PAT_MRT3847_133949C.1
ggctcgagcggattaagagcgtaagctctttttccatgatcgggactgtgctgttgtcacgggtgtcactatcggagtgttatactgaccacactctcagggtgtcttagtcgtggtgacgtacacaacttttcacaatatgaacatgattcatgagaaaccataggcttgtacgatcgatcgtgacactgttagatttgtatacacgaagttactgctgaatgatgatgattctgctaaatagaaggtacgcaagtggcatgttaatgctgctattacttgtgagcttacagagacattatctggatcatgaatggacatatttgatgcttgagatgtacacatactattactttgatattaacatata

SEQ ID NO: 37595 - DNA, 133 bp, Glycine max
  Clone ID: PAT_MRT3847_13394C.1
cgatgcgtcgcgtgcagagatgttagcagacgccgtcgctctccttcattcataagctgaggaattgcatgaatccctcaatgatgttgatacacttcgcaagtgtgcatcatgcgaaccatcctaaattgat

SEQ ID NO: 37596 - DNA, 229 bp, Glycine max
  Clone ID: PAT_MRT3847_133950C.1
ccaaatagttaactacgtaatggcttctcttctctctctctctctctcttcatagtactctatttgtaaagtaatatgcgtgtatagtatagcatctttttctactactactagacatgcaggtcgagttggaaaaatttgttatttgcaaactcttttgtgggggattgacttcacaagctccccaatgatcgaatccctgtgtgaatataattatgccttttggtct

SEQ ID NO: 37597 - DNA, 812 bp, Glycine max
  unsure (1)..(812): unsure at all n locations
  Clone ID: PAT_MRT3847_133951C.1
gtcctctctagattcattatcatatagaagaaatggcatctacatctcaaacacttggaaacaagattgctatgggaatgggatcattaactgcagcttccttggcaatgttgcttgcctttgcaaatttggcaacaactattgcagcagttgaccccactgcagccactggggaaagaacatgttattgagctttacatgcatgacattctagggggcagcaacccaacagctcgaccggtgactggcttgctgggaagcatatacagtggtcaagtaccctttgcaatgccagtaggattcaacacccaagggacagccatccctaatgccaatggtgctaaccccactgtcaatggagtttttggcatcccactaggaactggattggcaggtacttcatttgcaccaaactcaggcaacaacaacaaccaaaacaatgcccctctgcagttaggacctgatggactgggactaggctttggtacaatcactgttattgatgatatattgacctctcaacctgagttggggtctcaaatagttgggaaggctcaaggtgtgtatgtggcaagttcagcagatgggactagacagatgatggctttacagccctgtttgaaggaggggaatatggtgatagcttgaacttttatggcttgtacaagataggaagcaccatgtcacaaatatctgtgatggggngcacagggaagtttaagaatgcaaggnggtttgctgaactgagagctcttatcccaccaggacagattgccactgatggtgcagaacactgctgaggatcctatcta

SEQ ID NO: 37598 - DNA, 1199 bp, Glycine max
  unsure (1)..(1199): unsure at all n locations
  Clone ID: PAT_MRT3847_133952C.1
agctacnntaattgacaaattgcattagattacacttgacgatgaatttaacgtataatttcaataacatgcaaggctttaatttatttaaagaatacaccctgaaattaagcatcgtagccataaatattaatattgatatcaacaagtgtacattattcaggagacagtggttgatggtggattgactagcctgcagttttgcctaatctgaccgttggagccagttagtggggtgagcatgctcatcttaaacattgcatctgcaaagtccttcttgaaatttcccatgtttctgctgtatctatttacttgatcgtttgtgggaccagatccattgttcgtgaagagttgttggtccgagtgtactacaccctttagctgcaccaagttcttgtagaatgcattgtcaaatttgaatggtgtggtggaatcgaaaggagacaaattgtcatcaccaccttcgaagggacacaatgcttgcatttgttgtgcaaatgtcggatctatgttgctctcgttgtaaatcctcgctctgaagaaacggcatctaactagtccgattgtgtgaccacctgataaagtaacaagttcttgggtagtgaaatttttcttggcgaaagcagtgatgaggccactaagatccaaaaagggagctggtaaatctgaattggcttcgtctaaacttgctgtggttgaatctcttctgcctacttgtacttcccatttttgtccaccaagagcaacaacagcgtctctcgcagcaacggctaagatgtcagcacaagagacaccgcctttacacatgccttccaacttagattttatgttgtctatgacttcaaaacccctaagggagttagcattaggaaatgagttcttctcgccagtgaaatttgccgtgtcgtctaacaacaccgatgcatcacatccttgaacgaagcagtcatggaagtgtagtcggagcaaggaggcccccatgcgactctcattgcgcacagcacgttccacttctttcctaatggtggtaagggctttgggacaacttttatcatagaattttgaggataactgagctgaagttaccccgataacacatgaaattaaaatcaacgaaaactttagtttgaagaacaaagagagagaacttattgcagccattgcaaagggtacttctactagtagaggttttaactcgt

SEQ ID NO: 37599 - DNA, 696 bp, Glycine max
  Clone ID: PAT_MRT3847_133953C.1
ttttagagaaaggggtaaccaaattttttccaaaggtctgtgtggtcagggattcttggcagcccagggtcccggttaaggttttgtggcattggagtggggaaagggaaaccatgggtagatttgggcgctaacaggccttgtcctttggatgcgctttgggcaccttatgatctattacgtacccccttttctttcgactcttgaaatttgaatttgggatattcctgtaacatagggtcatacaaatcaggcttaatttctcgatctatatgctgcttgggaagattgaattgaagagacaacaacataacatgggtccaattatacacgtacgaagagctagctactcatcggaccaaggatacatgttcaaagtgtacattaagatgtgaaggaggtgagtggggttcgtgattgggattgtacgattgagtttgtatatagcgaagatcgagctacgtaataagttttggatgcgcatattcagatttctttttttggtcctgataatgtgaacatagtgagggtttttgtataggcaaactcattttccgtgttcagatccttttctttttaccttgtatttttctctgttttctgctttactagtattgctgacctgttactttgttcctttgataatgggtctagagaactgacttccaaccaagacgaagagatttattcgttatc

SEQ ID NO: 37600 - DNA, 895 bp, Glycine max
  unsure (1)..(895): unsure at all n locations
  Clone ID: PAT_MRT3847_133954C.1
gagaatacccacccaatcatcgcgttccacgttancgatatctctctcggacattccgtcgaacacgtgcccggcaagccaaacctcgtcgcacctgcagtagcacgtgatcaacgcgttgagaacgaaaatatcagagtacaacccgcgtcgaaggattaaacagtgaacctctttcgccaattcggggctacaaaaagacgaagctaaggctttcaagacgcaggnatatggtgaagttatcgggggaggcgttgggggttgtggagaaagtgaacgacccgaagaggttgagcgcgtggcggaacatgctgttgaaggagtagccgaggagcatggcgttccacgtgaaggtgtttctgtggggggtcgtgtcgaacaccttacgcgcgaagtgcgcgtggttggatttggagtagaagaggatgagtttcgaggcgaggaagttatcgggtgtaacggagagtaggatgaggcgagcgtggagctgcttgccctggcggaggaggcggtggtcggagcagtgctggagggccgagccataggcggcgaagtcgacgccggggggggagagccttcgtcggaggttaccggttactgtcgattgtgtttgaaattgaagggtgggtgccaccaggttacggatcctcattcatttgtttcgcgcggacgcgtggaaattcgaatttctcctagtttttctgttctatattcaacaattataaaaatattttgggctgggctgaggcccaattaagtgttttcgtggccatacgattttgtactgagaagctcgtgattcggttttgcttgattcttaaagctaatcaagannnagtgaatagccgatagcaccattcactcgacaacaaaaaaagtacacnnnntgnnnnna

SEQ ID NO: 37601 - DNA, 486 bp, Glycine max
  unsure (1)..(486): unsure at all n locations
  Clone ID: PAT_MRT3847_133955C.1
attttgacgcaccgggatcgcaggttgacgcaccttaaaaccgtgtgcaaacacaatcatcacttgaattcatggatcttctctggccaatccctactgcccatgagttctaacactttaaaggaaagataattactctatgagccgatcacagactccttgaataatggtcttttgcagtctaagctgaaccattcaacactcctctatttgatatactaattggaggaccagtgagcttctttatggggcattgtgagtgctgtgatgaatggaaagttcaagctggagacattgtggattagagctcccactacactatctggtataggactagaaggagagacttttctatggctctacttgcgttgactctcttcttctcactgatacgcattgccgatcatagcggtcttatttgaaaaacacttggtcgatgatgcatatgtttgctgnggaatttgttctggagacaacaggctcact

SEQ ID NO: 37602 - DNA, 1305 bp, Glycine max
  unsure (1)..(1305): unsure at all n locations
  Clone ID: PAT_MRT3847_133956C.1
tacggctgcgaaagacgacagaagggggaaaatcacttacttatgctttagaggataatatgaagaacatgtttctagagcttacgagtcattgtgcgtctgttatctgctgtcgctcatcgccaaagcagaaggctctggttactagactggtcaaatctggaactggtaaaacaacattagctattggtgatggagctaatgatgttggaatgcttcaagaagcagatgtagggattggaatcagtggtgtcgaaggaatgcaggctgttatgtctagtgatattgcaattgcacagttccggtatttggaaagattacttcttgtacatggacatcggtgttaccggaggatgtcatcgatgatatgctattttttctacaagaatatcacatttggctttactctattcttgtatgaggtgtatgcatcattctctggacagcctgcatataatgactggtttttgtctctctatagtgtcttcttttcatcacttcctgtgattgcccttggggtccttgaccaggatgtatctgccaggtactgcctgaagtttcctattctataccaagaaggtgtgcaaatgtcctctttagctggcgtctaatacttagctggatgcttaatggatttattagtgccacaatgatattcttcttctgcacaaaagcgattgagccacaggcctttaatgaggagggaagaactgctggaagggatatgctggcagtgacgatgtacacttgtgtggtttgggttgtgaacttgcagatggcgcttgctatacgttacttcaccttgatacaacatattttcatctggggttccattgcttactggtatcttttcctcatggtatatggagcaattcctccaaacatttccacaaatgtttacaaagtcttcattgaaactctcgccccatctccttccttttgggttgtgacattctttgtggcgatctcaacactcataccatacatttcgtgctcggtaattcagatgtggttcttccccatgtatcaccaaatggtgcagtggataaggtatgagaggaagacaaatgttcctgagtaaaatactgtgatgtgataaggcaaacaaatatcattgtggccaagaactgaattcaacagcacattttgcagctgaggctaaccatagtagagatagaattaccaaccattgataatatatgtatattgacataaaaaagtgtaatatactgagattttagttgaaaaatgtgatatgtgctatcccaaganacacncanaaanaacaanngggnngnccncccc

SEQ ID NO: 37603 - DNA, 812 bp, Glycine max
  Clone ID: PAT_MRT3847_133957C.1
ggacgcgtgggcttatgtaaaatatttattgtataatgcgtctggcgttatgctattagcttcttgtaatgtacattggaagttgcttttgtcttataaatttctgagacccgcagatcgttgatttgtagttagttagtcatgcgtgctttagtggtatttatgctaatattttgaaatgattattattgaatttatttaattgtttcaaatctaaaacaaccctggcattcccactaggtgggattggataaatgcaagatagatcatttacctcttaatccctcttagtggtttaaccttataattttctttgctctccctttacctttaactattgtacttttttccatctagtcgactcccttactggtgcttctatgagttttctctgcgcatgcccaaacaatcttaagacaagactacctaccattctttcatattgttcattttttacacaacaatagctagctacatgcctacatcccactaggatgctgctcatttgttacacagacaaatttaagagtaatttatgcattcttttattgaatagaggagaactgtacaagtgtctacaaacatttgcatatataataaacacttctaatcaataaaacttatgtatttagtgttgtatctactgctcgttgaatgaaattattgacaggataggtcaaacaaaatggcagattagagttttatattgattcatctattgcggattgaatgaaaccatagatagaaaaggtaaaattaaatgacagtttaccacaaaagttgtctaaaataaaattaaggattaaagttta

SEQ ID NO: 37604 - DNA, 403 bp, Glycine max
  Clone ID: PAT_MRT3847_133958C.1
tttaaaatgaaacatcagatcattttactttgctcactttttttttctttttttcggcctccagggggagaacttttttcccgattaaaggagataacattgtgcggtttctctgactttatgaatggccgttgaacgtctctcccttcatttccgggcccaaggtatgacaccacactacataaaggactacattgttgcaggtcggatctgacctgttcttttaaactgcacccccctccagccgaagctaaagggccacccctgcctgcggactgtccttgatttccaccataccctacttggattccataggactgatttgatacctcatgaactgcatcaagaatctttttgtctatggaaccctctgaaactatgaatgcctctgccccactctgag

SEQ ID NO: 37605 - DNA, 1172 bp, Glycine max
  Clone ID: PAT_MRT3847_133959C.1
caacaaaactcgcattccccactgaagggaaacgaaaatgagagctcagtagacggccactttcagtcttctgatatgaaccgtcaagatccaggtaggcatggttaccatgattcaaagcctacttattcctttacaactgatatccatggtgttcagcaccaaaatgatgcctcaagaaacaaaaatgacctctatgcattagttactcatgaacaacctcacaagttcaatggtgtacttgaatcacttaaacaagctaggatatccctacaacaggaactcaagagattgccactagtagagggtgggcacactgctaaaccctctgcttctgttagtaaaagtgaggatagatttgaagttcctgttgggtgttctggtctctttagactaccaacagatttttctgatggagcaactgctagtttcaatgttcatgatcctactgctggatttggttcaaactttcatgttaatagagccatgtctagaacttctgatggtcactttttctccagtcttccttactctggcacaccattgagcttgcctgctgatgatcaatctcttgccatccaatacgtggaaaacgggtcaagatttgattctaacaaggcccttattgatcctttctcaaatggaggttcactctcttccagtaaatacacatatcccacgtttcccatcaatccatcctatcaaaatgcaacaccacaaatgccatttggtaatgaactttcaagaccctattcaagtagcacagccagggttcctcttgcaaatcgtttctcgtttaatggcgatcatttaagatgaaacatgtatatataatatcattaggttgctagcagctactcttgttgtaaaagtaatggtttttatttgtcatgtactttaaggttattctctctagttgtgttgggaagagatttttttatgacaaaatacactgaaagttcgtccttccatctggactgtgtttactttaaatgtcgcactatcaatcttggtcatcaagattgcttctggactgtgtttactttaaatgtcgcactatcaatcttggtcatcaaggttgcttccatgtcttagatttatctctagattgataattttaaactttgagattgactttgaaaatgtaaaatatgtttctctatttttttagc

SEQ ID NO: 37606 - DNA, 314 bp, Glycine max
  Clone ID: PAT_MRT3847_13395C.1
gtcactttctggttccctattactcattcttgtcttttctaataattatatcatgtgggtcttacattttgaatatccttattaaaatagactctaattagtcatactgaactcagaatgtcacacattcgctcatgcttgacctgaggctacacagacagagactatgcatcttactaacattaccactctcacttcctaatattacaatatttttactgcatccaaaaatcctactgcatattatacctctaacgcctattgaaacgctgctatgtcaacatattcacatatagaaccagattcttaaccat

SEQ ID NO: 37607 - DNA, 639 bp, Glycine max
  Clone ID: PAT_MRT3847_133960C.1
tagagccatgtctagaacttctcatggtcagttttttcccagtcttccttaccctgacacacagttgagcttgcctgctaatgatcaatctcttgctatcccatatgtgaaaacgggccaaatggaggttcactctcttccagtaaatacacgtatcccacatttcccatcaatccatcctatcaaaatgcaacaccgcagatgccatttggtaatgaagtttcaagaccgtattcaagtagcacagttggggttcctcttgcaaatcgtttctcgtttaatagcgatcatttaagatgaaacatgtacatataatatcattaggttgctagcagctacgcttggtgtaaaagtaatggttttatttgtcatgcactttaaggttattctctgtattctctctagttgtgatgggaagagattttttatgacaaaatacactaaaaattctcccattcatctggactgtgtttactttaaatgttacactatcaatcttggtcatcaaggttaccaccatgtcttagatttatctctagattgataattttaaactgagattgactttgaaaatgtgaaatatgtttcagtgtgttggtcttgggtaatttgaaaaaaaaattatttaatctatttcat

SEQ ID NO: 37608 - DNA, 595 bp, Glycine max
  Clone ID: PAT_MRT3847_133961C.1
tccggataatgcagtgcctatggcttattcattcattgcaaatatgaggttaggcacatctgagctgaacccacccgcattcttttcatgccggcggcatttccccggaataccaacactccaacttcacccacccgcaagaccaacgtcgccgcgccggtgccgcgattgggtaacctatgcaagccgtcaaaaaccgccgattccaatttctagtaacatcgacgagagggccttatgttttgatatcttgtggagatggctttctagacttatctccttttacttgctatctctcaatctcgctgctgcagcctctgattacccagctccctctacttatccctgtgaggacattagccattactattcttctgtgaagcattttagattcagaggtgaagcactcaaaagacaattgaatagcatcgttgccccacatcattccttgtcctacagagaggtgtgggatgccctcaaggttcttgatgctgctgatattgataatccagaagcttcatctgaaatagttgaaatatactccttgagagttgtcccaaaacggttggcaggaaaaccgcagggatggaatagg

SEQ ID NO: 37609 - DNA, 2304 bp, Glycine max
  Clone ID: PAT_MRT3847_133962C.1
ccacccgtccacctctctatataacaagagacgcttgcacacgcgagtctcgcaggactgaagaagtgagggcaagaactttgcagcataccagcatgagcatgaagctcttccagctcttctccctactcccattcttcctctacttctacacaatagaagcagccgttggcccattgcaactgacacacccactggaccccttaactcagcaagaaatcaccctcgtcaaaaccatagtcctaaaaaagtaccccaagccagccaaccgcgtcttcttccactacgtcggcctcgacgatcctgacaaggccgccgtcctcaaatggctctcctccggcgcccggacgccgcgcaacgccttttccatcgccctcatcaatggccaaatccacgagctcaccgtcaaccttctctccccgcgaaacgttgtcttggacaaaatccacacagggaacgggttccccaccttaacggaggaggaacaaaccgaagccctagagcttcttcccaagtacggtccctttcttgagtccttgaagaagaggggtttcaacttgtcgcaggtggcttgcaccaccttcaccgtggggtggtttggggagaccaagagcacaaggactgtgaaaatggagtgctttttgcaggatgggagccccaacatctacgtgaggccaatcagtgggataaccattgtcgctgatcttgaaacaatgaagattgttgagtaccatgatgagcttattacgactgttcctaaggcggagaacaccgaataccgggcttcgcatttgaagcctcccttcggtcccaagcttcattcttggtcctcccgtcaaccggatggaccaggctacactctcgatggacacagtatcagctgggccaattggaagttccacataggttttgatgaacgagctggtgcggtaatttcaactgcatcaatttacgaccctgagctgcataaatcacgttcagtactatacagagggtacatttctgaactattcgtgccatatcaagacccaactgaggaatggtactacaagactttctttgatgctggtgaatttgcattcggtaaatctatggtttctttggtgcctttggaagattgtccaccacacgcacagttcctagatgcatattttgctgcaactgatggtagcccacaacacttggagaatgcaatttgtgtgtttgaacaatacggtggtatcagttggcgtcacactgaaacaggccttgatgagatatttacagaagtcagaacagatgtgagtctaattgttagatcaattgttaccgtcggcaactacgacaatatagtagattgggagttcaagacaagtggttcaatcaagccctcgatatcactatcaggcattttggaagttaagccagtggacattactcacacagaccaaataaaggaagaccaacatggcacattggtctcagcaaacagcattggtgtttaccatgaccatttctacatattccatcttgattttgacattgatggtgtggaaaattcctttgtgaagacaaatttcaagactgtgcaagtcacggatacaacagttccaagagaaagagctattggacaactagtaatgaagttgctaagactgaatctgatgcaaagaccaaactagggttcagtccttctgagatagtaattgtgaaccctaataagaagacttccactggaaatgaagtagggtaccgtttggtttcaaatgcagcggttcatcctcttctcacagatgatgattaccctcaaacacgtggtgctttcaccagttacaatgtttgggttacaccttacaacaagactgagaaatgggctggtggactttatgttgatcagagccgtggagatgatactttggctgtttggactaagcagaatagggggattgagaacaaggatattgtgatgtggtacgtggtgggaatccaccatgttccgtgccaggaagattttccaataatgcccttgttgagcaccggatttgaattgaggccaactaatttctttgagagaaatccagtccttaagaccctttctcctggcattgttaaatttccaggttgtgagaaaccctagatttgcttttgagctttgtcactttaagtacaatattgttgatcgatagatccggagaaacattatctttttactaatatcggtcatatgtgctaaggtgagaaaataataattttgaataatgattcctctaaaaaaatacaaaaaaaaaaaaaaaaaaaaaaaaaaaaaaataaatattttataaa

SEQ ID NO: 37610 - DNA, 480 bp, Glycine max
  Clone ID: PAT_MRT3847_133963C.1
attcggctcgagggaaatgaagtagggtaccgtttggttccaaatgcagcatctcatccccttctcagagaggatgattaccctcaaagacgtggtgctttcaccaattacaatgtttgggttacaccttacaataagactgagaagtgggctggtggactttttgttgatcaaagtcatggagatgatactttggctgtttggactaagcagaataggggtattgagaacaaggatattgtgttgtggtacgtagtgggaatcccccatgttccatgccaggaggattttccaataatgcctttgttgagcaccggatttgaattgaggccaactaatttctttgagagaaatccagtccttaagaccctttctccagacattgttaaatggcctggttgtgggaagccatagattggtcacatgtgtgctatgatgagaaaataataaatttgaataaattaatgatttctccccacc

SEQ ID NO: 37611 - DNA, 313 bp, Glycine max
  Clone ID: PAT_MRT3847_133964C.1
aacattaaaggaggacaattttgtatttatagttctaaaccatgaataagacagatgcatcacttcatttgaggaaaagtagccaaagcttattattttctgattgcacagattacacattgccagaatggaaatagggtacacgcgtgacaacaaaaaaaacatcgttattaaacaagtgctgcacagcttactgggacaagtgctatcttaattatttctacagctgcctgtaaggttgtaagcgatgctgtataacagatgcggatgctatgagtatctacaaatgcactacctgggaccagagctacct

SEQ ID NO: 37612 - DNA, 416 bp, Glycine max
  Clone ID: PAT_MRT3847_133965C.1
gttggcatttggggattttttttttttttttgcatgtgtctgatctgttcatgatgcagctttttagtctattattgattagaattgcccccttggtgttacgttcaatgattattgaaaaaaaatacatcaatagatagggaaaatttggcatatggatcatggtttgatttatttacagggtggaatgaagttgaattgtcaagttataaagttgttgtattatctttcttgatgaatgttgactcagatgtttgctctttaatgatacaggagtcaagtcaagtattgggcatgtcaagagtgcgctgcattttacgcggcttggatgtaaaaacctgtatttttctttttgctgttgtgccaatgtgcatctttggaatatacttgcatggacagaaaatctcctacttcct

SEQ ID NO: 37613 - DNA, 514 bp, Glycine max
  Clone ID: PAT_MRT3847_133966C.1
cagtttccatcaactactcgagttcttttgtacattacggaagacgacagaagggctttgtagaatttagttcttaaaaaatattttataataaatacaatcaaacacactgttctgctgaagctgagctgaccagagaaacactcgtctgcccaaatactgagacaaaagattcaaaagatttcttatatatgtgatcttaagaagagaggtatagcatgtttaggttgttgttcaatcctcatgaacgtatttttatataagaatggtttttgtatcttttgctccaaagatacttttaaaagctcctccaaaacatgctagtgataacaacataaaaaacattggacaaaatcatattttaaactatagagactgagttgacatccagaatatttggatgactaacatgatgtcccgtattttctggcaaatgtctcatgaataccgccttacaattctatactcaaaagagaggaagagataaatatagatataatatataggacgtgat

SEQ ID NO: 37614 - DNA, 535 bp, Glycine max
  Clone ID: PAT_MRT3847_133967C.1
attttttttatatatttaaagtgagttaaaatagtcatcctatcaatttaaatttaatgtcattaatatttttaacataataacgactacaaactgtaacaaaaaacaatacttcatttttctaaagatttcttttaatgctttttgtcctctgaaagttcaaattaaggggcatgtgtttttttagttcccaaaataaaatcttgcaatttttaatctttcaatttcaaaaaatctcgtgtcatgttgtcatcaaattgcctttgctagccctttgcttcctcgaatttcatttgcagacgtaacaaagaaagagaggtataatcaaatgtaagtttttattagaatcaataatcaccaaatgtcaatttaagaggtctcacattttaatcacatatcttcttatagtgatattatattttatagcattccaattaattacttattttaaaaaaaggtacattttaatccaatttagaggttaaaacacattaaaaagatcataaaaaaaatcaaacaaattaaataagaaaac

SEQ ID NO: 37615 - DNA, 470 bp, Glycine max
  unsure (1)..(470): unsure at all n locations
  Clone ID: PAT_MRT3847_133968C.1
ctcgttgtggccagccaagcagagagagaaactagagccagaaagagaaacaaagagagcgagagcgagagcgaaaacacctcaacgtcgtcgtcgtagccgagaggttcctcgcaatggtggacccctacgtgctcggatggatcatatgcgccgtgctcagcctcgtcgcgcttcgcaatttcgctttcgcgcggaagaaccgttgccattcgtctgagaccgatgccactcgccgcgcggaaaatgtcaccaccgccgccggagaatgcagatcctcgagtcgcgacggcgacgttgacgtcattattgtcggagctggtgtcgccggctccgctctcgctcacactctcggcaaggatgggcgtcgggtacttgtcattgaaagagatttgagtgaacaagaccgaattgttggggagttgctacaacctggaggctatctcanattaattgagctgggacttgaa

SEQ ID NO: 37616 - DNA, 194 bp, Glycine max
  Clone ID: PAT_MRT3847_133969C.1
actcgagccgattcggctcgagtacggctgcgagaagacgacagaaggggacctccaagagaatcaattgcggataacaatgataacaaaaggtctggtcagcaaacaatagtatagcagttgcagattagatttctcagcagtgtaagcaaattgagctttcaacaatgacaataccaaatctcacccatttc

SEQ ID NO: 37617 - DNA, 630 bp, Glycine max
  unsure (1)..(630): unsure at all n locations
  Clone ID: PAT_MRT3847_13396C.1
acgaggccacttccctcgccttcgtctactccctcgattacgccagaactagactcaccaatgacgccaagggtgctaagaacggtggacaaaagcaaattcaacggtctcatcgattgctataagaagactcttgccagtgatggtatcgtcggtctttacagaggtttcgttatctcctgcgttggtatcatcgtctacagaggtttgtacttcggtatgtacgattccttcaagcccctcctccccggcactatgagagacagtttggctgccaacttcgctttgggttgggctgttaccgtcgttgctggtctcgcttcttaccccattgataccatcagaagaagaatgatgatgacttccggacaagccgtcaagtacaagagttccatcgatgctggtcaacaaattcttgccaaggaaggattcagatccttcttcaagggagctggtgccaacatcctcagagctgttgccggtgctggtgtcctcgctggttacgacaagcttcaattactcgtcttcggtaagaaatacgggggcggtgaatgnnttttatttatcaaatccgatcgtatgcttatatgattcgtataaagaacctatgcataccataaatatttatga

SEQ ID NO: 37618 - DNA, 241 bp, Glycine max
  Clone ID: PAT_MRT3847_133970C.1
ggaattcggatcgagtctagccctactactttacccacgctatgattctttggttagttgttcactatccttggctgtattcgtgttcgacgaccatgaaaacaacttcttccacttctgtgtgcaactagttcacgaccatgacatggtgctccatcacctaagttttacatccagacaggaaggagatccaacgatgattgcccagcaaaggacgcgtgttcgctggcaccctgggact

SEQ ID NO: 37619 - DNA, 384 bp, Glycine max
  Clone ID: PAT_MRT3847_133971C.1
gatccaattggaatgagaagaaccaaaattatacaactagcatatttaagggtccatttgctaagaagaaaagaaataggtacaaattagccttttttttatttttttgtttttgtaagtttatttttttaattttaacacaaacttatgtaaacaaaaatttaaaaaataaacttggaatgaaaaaaattaaaaaaaaatgctaacttacaaattataaaaatatatttaagcgaaaaaaaaacgatggatgaaagtagggaaagggaatgaaaataactaaatggttatctcaaaattctcaacaagcggcacttttcatacttcacgtcattgattatctcaataaaaccttaattaaatcatgggcacacgttttatttt

SEQ ID NO: 37620 - DNA, 1078 bp, Glycine max
  Clone ID: PAT_MRT3847_133972C.1
ccggaattcccgggtcgactcgagccggcattattcacttcaaagttcaattctttctctgtcgtcgctctttccttctttccctcctgctctttcctatgttctaagctttattcctcatgtctttcagaggcctcagccggccaaatgcctcatcaggcatgggtgttgctgatcacagcaagaacaccttcatggaattgaagcagaagaaggttcaccgttatctgatctttaaggttgatgagaagaaaagggaagttgtggttgagaagactggtgacccggctgagagctatgaggatttcgctgcatctttgcctgagaatgattgcagatatgctgtctttgactatgatttcgtcacttctgagaactgtcaaaagagcaaaatcttcttcattgcatggtccccttcaacgtctcgaatccgagccaagatgctctatgccactactaaagacaggtttagacgagagctagatggtgtccattatgaaattcaggctactgaccccacagaaatggatcttgaagtactgagagaccgtgcacattgaaatgtttaagcactgaattcattttcttatcagaatctactaggttttaaagttttacttttaatgaattacctcttcatgctttgtcatcaatagaacccatcttgccacaggaatatacctccactaatatgaatctgaaggctgatgggtttaaagcttttggcagttattgttgtaaatcccagtgtgctggacttgtattgtgtatgagcgtgactctatggatcctgatagatttcttggataaaaaagtcccttcttctcatgcatttaacgtatatttaaaactctaaaagaaacattatcgcgtgctggacttgtattgtatgagcgtgactctatggatccagatagattacttggatgaaaaagttccttgttctaactttggcaagtatctatagaaaatttcaaaacttgcatttatcaatatttaatttgcttcttgaaaaaaaaaaaagatataaaagaacaaaaattacatacccatacattcaacatcataactattatat

SEQ ID NO: 37621 - DNA, 1021 bp, Glycine max
  Clone ID: PAT_MRT3847_133973C.1
ccacgcgtccgacggctgcgagaagacgacagaaggggatgcttcacaattaatagtgctattagattcttaggaactttactccttcaattaattatttatgcatttggtacattatacatgcaagctgtaactagtaaaaaaaaattgaatttgaaggaggaggtgaaggctgaagtgtggagaaggattagggtttgtgtttatatatttagatatagaatagcagaaaatttggattgtgagggaaaaaatgggtagcgaagaggattcgattgagcaaagcgttgcgtcccgtcgcgaaagactgctagctctcagagccgctcaggagttgtcgagtgttcccgaacctgaacctaacggcaacaaggacgatgataatgaagaagatcaagaacctcaagaaatgaagttccgtaactacgttcctcacgacaaaaacctccaggaagggaagcttgcccccgcggtgctcccaaagttcgaagaccctgtggatgatgtgcctccacccgagcctgaagctaaggaggatccgttcttgaatattgctccgaagaaacctaattgggacctgcgaagagacgtccagaagaagcttgataagctcgagaagcgaactcagaaggctctttatcaactcatggtggaacaagagaagcaaaatcaattaactgaaggagatgatacaaacggcacagtagagtagattgcaatttgttccggcagctgaaagatattgaagcagtatgttgaaaactcctgtcccatttaagctgcttaacgcataaaaaattggtttctaatacactagtctttgcaatttggcaatgtatcgtgaatgtcgtatcattcacttctctttcaatgactaagtatgagtgtattagatctgtttttagaggtgaaatatccctggattctgatagttgtattaattttagaacaaattacactcgtctcttttgtatttaatacttattacactcaaacccactcattgttggaacctttcgcc

SEQ ID NO: 37622 - DNA, 331 bp, Glycine max
  Clone ID: PAT_MRT3847_133974C.1
gtatatcatcaacaagactcccactggcaaaaccataaccctacaagccgaaggggggggaaccagtgagaacgacgaggccaacatccaagagccagaaggaatcgcccccgaccagcaacgtctcatctacccccgaaagccacttgacgacggaaacaccgccgccgactacgacgccggcaacgaataaaccccaacacctgacccaccgccccgaggggcccgcaaaatctccgtacgccccccaacccgaagcccataaccccgacagcgcgagaactccgcacccacgacaggagcgcaggctaagacccaagaccaggccggg

SEQ ID NO: 37623 - DNA, 651 bp, Glycine max
  Clone ID: PAT_MRT3847_133975C.1
gaacctcaagaaatgaagttccgtaactacgttcctcacgacaaaaaccttcaggaagggaagcttgccccagcggttctcccaaagttcgaagaccctgtggatgccgtgcctccacccgagcctgaggccgcggaggatccgtttctgaacattgctccgaagaaacctaattgggaccttcggagagacgtgcagaagaagcttgataagctcgagaagcgaactcagaaggctctctatcaactcatggtggaacaagagaagcaaaatcaattgactgaaggagatgatacaaatggcacagcagagtagattgcaatttgttccggctgctgaaagaaattgaagcaatatgttgaaaattcctgtcccatttaagctgcttaaagcataaaaaattagtttctaatacactagtctttgcgattttgcagtgtatcgtgaatattgtatcattcacttctcttcaatgactaagtatgagtgtattagatctgtttttagaggtgaaatatccctggattctgatagttgtattaattttattatacaagggattccctctttttaagttccctggccatagtgccgaaactaaatgtgtaattgaattgacataaggaattgacataagtgagagttctgcta

SEQ ID NO: 37624 - DNA, 993 bp, Glycine max
  Clone ID: PAT_MRT3847_133976C.1
aaaaactaataagtccaaatgaaaacaacagttcaagctttgcagtaacgtcatctctctaccaacattcattcctgagctcagctgagacaccgcaacacagccgccaccgccgcctcactttcaaatgggtgcctcggaacatgtggtggttgagaaagagaaagagaatgaaactgtagctgaagcaaagaaggaggagaaagacttggagaaagggggtggtgtgggtgttgaagagagaaagtttcatagtaataataataataatgatgttaatgatcatgaagaatctcatatctcaagtttccacaggttgaaccccactaaccctttgagaattgtgattaatagctccaccagagtcgcaactcctcctcctcctgctcaatctcaacgttctcacacccacacgcgctccattccaaccccacaacaacaacaacccgaaccccaaccacaaccggtgacactgaattcgagaaaatacaccaacagaatatccttgtttctttttgttctccacatgtttttagcggttacgcttgtgttttttctcgtgttcaagggagttcaagggctaatccaggaatcagaatctaacaagaggaaagagaaaaacgtgttaaagtattttcttccccaagtggaggctgcatcttttatgagcataattcttgcatttatttggcaaggggcgattaggaaatggccaacttttatgcttcatttcatactttggtttacttttgtggtgtctctggctgctgggattctcctaatttgcttccaaaagcccgccactgatggtgttggagtgtgtttcattgcttttgcaattgggaatggcttatatgcttgttgggtaagtcatagaattaagttttgttgtaaggtattgagtttgtctcttcaacctgtctccaaattccctgatctgagcaaacccacttattatgtgcttggggctgcatccttgtggatatctctatg

SEQ ID NO: 37625 - DNA, 187 bp, Glycine max
  Clone ID: PAT_MRT3847_133977C.1
cgacgcgtcaagagaaaacacatatgggacacacagaacaggacatacattgttcaaacccttacccaacacaaccatcatggccacctctgctattcagcactcagcattcactggtcaaactgctctgaagcagctcaatcagttcgtctgcaacaccggtggcgccggtacatgtcgcactaat

SEQ ID NO: 37626 - DNA, 764 bp, Glycine max
  Clone ID: PAT_MRT3847_133978C.1
ccagcgtccgaaaaactaaaaagtccaaatgaaaacaacagttcaagctttgcagtaacgtcatctctctaccaacattcattcctgagctcagctgagacaccgcaacacagccgccaccgccgcctcactttcaaatgggtgcctcggaacatgtggtggttgagaaagagaaagagaatgaaactgtagctgaagcaaagaaggaggagaaagacttggagaaagggggtggtgtgggtgttgaagagagaaagtttcatagtaataataataataatgatgttaatgatcatgaagaatctcatatctcaagtttccacaggttgaaccccactaaccctttgagaattgtgattaatagctccaccagagtcgcaactcctcctcctcctgctcaatctcaacgttctcacacccacacgcgctccattccaaccccacaacaacaagtactttttttatggaaattttcattatttttttttgtaatgattaattagaagggattccttgagtttgcagtaatttaatttctaagtggtgtgttttttaaatgtgaaaatcttgacggattattattctatttggtttttgaacagcaacccgaaccccaaccacaaccggtgacactgaattcgagaaaatacaccaacagaatatccttgtttctttttgttctccacatgtttttagcggttacgcttgtgttttttctcgtggtcaaaggagttcaagggctaatccaggaatcagaatctaac

SEQ ID NO: 37627 - DNA, 460 bp, Glycine max
  unsure (1)..(460): unsure at all n locations
  Clone ID: PAT_MRT3847_133979C.1
ataatttattcttcacatgtgtcctggattctcaatttggtccttgtatgtaaaaagttattaatttggtccctataggttgaaacattatcaatttggtcccttccattatgacaccatttatgcattcataaattggtccttttacatgaagtgcattcttaattcttctagggaccaaactaagaatgtgctacacatataggactaaattaanaatgcactgcatgtgtaggaactaaattaagaatgtgtaaatgacgtcataacaacaagaaccaaattgataacatttgcacgtacatagaccaatttaataagtgttgacgcataaggactaaactgagtactgagtatctgcaactcgtacaaggactaaaatatgtgtntaaggtaagctatattacggagtacgaaaaggcaaagatgacttggaggaaaatatgagtgaagaaaagag

SEQ ID NO: 37628 - DNA, 424 bp, Glycine max
  Clone ID: PAT_MRT3847_13397C.1
cacgcgtccgtacaccccgaaactaaacccgtcacatctctttctctctctgcgatgaattagggttttgaaacagtgaattttcaccacctcaggagacaatgttatttttgtgattttcattacagaagaaggggacagataatctttctgtagtatggcaactgagagtccaattagaatctcagaagctggtggtaaatggccgtctcataaggaagctgcagcttttggttcactgtctcgtaacatggcaacagaggatttgggtatacttctgaagggccataggtaccagggtggtggaaaggatgtggcacccaatcgcagtggcagtgcacctcccagcattgaaggctcatttctggccataggaaaaccttttaccgcaccatagcaccactccagaatgcgagcttttgcc

SEQ ID NO: 37629 - DNA, 347 bp, Glycine max
  Clone ID: PAT_MRT3847_133980C.1
cacacacaatgaagcggaaggaaaagagaaggatgggggactaaagagaatttggacgccaaagacggaaatctcccattctgcattaccagctttatcgttgagttcgtgacttcgtttagcacatgcaggtgagtttgtaggtttgttatggacgaattggatctggactggatacgaccggagtgccccgttgaaaagactgcaacaaaagcccattgtattctctcaaccactcatcttcttgcaatgccctgctagctgctccaaattgaggaaaagcaaccaaaatggacaagattattagtagcattatgaagagggtcatcttgtaagagaatgccatc

SEQ ID NO: 37630 - DNA, 416 bp, Glycine max
  Clone ID: PAT_MRT3847_133981C.1
acgagatttttcttggctcttactttggtttcctatggaaagtgaaaactgaaatgggttcttctaatgtctccttattttatctcccacacactcttctcctctctctctccaattatcaggctctgataataagtagtagaaagagagaagaaggggaagagagcataaagacttttgttctctagtttttgtaattttatggaccctctatgaaactcacatgacgccactcattacttgtgggctcggcgcgtgatcctcactctccgcgcgtagtgcaatttctcatcccagaatacatacactaacaccaccactcacttacgtctcaatcccccccacacagaacagcgcgtgcacgcaactacgctctgtggcacgcatgtaatttggggcgttgtttattttttaga

SEQ ID NO: 37631 - DNA, 631 bp, Glycine max
  Clone ID: PAT_MRT3847_133982C.1
aattttgtttttttgtgtgaagcatggagacctaaaaaagttcttcgcatttaaaatgcgttgttgtcacataaaatacaccagattactaagaaccctaacgctcttttttttattaatcaacatacaaacgatggaggcgagaaggaactgtttgcaaagagtgctggtataaacgggatcctttctatccaagatcagtgtgactaacatatggggctctaactatacaaaaatggccggtcaacaaagactgtgatgtgaacaatgggggggacccccagactattggatagtctattcccacctaatgctataaaaaggaggcgcaacttgtgaactctgtgaggaaggctgccccgctcttttgtgaagatgattgacatgacgttcgctaagactgctcttctgtggctgcggctggagatggtgagaatcagaaccctaatgcgcttgatgcgtcaccctaacctgtataaatcgttgggctgaccgcatatgctggaactatcacactcgaacatagaaccggagggccactgctctccacgtttaatgattgaaaagcaatattacaggccccagaatgactggcttgcctccggttaaaactgcagatgtgctgctgact

SEQ ID NO: 37632 - DNA, 574 bp, Glycine max
  Clone ID: PAT_MRT3847_133983C.1
ggcatgattgggaatgggatttaccaatgcttttcaacaagaatgcattatgtacaagattttattgtaaaaataaaaaagagacagagattagacccttttgttattctagaatataaattctttcaaaaggcacacacatttgtttctgcaatttcattcgggggggcaacttctaatatcttcatggcaaggaagttggtggccttacagaagccaaactcaaagatggaacacgtgtccaaaacgaacttttgagagtacttatggtgtaaaatccatggcaagttacttgcttcacaacttagcaaaaatagtcaaagctcttaatctgcaaacttttatggcttgatacaaaaatgtgtgtcaatgaacaaaatgatggattaaggattcgcgaaaaaatggaacaaacagaatgaaccacattccaaataactacctgtgcttactgaacttcactcgcaaactagccatttcatcaatcacaaactcatcaattaaatccttaaatatcagtctctcaacatccaacacaaccccaggtaattcaccagggaaacctgtccagttt

SEQ ID NO: 37633 - DNA, 233 bp, Glycine max
  Clone ID: PAT_MRT3847_133984C.1
tgaggtgaagccgaaaaacaagagttcatgaatgtgacaagccctactgacacgggtctaaaatgaaaagcttattggctagtggggaggatcaccaattactgaaggaatttgcacacactaaagcaaatctggagctggagaacgtaggcggaccagcgtttttttaaagagaaactttaagcaaatggcctatgctatgggcttggctcctgaggacaaggaaagtttta

SEQ ID NO: 37634 - DNA, 544 bp, Glycine max
  Clone ID: PAT_MRT3847_133985C.1
cttggggggggggggggggggcactgaaaaggagtatactagtataggaggctaactgttggagacgaaataagcgggggcacaaaggtggtgtacatgaaaggagaaataaaatctagggaggggaaagtaggcctagggtgcaaaggttaaaaaaagaaagaaaattgattgaagtagtgcgaggagcagaagcgggttgtactactaggagggggaggaggagagtgatacagccatgcagacttacagtagttgacgaggataaaaagttactacgcatataggataaaagtaatggttggcgtttgccggcactagcaacaatgcgaataaataacgtttgacaccaagtggacggttttaatgtgagacgggtcttgcgcaagataacaaccggttaaccagactaagcctcctattaacactaggcagcccggcaatgccgcgcgccaacagaagaagccaacatataagcatgcagagatcgggtagccgcgggttaagctgaaatcgtaaagcacacagtgcagttacacatagc

SEQ ID NO: 37635 - DNA, 687 bp, Glycine max
  Clone ID: PAT_MRT3847_133986C.1
cccggtcgccccagcgtccgccccttcttccgtacggctgcgaaaagacgacaggaggggtcagatgttttgggacactgaggtatctttctttttgaggatacgtcgctccagaggacagatgaagatagagatttcactatggggctgttctgtgttctcttctttgaattgaaccttcccatctctttcttctcacttcccccccctttccttttcccacttttgaattgccttttcctttccagaattttattctaccaagatgcatgtttttgtcatgtaatgcagattttcacgaggcggttttcttgtgtcttgaaagactgtgtctgtgactgagtttttctttggtaggtttcttcacttcaccgttcccacttgcattattattattcaaagaccccagtagcagcatttgcatttccctcacgctgcacccaatgggcagagccataaggtggttgaaggggttgtttgggataaggacagacagagagcgcaaagagaattcaaatcactcagacagagattccagaggtttatgtcataatccaaccacaattccacccaatatttcacctgcagaggccgcttggttgcaatccttctactcagaaactgagaaggagcagaacaagcatgctattgcagtgctgcagccactgcagcagccgcagatgctgc

SEQ ID NO: 37636 - DNA, 576 bp, Glycine max
  Clone ID: PAT_MRT3847_133987C.1
gctcggaattcggctcgagctcgagccgctcgagccgttctgggcttgacttaagccggcccgaggaggctctagatggcgatggtttaccgatatcgcctgccaggactccaccaagatcgcttgcctgggatgaacgctggcaggtcactgtgagatactttccgtattatcaatcagtacccttcgaccatggagagagactggaagtctactgcggaaaccggagcattcctctttttctagagtctatcccagaccgggacacaaaattatcgctacaatctgagtctggtttacggagctgtggaaatccgattcaacgtgacttgcgaccatttcacttgtatcaacaagaccttttccctagaaggggttcaaatctccggcgtcattgccaaagatctcactcgcaggaaaacccttcttcgggaatcgttgtcgaactaatcaagctgtggatagccaggtgtgagagccatccgcagtgcaatcgaaaggctccggccaaacttcctttccgcatcatagatgttggtcctgcagatggcagtcaaactccacggctcacgattg

SEQ ID NO: 37637 - DNA, 145 bp, Glycine max
  Clone ID: PAT_MRT3847_133988C.1
atagattggataaagccgaaatatactttacctgctatatttcattgacagacctctttacacttccctgctgagccagggcattcactattacacgctcaatacaagaaaaaataacaacattccaagtgcgagaagactatta

SEQ ID NO: 37638 - DNA, 175 bp, Glycine max
  Clone ID: PAT_MRT3847_133989C.1
ccggctcgtgctagtcaatgatctgggacctaactagggttgtgtcatgaaatttgataatcattggatgtggaatacgaaatgtcaattatggctgaaacttctattagtacttcagatctatatgtatatatagcatatgatgacaactgtagatggaaaaatgtgggctgga

SEQ ID NO: 37639 - DNA, 321 bp, Glycine max
  unsure (1)..(321): unsure at all n locations
  Clone ID: PAT_MRT3847_13398C.1
gtgtcctcgggagcttagcgcgaggtggaaaaggtggcttgtggttttggtggtggtggtggtgattttaggatctcttggtaattggctaatggcgtggatccggaggaggggaacaggattgggaatgaacatgttaagagagggcactttaggggaggcgttttgggggtgtgaaccagcaattgcaatgnntnccggaaaatgcgcttaccggagccccctgtgcggggggtttgaccggcttaggacggttgccttatgnggtgaaggtttgcgaggaggctggggggttggatcctaattatgggagggcggatt

SEQ ID NO: 37640 - DNA, 739 bp, Glycine max
  Clone ID: PAT_MRT3847_133990C.1
ttccgaacatgactctcggcaacggatatctcggctcttgcatcgatgaaaatcgaactcgctaggaacgagaacttgttcagattgacatacaccatgaaggaaggtggttccgagaataatgagacaaagcaagcttctgctgacgtgttgtttatttattcaaaatttgcgatggcatgcattggatgtaaggttcgtccgtgtgatttgaggtttcatttgatgaaggagatttcgggtatgccctcttctttaaatagggaatcagaatagaatgcagcatctcctgatgcaatgggtgagtcatccagcacaggaacagcaagatttgacagaacagacagttttcgcgcactatagttgagagtggactgtgaccatgtattttttggttgggtctgtggcatagtaggtgtttgtgtcttggtaaaagcacttttgtcctgcataaatatcatattatgatgttatacatgtaggcagaattatgtttccaattaccatctatgcaatggctcacagattggtatttatgataccacagtcagtcagtcatttcattttaaatttgttgtagtgtagttcaattttggcccattttagttagtaaatgttgctcatagtacttctatctggctcgagtataattactctcataaaggatgtatgtagtattgtagtcttgtaccaaaaaaaataattattagtaagtaaatgcatgtgttcattgaatgtt

SEQ ID NO: 37641 - DNA, 165 bp, Glycine max
  Clone ID: PAT_MRT3847_133991C.1
ggctatcgttcgatggcagctaatgttcgatttcgtgaagaaaaacaactcctttgagtcgggcatttgaaaatgtgtaccgatagcgatcaaattcagtacatatagcatcactctctacatcctaacttcattcaagaactctgatttgtcaaactataaaac

SEQ ID NO: 37642 - DNA, 1755 bp, Glycine max
  Clone ID: PAT_MRT3847_133992C.1
ccccatttgtgaaaccatgaagtggccaacatggaagtccaagtccaacaccatggcaatatctgtggtgtttcttcacctgagtttctccatggaggtgttctgtcacccttctcatgcagacacaattgctgcgcttcctggccaaccccacgtaggctttcaacagttctcaggatatgtcacagttgatgacaagaaacaaaagtctctcttttactattttgctgaggcagaaactgatccagcatcaaagcctcttgttctgtggctcaatggaggacctggttgttcttctctgggagttggagcattctcagaaaatggacccttcagaccaaatggagaatttctgattaaaaattattatagttggaataaagaggcaaacatgctgtatttggagacaccagttggagtggggttctcttatgctaaaggtagctcctcctataagactgtgaatgatgagacaacagccagggacaaccttatattcctgctacgctggttcaacaagttccctcaatacaggagcagagacttgtttctaacgggggaaagctatgcaggtcattatgttccacaacttgcaaagctcataattgaaatgaacacaaagaacaagatattcaatctgaaaggcattgccttgggtaatccagttctagaatatgccaccgacttcaattcaagggctgagttcttctggtctcatggactaatatcagattcaacctacaacatgttcaccacagtgtgtaactattctaggtacgtgagtgagtactatagggactcggtttcgcctctttgttcaaaggtaatgggccaagtgagcagagaaaccagcaaatttgtggacaaatatgatgtcacacttgatgtttgcatttcctccgtgctatcacaatccaaggttatttgtcctcaatcccaagaagcaaatgagagcatagatgtgtgtgtagatgacaaggttacaaactacttaaaccggagagatgtacaagaggcacttcatgcaaagctcgttggcattcgcaagtgggatgtttgcagcaacatactggactatgatatgctaaacctggaagtgcctacactccctgttgttggatcactgataaaagctggagttaaggtcctaatttatagtggagatcaagattctgtaattccactgactggaagccgtaccttagttcagaagttggcaagacaattaggactgaattcaacagtcccttacagagtatggtttgaaggccaacaggttggtgggtggactcaagtatatggcaatatcctctcgtttgccactgttagaggtgcctcccatgaagcccctttctcacaacctgaaagatcacttgtgctattcaagtcattcttggaaggcaggcccttacctgacgctttctgacacaccctttgtgttttcacatttagtttagattgtaagtaagcatagcattatccttaattaataacatatcattagcaaatgaatgtattaactgtgcagaatgtcaaaagaaaagttgggaaaaacattttttttttttgggggttttcaacctctgtatgtgagtttttgtgtgcttggttgttctggagctgtcaaatgtaatggacccttgggttgaagagattctgtaaaaatgttgtgagagattaccgctgcgttcttcgatataaattctaggcaaacaatgaggattatactgttatgtaaattctgcccctgcatgc

SEQ ID NO: 37643 - DNA, 148 bp, Glycine max
  Clone ID: PAT_MRT3847_133993C.1
cgacgcacgcgtacggacacgcgtccgcccactcgtgcgactataatgggctcaactgaaaccatatggaccgtgggtgtcatattggcatcacgaggacactgcagcactcaaccgcctaaatctcatacaccagaccaatgaacaa

SEQ ID NO: 37644 - DNA, 248 bp, Glycine max
  Clone ID: PAT_MRT3847_133994C.1
aataaataaatagtttttttttgtagaacaagatttataatttcacactggggggttttttttaaacgatttttcctaaagacaaaagctcgaaaattgcaaacctatgttgatcagatgatgctcccagaaaaaaccgtttcgtttccatataatgatacgcacgcccccgaaatccgcatgcttccatcaacaccgagtaaaagacacaagcatgctttggcctcactatttagaaagacaatgaa

SEQ ID NO: 37645 - DNA, 359 bp, Glycine max
  Clone ID: PAT_MRT3847_133995C.1
cagtaaggcggcagtaaaggagcgaaagggggccaaaaaggggaagttttcccaatccaaggttcccggagccacttaaccaaccaaccctccttacaaattcacttacagttccacctccacgcgcaactgccacgatcatgttgtccggattcaccaacctgctccacgtcctagccctgctaaccggtttatgcaattgcagggtaacagcatcaaatggcgacgtgcacaccctagacacaaacactcacttcatcccacaagtccgacacctccgaatccactcttcctcgaagcggttcgaatgttcctcagagttcgtgatcctcaaagatgacatgggacctgtgctatcg

SEQ ID NO: 37646 - DNA, 565 bp, Glycine max
  Clone ID: PAT_MRT3847_133996C.1
accgctttagatgcttatgctgcccttacacatacacctaaccattcaacccttctgcttcttcttctctctacctatcgtacacatgtgcctaatattttattattaaaggcctaaggccgatagtattcttacccatataaaccttcggtgatcaatttaggaggacgagtaaattcttaaactgggtgaattgcatgtgcacaaaaaatggttcatgatgattatggacattaaaaggcttgaacttaaatcgggcattgttgtatggtgaaaccagctgttttcacaatggctgcacaggacctccaccctgtgataggacaacaccataagtaggacacatgctttgctccataaaaacatattcacaatacattgcctcctaataagacgcttactataaatgcctaaaaatcactggaacatatcgcaaaacacaggcccccatgtctataccaacggagaagaatcaggcgaaacaaggtcaagcccaagatcgctcaaacgatcattcatggccggatcatctgtaccatcatcatgaagaccatcaggatcctac

SEQ ID NO: 37647 - DNA, 355 bp, Glycine max
  Clone ID: PAT_MRT3847_133997C.1
gaaggcccgtagacgataatcccaacagcgtcttctgttcatttcattcttcttggttcgcattacaagctttagcgccaaaattcaactttggttcctatctgaaattccacgcattcctcgttctgcattccaatttcttttaaaatttacattttcaaattcttttccagcttaaagtgtaaagaatttaaaactatcactcagttctcgctcgcgattctctcactctccgttcgacgctcgctatcctcgctacgactctctctctctctctctctctctctctcgcaggcgcggtggttcaaagagtctctcatctctgcaatttaactgaaatgagatgcaatgcatg

SEQ ID NO: 37648 - DNA, 231 bp, Glycine max
  unsure (1)..(231): unsure at all n locations
  Clone ID: PAT_MRT3847_133998C.1
ggtacgacctgcaggtatctcggtccggnnaattcccggngtcgacccacgcgtccgcttacttctggaaaatttttagtgggaaattgattaaaaatacattcccaaggaaatatcatttctcatgaatgttattttttaaaaatgcatatcaaacatggaaaattaagttttcaacctatgattttcgaaaaatcaaaaaattctctcctactaaacgtccctgtagag

SEQ ID NO: 37649 - DNA, 283 bp, Glycine max
  Clone ID: PAT_MRT3847_133999C.1
ccacttctcattcaaaccgcttccttcttctacttcttccttttcatcaccccgaacattcacgactctggccctcttcatatctaagaccaaagccgctcctgttaacactaaggatacgaagccaaagaaagacgttgaagatggcatcttcgccacttctgcaagatctgcctttactacacagaacaagctctttgcgggtcgcgatgctatgcttggaacttctccttcactgctgcccgaaggaatatctgtccaaacgacttctagcgcactagaa

SEQ ID NO: 37650 - DNA, 1328 bp, Glycine max
  unsure (1)..(1328): unsure at all n locations
  Clone ID: PAT_MRT3847_13399C.1
gcgcccacgcgtccgcccacgcgtccgcccacgcgtccgaaatgaaagaaagagacatcttttatccaatatcgaaggatttgaaccaagatttccaggtggataggatagggtattcgtatatctgactcatgatttaaatatatcagtttatcttcgaaaaagggaaaaatggaatgaattgatcgcaaattattataagattttacgatttcgaattcccttaaggaagatatacaaaattgtagggaaaatagaatctccacgacgacaacaaaaccttctaatattatttgagaataaaaatgattgttataacccataaaaggatttttgttagaatcgttagtaaaaatgatgaaatgagtctgttgatacattcgagtaattaaacgttttacaattagtaaactaaatttattgttataaccgacattttctacaaaaatggacccatgaccacaagctagtccgtaaatagattcccggaaaaaaagagggtatagggtgtcctggtgtcgagatctatggagttctaaatatgctcgagattcctccatttaaaattaaaaaagtctatttagtcaaacaaagaatcagagattcattggattatcaaatgatacatagtgcgatatgatcaaaacagggaattataggtatatgtatatatacctacaaaacaagtaaaaatcatcaacggactctctctaatcgcttttccacctaatttttgttctaggataacaagctagttaggaatcctttattttttttcaacctaatcgctcttttgattttggaaaaaatatctttatcaatatactctttcttttacacatttatcgctacccaaaaatataatggaaaatagctatatagttaggactcataacaaaaataaataatccattcaccggaaaagcttttcccatatcaagcactaatatctttttaacgtacaattagatggggtaatcattcaaataaaaaaaatgaaagctcgttgctttttgtttccctattataattggagtcaccaagctctatccctttattaattaaacccaactgaatttttttgttccgagccaagaattcacaaacaaaaattctggccggatcctataagagaatgaaatatttttagaattcttcatcgatacgacatgctactttttccattcattcctttatggatcagtcgtggttttacaagctctaccaatggtatggacgaaccgattgcttcatagaaatgtgtaaaaaatagaatcgctccccttctgtcgtcttctcgcagccgtatagncaccccaaatacattt

SEQ ID NO: 37651 - DNA, 837 bp, Glycine max
  Clone ID: PAT_MRT3847_1339C.1
atcctcactctctattttgattctgtctcgaagtctctctctctctctctctctctctctctctctctgtgtgttttttctctctcgatcaaaacttttgaacagttcaacgagtcgattgttaggctgttgctctgatctggagtttgatcaactgtacctaattgaccttgaaggatgagtgaacttctttttaatgacattttcaaggtcgagaaggtagaccctgatggtaaaaagtatgacaaggtttctcggattgtggcacggagtgagaagtgtgacatgtacatgcttctagatataaataccgagatttatccgatgggggaaaaagaaagattcttgatggctttgtctccttcacttgttctgaatactaaggatggctcggtgtcaattcaagacaagtttgaatacatcatgcatgggaggttatataacattacgaaaccccagcttgaagagaaggaatgctcgaaacctcagcttgaagtggaggtatatgcatcgtttggtgggcttcagttgatgctgaaagggcatgcttcccattgtgttaagtttgcagtcgatcagaagttgtttttactaatcaggaaggttgaaagttgatgttggtgatgggcctgaaaagaaaaacatgctagcattaatttataagtaatccgtataaaataaattgatttttcagaagaatgacttttgtgttttgaatgtttatctaaagttagtctttttttgtatattggataaataatttaggcatgtacttactgaaagattttgcagttgaaaattattttaatgtccacttttatttattaaactgaaaaa

SEQ ID NO: 37652 - DNA, 1238 bp, Glycine max
  Clone ID: PAT_MRT3847_133C.1
gcacgaggcaacgcatgccgattttgcggcttcgaatgattctcgtccccttgccggagttcaggggcaggttgagggcaaagctccaactgttggagtgggaaagtgcaaggtgcctgtccctgtcctcacagattctctttggcgcgaggacccccggccaacaacagctctctcccccttatttgatctgtccggtttcgcggctcctacaagaacttcgctgataattaattcggctctagcatctgtacccccgtcaagttatcgattgggtgtgaaggcagcaaacctccatcaactatttcccattcatgtaactgaagctttgaaacattcacttgtaacatttgacaaggagttaccaggatttatctgcaatgatgctctccttcatggtgtagagactaggactagttccccaatccaaattccacgcaatggtgacacttatgaatgcacttcggtaaaaggactatatccagttggtgaaggagcaggctatgctggagggatcattagcgcagcagtagatggaatgcatgctggttttgctgtggcaaaaaaattcagcttgtttcatggagatgttgagtctgttctgggcaaggctcaaaatgttggagttgtcaagtactaggaagatctaagtttcttcagacactgtctttggtgggaggaacgccaacttaaacaagttatcttctacatttttgagttgtcagtttcagcttgtcgtggaagaacatcgatgataattgccacatctctctctgtcatatttgctaactaggttgtcttactggaagttgatacttgtagcaaggacctgtgaatattggactctgtggctgcaatttaggaagatcacgaatttgacaacattaatgtggctacccatgatatatagaaacatagaatgtagtattttactaaagcaattgtagacggtggcaccattaaactccagacgtatggtcaagttctcagtaatgcctatgtacacagttttttattgaaaaaacatggatctatcatagtaccggtctgctcaatgtatttacaaccgaatcaagggctgttgaactagactcaatttttttattttttttatagaaattccatctttcttctccatgtatccctaaaactaagagcaactccaacggaagagtttctcctgacatgtaacagtaaaagaaattgtttgacgtcacttttcttgtgggagagaaact

SEQ ID NO: 37653 - DNA, 225 bp, Glycine max
  Clone ID: PAT_MRT3847_134000C.1
cagctcgaaggccatcatctctgtgtaccaatacttcattggagactcttacattacatcatcagacttcagctgctactgatgatgctgctctcctacatgcatccacggtatgttctcctgctatcctggagcttgtagctactactggatcgtcaaatggctctcctctcaagaggtcgatcgagcataatatgatggttaccatcctgctgtcgtctcatg

SEQ ID NO: 37654 - DNA, 1491 bp, Glycine max
  Clone ID: PAT_MRT3847_134001C.1
ctttctgtcgctggccaatggtggaacttcggcatgggggtaatacgttcaatttggagtgtggctgcaaaggtgagctctcattggcacactgaggatcttgagtcaaatggttcatcatgaaaggtaatggagcatccgatgtgtgctcgcatgaagttcaggatctacctgtcactcttttacgagttcaaaatggtctggcacaaaatggtctggcacaaaatggtctggcacataacatgctaggggctgatgcttctcgatacaggtgtctaatatgggatctggtactatagtccattgtctcgcattttcatgtgtattgggttctcttgcaagctttacagctacagtaatggtgaggagaaatcatgtatggattttggcaactattggatctggtgctattgccatgtctctcccattttcatgtatattgggtcttcttgcaagcatgacagctacaacaatggtgaggagaaatcatgtttggatttatgcaactgttcagttttgtctggtggttcttgctggacatctttttttctcattggttcatatgcaagctgttctagctatccttctagctacatttactgggtttggagtggtaatgtgtggagcttctattcttatggagattttgaagtggaggggaagatcacttgctcaatcgaatcaacagcaaggttcccaagaggcaataccaccacctgatcaatcatctacagttgctcatcaacctcagattggttctgaacaaactgaaagtaatttgggagagtctcctgcacagaggagttgacagaatataatatgacttgcttttagtctctatttaaattttaatcagttttagtccctacatttaatataaaaaaaaaaaaccatacttttttatgtccctcacatcaagtataaaaaaatatgattcttaataaaataaaataaaatagaaattaattttgaaacaaaaaaggttgtattttgagggataaaaatatatttaagttatttggtgaatgctggcatcgtaaagctatctggctgtacataatgtacatattgtatagacaggtttgggcacattaaactcttgttctcctttttgatgccatgatacataaaggaatagacacgtatcatgtatggcatccatcattccgttgttccctctctcattagaaaaacagacaccaatacttatacgagaattgctcggccactgttgcttggtgcagagtttaagaaatgttgtttttatactacaataatggatgaagccatgaatcttcacattcaaatttagtccatcatgtgattgataacattttgttggtagtgcaattctgtaagttgtcctcttgaagaacaggaccctatatatatatatatcctcatttagtatatattttagatttttcatagaacaaaaaagaggcaaagacactgtcttcttttgcggaattcaaagctattattttgctc

SEQ ID NO: 37655 - DNA, 390 bp, Glycine max
  Clone ID: PAT_MRT3847_134002C.1
cttgtggagacagctgactttgcaagggactcaaatgacagcattgcagcaccatcatctgacacataacaggatactttatccacaggatagtccacagcaagaatagaaagcactgtattagccgtgatcaatggtggttctttcagaggatggtgctgcaatgctgtcatttgagtcccttgtggagacagctgactttgcaagaaagtgggttccattttgcaaaaagttttcaattgaaccactctcagcttcattttatgtgtttatcttaatatttatcatctataagtctattttttacctttttattgtttatgtatcttttttttagcttttatttattttttatctaatttattttttctacttttatctcttttttct

SEQ ID NO: 37656 - DNA, 529 bp, Glycine max
  Clone ID: PAT_MRT3847_134003C.1
cttttattgagtgcgagcaccacaaggggaagaagaggaagatcttccggcaagtgttctggtgcttagtggtgttccttttcatcgagctggtcacaattcttttgatatgggcaatccttagacccaccaaacccaccttcacgctccaagacgtcaccgtctacgccttcaacgccaccgtggcgaacttcctcacttcgaattttcaggtcacgctcatctcgcgtaacccgaacgaccgcatcggtgtttactatgatcgcctcgaaaccttcgtgacctaccggagccagcaggtcacgtaccgaaccgccacctctacgtgcgctgcccggcgttcatcagctttggaccccgcagcaatggaatcgtcgtcggagagaacgccatcaagttccagattatccaacggtgctccgttagcgtctaaacttaatcttagacaagaaaaatgttaataacatattttctaatacactcttttaaatatgtttattagtgacggaatttagtgatgtattgcctt

SEQ ID NO: 37657 - DNA, 447 bp, Glycine max
  Clone ID: PAT_MRT3847_134004C.1
cccacgcgtccgcttggaatgtcagaagctcagcttgtttcttctcctcaattttccccacaaaaattttctccattctttcacccttttggtgagataagaaccttgaattctgtgagggaattgcatgcccagattatcaaaatgccaaaaaagaggaacttggttacaatggatggaagcatgatgagaaactacttgcaatttggagactttgagtcagcaacaaaggtattttttgtgggttttgcaaggaactaccttctatggaactcttttcttgaggagtttgcaagttttggaggtgattcacatgagattctggcggtcttcaaggaattgcatgataaaggagtgaaatttgacagtaaagctctcactgttgttctgaaaatttgtctggctttaatggagttgtggcttgggatggaagttcatgcttgtctg

SEQ ID NO: 37658 - DNA, 1320 bp, Glycine max
  Clone ID: PAT_MRT3847_134005C.1
cggctcgagacatcctccaaatacaagtttacattgcaaataacgcaacaccaaactcgcccacaatacacacattttatttctcagaagcgtccaccacaccgaacctcccaattccttcacacccaccataataatatctttattgttcttttcttctctggtaccataaaaaacacacacacacacaacaacaacaacaaaagaccatgtcggagtgcgagcaccacaaggggaagaagaggaagatcttccggcaagtgttctggtgcatagtggtgttcctcttcctcgtgctgctcacaattcttttgatatgggcaatccttagacccaccaaacccaccttcaccctccaagacgtcacggtctacgccttcaacgccaccataccgaacttcctcacttcgaattttcaggtcacgctcatctcgcgcaacccgaacgacaacatcggtgtttactacgaccgcctcgaaatctacgtaatctaccggagccagcagatcacgtaccgaaccgccatccctccgacctaccagggccacaatgagatcaatgtttggtctccgtttgtttatggtaccaacatccccgtcgcgccgttcaatttcctccgcctcagccaggaccagagtgacggtaatgtcctcgtcaccatccgagccgacggaagggttcgttggaaggtcggcgccttcatctccggtcgctaccacttctacgtccgctgccctgccttcatctcctttggcccccgcagcaatggaatcgtcgtcggagaaaacgccatcaagttccagataatccagcggtgctccgttagtgtctaaacttaatctccacaagaggaatgtcagtaatacatcttctaatacactcttagtgacggaatttagggatgtacattattttttcgtcactaatcctacttcacaagattagtaacgaattttcaaaagttatatataaaatatttcgtcactaaaatttgttgaaaattttaaaaaattatgattgtttcatatatgattttataattttcaataaatttaaactaatgattaaaatgtgttaaaaggagtttattgtagagtgtcttgttgaaacttcttgcatgtttgtatatttcttcttcttcttccactgttgttattgtacgtgtaacttgtgtacgaattggtcactagatgtttgtattttacgttttgctgtagaaatgtgaaacagacgaaagagtctgagatatagcaaaactacaagatgcaacatgtagattaaatgtaattgagctacgatggcaataaaatttcttgtttc

SEQ ID NO: 37659 - DNA, 1215 bp, Glycine max
  Clone ID: PAT_MRT3847_134006C.1
cggctcgccaaccgagttaactcactaacaatcacatggcttctgaactcaccaaactgatccttccatggaaagttcgcttactcatttccctcctttccaccctcgccgacacctctcgccgctccaacgccaccatcaaccgccgcctctttaacctcgctgaccgccagtcactgccaaaccccacccccgtcgacggcgtttcctcctccgacgtcaccgtcgatcccgcccgcaacctctggttccgcctcttcgtcccctcctcttcctccgccaccaccctcccggtcttcgtctacttccatggcggcgccttcgctttcttctccgcagcttcaaccccttacgacgccgtttgtcgtctctactgtcgctcccttaacgccgtcgttatctccgtcaactaccgcctcgcccctgaacaccgctacccctcccaatacgacgacggtttcgacgtcttaaaattcatcgaccgaaacggcagcgttttacccgacgttgctgacgtcaccaaatgttttttagcgggtgatagcgcgggtgcgaacctggcccaccacgtggcggttcgggtttctaaagagaagctacaaagaaccaacattatcggcttagtttcggttcaaccgtatttcggaggagaagagagaaccaaatccgaaatccaattaaaccgggcacccattatttcggtggacagaaccgattggcactggaaggtgttcttgccaaatggatcggaccgggatcatgaagcggttaacgtgagtgggcccaatgccgtggatatttcgggtttggattatccgaatacgattgtgtttatgggtgggtttgacccgttgcgtgattggcaaaggaagtattatgagtggttgagggaatcgggaaaagaggtggagttagtcgattatccaaacacgtttcatgctttttactttttttctgaattgcccgaaacttctctgtttgtttatgatgtcaaggagtttatggccaagcaaatggccaatgtgaattgaagggtattttagtacgttaattatttgtctatgttgtatatgaaggttggaggaaaaaagggaaggacatgtaacatgtattgtatgcaaatagagtattgctatgatggttgcgtgatgatatcagtttgataaatgataattgctatgcataagaaaaaagagataatttattattcaaaaa

SEQ ID NO: 37660 - DNA, 1568 bp, Glycine max
  Clone ID: PAT_MRT3847_134007C.1
caacacactgttctgctgaaacttcctcctcagcaacctgctgcagcctccgccctccacatcccatccccgcctccaccattcatagcacgatcttatcatcacatcctccgaatacaaaagtttaccttgcaaataaatcaacaccaaacgcgcccacaacacacacacagagacatttttctttcttagaagcgtccaccacacggaacctcgcaattccttcacacccaccataataataatatcttcattgttcttttcttctttgttaccattaaaaacacacacacacacacaacaacactctgaaactaacaacaacaataaaagaccatgtcggtgaaggagtgcgagcaccacaaggggaagaagaggaagatcttccggcaagtgttctggtgcttagtggtgttccttttcatcgtgctggtcacaattcttttgatatgggcaatccttagacccaccaaacccaccttcacgctccaagacgtcaccgtctacgccttcaacgccaccgtggcgaacttcctcacttcgaattttcaggtcacgctcatctcgcgtaacccgaacgaccgcatcggtgtttactatgatcgcctcgaaaccttcgtgacctaccggagccagcaggtcacgtaccgaaccgccatccctccgacatatcaaggccataaagagatcaatgtttggtctccgtttgtttatggcaccaacatccccgtcgcgccgttcaatttcctcggcctcagccaggaccagagtaacggtaacgtcctcgtcaccatccgagccgagggtagggttcgttggaaggtcggcaccttcatctccggccgctaccacctctacgtccgctgcccggcgttcatcagctttggaccccgcagcaatggaatcgtcgtcggagagaacgccatcaagttccagattatccaacggtgctccgttagtgtctaaacttaatctcagacaagaaaaatgttaataacatattttctaatacactcttttaaatatgtttattagtgacggaatttagtgatgtattgccttttcgtcactaattctaaagttacaaaaactttagtgatgaatttttcaaaagttacatatgaaatatttcgtcactaaaatttattgaaaattaaatctggaaaattcatggttattttttttatgtgattttatagtttttaataaatttaaactaatcataaaaaatgtgttaaaatgagtgtaataaagaatatgttattgacacttgtggtatgtatactctactcgatccgatccagtgtatttttataggtaccaatttcttcttccactgttgttattgtacgtgtaccttgtgtacgaattggtcgttagatgtttctattttacgttttgctatagaaatgtgaagcagacaaaagagtctcagatatagcaaaattacaagatgcaagatggagactaaatgtaattgagctacgatggcaataaaatttcttgtttcaatttggataacaaatgagatgagagtgtgatgaaacgtccacacggtgtcgtgtatt

SEQ ID NO: 37661 - DNA, 469 bp, Glycine max
  Clone ID: PAT_MRT3847_134008C.1
gccgtgggaaatagctcctggagagcactttgtggcgcaacgagttcttggtcatcctcctctaaaaatggaggttcgaatcaagatcctctacacttcaaactgccactttttttttaatggttgacaaggcgataatgaagctcaaagtgcatatcctcggactttctaccacgaagcttccaggagtgggaacagcgagcttgaatgagaatatgacatgatataacgggacttgatgatgacaatgtgctgtgaggaatgtggggattgcaaatattgcaagtgtgagaaaaccaacatgtgagagagatttgtcgcggatcctatgaagaacgggatggctaccgatggtagccctagggtttctaccatggatggaaaacccaacttccatttcttgaacacttcaactatcaccggagtaaccgcgggtggacccaccatgcgacctcccacattcccgctg

SEQ ID NO: 37662 - DNA, 588 bp, Glycine max
  Clone ID: PAT_MRT3847_134009C.1
aggtcaaaaggaggtaagagttctgtcagatgcagatgcttctgttttgatacaagctgcatatcgcggacatcaagttagaaaatgggaagcattgaagaagttgaagcagatagatgaagtcaggaaggaggtgactgatgttcgagaccgtgttcaagcctttgagagatcttctgatcttcaaaatgatgacaagcaaaaaattgcaattggagagaccattatgagactcctgctgaagttggatactatacagggtttgcatccaagtatcagggagatcagaaaatccttggctagagagctgacaattttgcaagaaaggcttgattatataatggccaagaaacctcagcagcaggtgcaggatttcaatgttcaggaacatgttgaagtcactccaatgaatatgcagaatgaagaacaagttgctgtaccagcagactcagctgaaggcattagtgatgatgcaaaaggtccttgtgctaatgttggtggaagtgaatcccagtcaccagttgatcctacatcagataggggagcagagtttgtttgtgcttccgaatggctcgcatagtgatgata

SEQ ID NO: 37663 - DNA, 341 bp, Glycine max
  Clone ID: PAT_MRT3847_13400C.1
agagacgtacgaaactgtggccaggattttattcatgaattaacatgcatgatcacagtgtcgcacatacccgggatatagtacatcacgtacagatggttacaataagactactgaggggaatgagaatggtcccattatgtgttgcagaggtgtcaacgacagtatggattacatcgacagcacccaatggggaggtttataactattcacgatgtgggaacacgttcaattgctaccatgcagttgcgcgacaatttatagctggctgcttaagatatcgagtaacaaaaatgcacgtggatggatgttgcttcgagcctgcttctattatgaccagg

SEQ ID NO: 37664 - DNA, 383 bp, Glycine max
  Clone ID: PAT_MRT3847_134010C.1
cgtccgaacagaagtgagaagacgagtgaacgggggtctctgtgtagatgctgcatcctttcacagagctgtctcacgcccccagcgttcatgcattgtttcaccccttttcttctcctcacattctcctgaacttccttcttcatttcatcttcgtttatgtctatgccacacgatgacctctcaaacttcttccttctcatctcatccgccttgactctgcgacaactctctacagcgaccgtcagcgtcactgatccgcgattagtcgtagtctcatctgaacatgttagagatcttcaaggttttgtatcctagagatggctgaatctcacttattgattgatctacaccaggcctgctcttgagcttaagatctatgc

SEQ ID NO: 37665 - DNA, 148 bp, Glycine max
  Clone ID: PAT_MRT3847_134011C.1
cccactcgtccggaatcctaattcactgttttacattatcgaccttcatcatcaattgtaaggtttttaatcaagttctatcaatatacaaaacatattatcctttaaacacaaatacagtacattacctattattgctaaacccatt

SEQ ID NO: 37666 - DNA, 789 bp, Glycine max
  Clone ID: PAT_MRT3847_134012C.1
ggctcgagcaaaatctctaaagtctaagcaaagaaaaaaatgatccttccctcttcttcccttttattcactctcacaatcctcttgtgttctttcctttcttttgtttgtgccaaccgtctcatccaacaaacatgcaagaattgctcaaaaaatgaccccaacataagctacaaattttgcgttacatcattccaatcagaccataggagccactacgccaaaaacctccaagaactaggactaatctccatcaagataacaaggcacaacgtgacggatactaatgctcatatcaatgagcttttgaagaaaaacaagagcttggacccatttatcaaagaatgcttagatgattgcgttgaagtctattccgacaccatttccacatttagagaagccattagagattacaaggcaaaacgttatgccgattgtaatgtcaagctaagctcaataattgatgcctctacgacatgtgaagatggattcaagcaaaagaatgatgccatttcgccactaacgaaaagaaacaaggatacctttcagctttccgctatagcactttccattgttaacatgctcatcaatacggataaataaagggtgtatatatctgatcattatataatggttaataatttgggtgtttaatatatttttttcctaaatcaaagatcatgagtgtttttcaatctactcaattaaagaataatcttattggtggtggtgtatgattctggctgactcaaatatttatataatatacttttataaattgttttgctt

SEQ ID NO: 37667 - DNA, 359 bp, Glycine max
  Clone ID: PAT_MRT3847_134013C.1
acattgttccaaaatctggcaagtttgggacgattcatgttgactttcatggtcattctcgaagtgctccttctcctcttgaacaagtcgtagtatcccatttgatcaacttgctggtcacaccaagctttgtaccattctatttcggccctataaggcacaaactttgataatgtaattgctaagttagcagcattcttggttggtgatggacccatcctccttgtcatcttaaggcactccttggcaggttcgatttctgattcctatatatagtagaatggaagttatttgttcagtgaatctccttcttctagtgaaaattatgaatcatgtgtatagctaataataatattact

SEQ ID NO: 37668 - DNA, 248 bp, Glycine max
  unsure (1)..(248): unsure at all n locations
  Clone ID: PAT_MRT3847_134014C.1
aattcggcaccagcttcagcgaaggtaaacccttttgcttatgtttcatattttttcattttttctgttcaatgagtggctttttttgtttcaatttcaagattattggcgtgcaccatgttttattcatttcagctaaatcacttgactctaanttgttcagtatgtgaagacctcaaaaggggcgttatttttatttttattatttgtngatatagttgtttgacgaaaatgtctgcatgtatgta

SEQ ID NO: 37669 - DNA, 425 bp, Glycine max
  Clone ID: PAT_MRT3847_134015C.1
atatacattagtttttattttcagatcgcaatagcgttctagatcttaccaaacaatcccggttccgatctccaaagctaaaccgacatacaattggccaccctatccaaaatatcaaaaactctacccttgtctatgcaagtgaacttctccgccgtgcctacaacttatttgattttgttgacaaatacaaaggcaaaagtggcaaaaaaataagaggagcccaaccttttgaataattcactattggtgcaatggaagaatccgttctgtgctgctgaccggttgtaacctgccccaaacaaccgctattatcttcgatggcctaagaagaaaaagaaaatccctcgccggaactggaaggaacatgactgaaacactttgggatgtgaacattgctgtggttcaaacattttacacaaaaa

SEQ ID NO: 37670 - DNA, 326 bp, Glycine max
  unsure (1)..(326): unsure at all n locations
  Clone ID: PAT_MRT3847_134016C.1
cgggccgccctcgcccttttttttttntttttttattagaacccgggggtttttttggatttggcaaattaaataccccattcccagccgtccttaacacatgagtggggccttttccaccttaaaagcaaaggataccattggcccatgacccaacacatgccccacctaataatcataattttacatctttccatccaaaatacaaagactttaatttttaaaaggaagaaaagagataaccggatcatcttaatgaaatgaaaccaaaacccacaaacattggcttgatttttgttgttgttgttgttccccaacttgattaa

SEQ ID NO: 37671 - DNA, 301 bp, Glycine max
  Clone ID: PAT_MRT3847_134017C.1
ggtagtttcaggttttcttttccttcagtttcacaagaaatggatagcacttttcactttcttcagtacgttctcactgcgatatggctcgtgagaggcatagggatcgcaattccagcggtggcaaagggctacgtatccagctcgccaccaaggacgctcggaattccgctccggcgaccggatgagtgtagaaaccctaccgcttcatgcccggatgcgtgtcgctgagggaaatcagaaggtactagaagatgactgagcttctcaacaggaaccttccatttcagaggtcttgtga

SEQ ID NO: 37672 - DNA, 153 bp, Glycine max
  Clone ID: PAT_MRT3847_134018C.1
ccaaaccaagccgtctgttcatttccgatagaagccatggataggcttctatgttcttgttcttctgcccttaacaccagtctcaagcccttttctcttgtccctcgatttgactccgtcagattcaacccttactcagcaacgcgctgttcc

SEQ ID NO: 37673 - DNA, 308 bp, Glycine max
  Clone ID: PAT_MRT3847_134019C.1
ttgtcctctgacgcgtgggtttgaatcaacaggtctcttctttcaatttcaaccaacaagagtgtgaatggatgaggtgggaaggaaggagagtgagtatcaaattaagggaggaggagataatgaatacagtttgagtatgagcgtggtatgtggtgtgatcaatactgtagactgtagaggtagacactacaatcctaacgtggatggtggtaccagagcttatgttattgttcttgttctttaggcatgtgtaatattggtattagttgaagtgggaaacaattttttaacttgatgaattaatg

SEQ ID NO: 37674 - DNA, 565 bp, Glycine max
  Clone ID: PAT_MRT3847_13401C.1
gaattcggcaccagaattagtattcttaattactctttccatttccatatcctagctagctacaaatatatattatggttttagttctttaaggcatcaatctgcagcatagtcatgaacaagaagaagaagaagaagaggttcgtggatggcactagtggtgagaaaaatgccattgcaactcatgtggggtcagtgaagattcattttcaacctcaccatgggtataagatatgattttgaggacgaggatcattgtttctggtggagaattcaccagtggaggaagattaatttggcgtacatgggaaagccaggcatttgttcatcaccctctcatcaacttgttctttaattttaatttctataatagtaataatatttatttgtgttgcaagttgcaattgatgatgatcacttatattttcactctcgttatatttttgtcggttcagtaagtcttagagatagttacagctagaagacatttgtaaacggttttaggacatcatggtcgtcaaattaaaaacagtgaaataaaatttgtggctggttttccaagtca

SEQ ID NO: 37675 - DNA, 299 bp, Glycine max
  Clone ID: PAT_MRT3847_134020C.1
gggggttaaataaatttttttcttcgttttctcccccccttttattttttataggtgtattccccccgtttttcgcggggaacaaaaaattccctttccagttaggttgtttttcccgttgccccacccaaattttgttttttgggccaaaaatttttggtttttccgaaggggtttattgggtctcccctatgccaccttacagttcttaaaactgttccctcagaaaaaccgaaaggaaaacattaatccttatttgctgggcaaaaaaaccttcggccgcattccaggtttaaggc

SEQ ID NO: 37676 - DNA, 198 bp, Glycine max
  Clone ID: PAT_MRT3847_134021C.1
tcgcgtcgcttacaacccgatgatctctaccacttcgcacttggctactgacatatcgcaagcctctggcaatgatgtctatgttgcacaccttttagagcctaagagcccctcaggctaacaggacaagccaatttgcagagtcaccaaggatgacctagtctccactcgctacgaagctcgccacaagattcccat

SEQ ID NO: 37677 - DNA, 191 bp, Glycine max
  unsure (1)..(191): unsure at all n locations
  Clone ID: PAT_MRT3847_134022C.1
gtcncgnanagctcgggaattcggcctcggagntntagttttcaaaaattgntanactttntgtattttgataacttaataanatncggtttaccgtatttgggtctggaatatccccgggatgtgtttaaagatttatatggaggcattttcctattttttntgcgtcaaaaaaaaaaaanaaagaagag

SEQ ID NO: 37678 - DNA, 500 bp, Glycine max
  Clone ID: PAT_MRT3847_134023C.1
gggggccacaaaacatgaattctacaaaaaacaacaggggatccaaaatacaaaagtaacacaatcgccacagcaaccaaaggcctttaaaatctccccagccataccctttttccccaaaaaaaattttttatccatataaaaaaaacaataaagggggaaaaatgaaaaaaccagcttggatttaagacttgctactaaaagcattatatatggggggggaaagggcaagcacacttggaaccacagctaggataatcattatcagggcaaaaattttggcttttctcggggaaaaaccttaaacaccccttaaaacaaaaaagccggggaaaatgaaggcaaggcacactggggatgaggatcccaggaactgaaaaaagtcccaaatatctgggattgctatagctgcaagggaggaaaatacaagccgccccagaggggggatcataaatcttttggtggctggggctagcaaaggctttttagggaagaaaact

SEQ ID NO: 37679 - DNA, 815 bp, Glycine max
  Clone ID: PAT_MRT3847_134024C.1
gccatttcctcaccatgagtctaagagcactatcttcagctcttgttacattggtttttgtgctgttgctgatcaaaatagagggaaatccaacaccaaaagaagggcatgagaatgtcactgatgcctcatctttccatcaacatcattgatggagctgaaagatgaaaaccaaatcattggatgcaggggaagaccacttatatgtagcagaggagagtttccaccaaggtctatgtgctgtggagaccgttgtgtggatgtgacttcagatagagaaaactgtgggttatgtggggttaggtgcacatttaatcgtcaatgctgcaaccgtttgtgcttaaacacaaatttgaaccttttcaactgtggtaggtgtggaagagtatgcccctttgggaggttatgcgtatttggatcgtgtgcctttgagcaagcagtgccatcaccaccaccagtgtcgcccgtgtcgccatcacggcctgtgtcaccgtcactgcgaccaccagtatcagtatcaccatcaccattgttccctccggtgttccctccggtgcctccagcgaagtcaccgcagccactggattaccaacctgcaatggattaagtattattgtaatggggtctcatggttacctcccccctggtttgaagtttgtgtttttgttattttacaataagtatttaagcctttaaggttttcatgtgcaactgtttgtgtttcacgatgttgcagttacatatgatgctttctatgttagtagaaaagcatgccaattttatatgagaaagaacaaagaacattattaccgagt

SEQ ID NO: 37680 - DNA, 115 bp, Glycine max
  Clone ID: PAT_MRT3847_134025C.1
agctccaactccgctcgacgctcagccgtcgagccattcgctcgagggtcggatgaagatatccaaaagcatgcacgtaaccaacttaaacctattattgaggccaatacgaggt

SEQ ID NO: 37681 - DNA, 330 bp, Glycine max
  Clone ID: PAT_MRT3847_134026C.1
agagcttcattatcttgctagagcctaaagcgtcttctcacggtaaaacaatatacgctagggcatatcgagcagaaatggaggcgcaatattacagaatggcagtcacaaagacaatttatactctgtattacagaactgaatggaaagatatatcgcaaacttatcttatttacacaggccaccttttcacatatagtgaccttgccccaaatctgggaccaccaccaaaacatttcaagaaccgccagctctgaaacagcctcctatggcctcataaaagcgtactacttgcacattcatgatgcgcgaatggtcatggctagggat

SEQ ID NO: 37682 - DNA, 750 bp, Glycine max
  Clone ID: PAT_MRT3847_134027C.1
tctaaaacccaactttctctctcaagaaccatcaaatctcgatcctcccctctccctgcaagatccggtggtggttccgattgcgcagtagggtttggtctagggtcggccaaggctggcgagtatttgggtgaagtaaatggcggattcgagtggtgcgagcgtggtgttgcggcagcggcggcggcgttgatagtgttacagtgcggtggcgattaatgttgtcttcaattttaattttgatttgagtgctatactcccactgcagatcacatatatgtcattggtttctctcttttttggttatcagataattgttccttttgtctgagctgaaagacttgaggacttctaaagatgttggcccttcatcctgcaaaaaagttatcatttaatcgaccaattaataatggggatttggttattgtttatgaaaggcatgacattatgaaggctgtaacagtgtctgagggatcagtcctgcaaaatcgttttggtgtttttaaacattcggaatggataggaaagccgtttgggtctaaagtagtcagcagtaagggtggctttgtgtacttgttagctcccacaccagaattgtggactctggtattgaaccacaggactcagattctgtacattgcagatattagctttgttatcatgtacttggagattgttcctggttgcgtggttcttgaatctggaactggcagtggatcgttgacttcttcgcttgcaagggcagttgct

SEQ ID NO: 37683 - DNA, 281 bp, Glycine max
  Clone ID: PAT_MRT3847_134028C.1
cgagaggagggtcaagagtttaaaaagtcggtggtggaactggaccggggaatttgacatggtttttgtgttcggtgatagtgcgaggctcatgaaaagaaacaacttctgcatgggttttggagcccagactcaagtcgtatggctgcttcaacagcttcttctctgttaacattattcattctcactctctgactctggtgtggtggtgtattattgtgcacgattgttatctagtttccattttattttatgaatatgtacatagctatgtttggatt

SEQ ID NO: 37684 - DNA, 319 bp, Glycine max
  Clone ID: PAT_MRT3847_134029C.1
ggaatcaaatcataatcatacagtggatggtagagagaaatcaacatccacatgatagcatttcatgtccattcactttatttcacacgtgaaattagctctacctgatacgctaataatttcaaatagtgaaaaataaaactaataggagtagtaataatattagttgcatgttcacccaaaactaaacaaaaacccccaaaacacttccgatagaaaaagaagaaaaaaaagataaaacttttccaatgatcttttttctttcttttttaattttcaattttcgtccctctgagaattaagtttttgtttttgcaaa

SEQ ID NO: 37685 - DNA, 374 bp, Glycine max
  Clone ID: PAT_MRT3847_13402C.1
ctcagctagtccggccggccgccctttttttatttatttacgatatacctatcgctacaaatcattcccaaggaaaaccgatagcctcgactcacatactagctcaactaacacctaaatttgtcacaatcgattggctttagcgttcacagcaaaccggattacactcctggtgttccaagacagcactgtgcttattgaggatcagagtcactacccgattacgcctcacttactaagacagcgaactcattactgggtaatctaataacaacggacatctgggccaagcctaaccataagtttttaagaacacgcatgctgaaaagaacgacatctactgctgtagccataggcacatgacttgacaatgc

SEQ ID NO: 37686 - DNA, 328 bp, Glycine max
  Clone ID: PAT_MRT3847_134030C.1
ttgggggttccagataaaccttggtgaagcacaacagtcaaaagatgtttattacctctttaagaaggcatggatgtctcgctagtacttcgcgtcggtgcacggcatctactcccgcgagcacaataggctaccagtatactacgactgtcgcttctgcaccacgtgcaagctgcctatgctggcctgccctgatgcatttcatgtgtagcatgagctctaacaggctcagactgcctcccccaacggcttcatccgtctcttcggatacctcaacatccgcctagtgcattgcatcacctgaataccctacaagcccccttgcttc

SEQ ID NO: 37687 - DNA, 497 bp, Glycine max
  Clone ID: PAT_MRT3847_134031C.1
cacgcattatacaattagaagagcacaattactcattctcttccatgatacaagatggaagccaacaatattaaataaagttctatagcttcaatatgttaggtaaagaaagacaaaatatattggatggctccatagtttcttgactatatattgacaattgaaaatctgacagaaatcagtgtgattcagtatccacagtatccagctggtaaagcatcagctttgagttaacatgatagcatggacagccaactaacttctttcctggcgagacagatagcagcttatcaatctcatcatgctgttcaggcaagaagcttttccgatagaaaaaagagagaagttttggaaatctacgagccaaagaatacatcattttcctccttggcagccacttctcccaagttcttttcatctcctccttaggcatgtgggggtcatatggattaatcataggagccaacattgctgcacctgcaattttctcaggaata

SEQ ID NO: 37688 - DNA, 379 bp, Glycine max
  Clone ID: PAT_MRT3847_134032C.1
gacaatgaattttcatttcgaaagaaaggattaaaataaagttcaaattaaataacaagtggtcaatttcttacaaacccaaaagaaatttttaaattccttaaaaaaaacttccttaaaaacctgaaactaattcaaaagttccacctagataaacatgcttagaaaatgctattttaatttggaggggggaagaaaatggctttagcctttttttttgaacggaaaaattgctcaagtcctgcttctacattgaaagaagcctgcacaaccgtgggtgaaagagccttccacgccccaatacttccagcaaggggagtaaacacaggattgggggtggagatgataaaaaaccacttcaatccataagagtcagcaa

SEQ ID NO: 37689 - DNA, 615 bp, Glycine max
  Clone ID: PAT_MRT3847_134033C.1
tatatatcaaccactctcaaacaaaccgaacactcgtcctccttctatcgcattccatttattaaacaaaaccatcttttcaacgtaattcggacaccctttatagcaatggaggcgttggacctctgctttctctaactctagctagcattgagaaacaagaacaacgagttgaggagagtgtttttaatggcggtggagtaccagtgttgtgaaactcagtttttcatacgcttattgataattttgctgcttgtgttgtttgctggattgatgtcagggctcactttaggactcatgtccttgagtcttgttgatcttgaggttctcgctaagtctggcacccctcagggtcgcaaacatgctgcgaagatattgcctgttgtcagaaatcaacatttgttgctttgcacccttctaatttgtaatgctgcagccatggaggcacttcctatctttcttgatggtcttgttgtggcatggggcgctgtcttgatttcagtaacattaattcttctgtttggtgagattataccacaatcaatttgttctcggtatggtttagcaattggtgcaacagtggctccatttgttccggttcttgtatggatatgc

SEQ ID NO: 37690 - DNA, 176 bp, Glycine max
  Clone ID: PAT_MRT3847_134034C.1
caacatgctgattagggcagtagacttcaaaaagaaaggggaagtgttacacatggggggggggatacaagaaaacacctaaacattagggggtggaattggggttaccttcacttcaagtgaaaaagtggggactttccggggaacatccctcaaacttcgaccaacaaatatat

SEQ ID NO: 37691 - DNA, 904 bp, Glycine max
  unsure (1)..(904): unsure at all n locations
  Clone ID: PAT_MRT3847_134035C.1
cggacgcgtgggttagagcaacgctagcattagcattagcatagattttgcaacgctgtcttcatccgatatcaaccactctcaaacaaaccgaacactcgtcctctttctatctcatttcatttattaaacaaaaccatttttcaacaacataattcggacaccctttatagcaatggagttggacctctgatttctctaactctagctaggattgagaaacaagaacaatatcaacgacaacgagttgaagagagtggttttttcaacttttaataatggcggtggagtatcagtgttgtgaaactcagtttttcttacggttattgataattctgctgcttgtgttgtttgctggattgatgtcagggctcactttaggactcatgtccttgagtcttgttgatcttgaggttctcgctaagtctggcacccctcaggatcgcaaacatgctgcgaagatattacctgttgtcagaaatcaacatttgttgctttgcacccttctaatttgtaatgctgcagccatggaggcacttcctatctttcttgatagtcttgttgtggcgtggggtgctgtcttgatttcagtaacgttaattcttctatttggtgagattataccacaatcaatttgttctcggtatggcttagcaattggtgcaacggtggctccatttgtccgggttcttgtatggatatgctttcctgttgcttatccaattagcaaggctggaaaaggtggagaactgacacatgatgaaaccacaatcattgctggagcgcttgaactctctgagaagacagccagtgatgccatgactcccataactgatatattntctattgatattaattcanagcttgatagggatttgatgaatctaatattggagaaagggca

SEQ ID NO: 37692 - DNA, 250 bp, Glycine max
  unsure (1)..(250): unsure at all n locations
  Clone ID: PAT_MRT3847_134036C.1
ggntatgctttttttttttttttttttgggcagaaacaacgcctcannctttcatggatagcggggaaaacctttgaaataaaaacaaatttaggcttgtcaatactttaagtcctgttttattctcgggggctacatcccgaaaaaggggtctagtcactcaagaggaagtttatatctcggatttttttccttaccggagggaaaacaaaccctgaacccaaatttgtgaatgcccccccagtcacca

SEQ ID NO: 37693 - DNA, 368 bp, Glycine max
  Clone ID: PAT_MRT3847_134037C.1
cccacgcgtgcgtgaagttgcaagatttatcatgtgtgtcactaggctggggtgctcctttcccttgtacctctcagtgatccacaagcactcctctaatagctctctgccttcttgtcctctttgaagaaaaacaaagtttactgcttagtaatattttatttgcctgttcagattttgctctcgacagtccagtttgtgattggagattggcatatttattccgcaaacctaaattaaccaaatgggaaaataacaaaaaggcacctaaccgaaaaacctataaaaacagatcggaatactaattgggaaaatggtccccccctctttaaaaagtaaaaagttggcgcggccccctttttaggggg

SEQ ID NO: 37694 - DNA, 282 bp, Glycine max
  unsure (1)..(282): unsure at all n locations
  Clone ID: PAT_MRT3847_134038C.1
aaaaaaagttgttgctgatcatgaagaaggtggtgatgatgattactctagcgattaacattttttcctgtanttggtgtgttgctttccttgganggggtaagcctttccaactttcctttgggttcaattttaaaaatttgcccaaaaaaaagaattacggatttggtaataaatacctaaattaagcctgttgtaagcttttcttggtcccaataaataaatgggtttaacacggattaagtgtatcaaagtgaatttaagttttttttttggaatttt

SEQ ID NO: 37695 - DNA, 248 bp, Glycine max
  Clone ID: PAT_MRT3847_134039C.1
acttaatttataaattttctatcttccaaaacggggtcgttctatagcatcgaggtatgttcttacactttaaatacaataatcatcatttagtggtgtttatagaagcaaccaaaaacaaataccgccattgtgatgcggatcacccgtactgtctcaattatgcaccaccgttgccatctgcaaacttctagattagcactactagcagtaagagctatcttaagaaagagtcaattcctggcgca

SEQ ID NO: 37696 - DNA, 321 bp, Glycine max
  Clone ID: PAT_MRT3847_13403C.1
ggctcgaggttcgcaagcatcaaatgtttagccccaaaacgaacgagagtgcaggggcagttctgaacaaatcggaacggaaatacacacagctgatcgaagcaatagcgaaaccgagcaagcaagatccagaaacgataaagagagaatcgaaccctgcacttcatggcggcgatgacgaggaagcggctgatcatgatggaagaagccgtggcggcggcgaccgcaatcctgccggaggatctgatgatcaagagccttgccagggttagggttagcaaccacttgcaatagaggtgtcacgtgcaagcggtggaaatc

SEQ ID NO: 37697 - DNA, 515 bp, Glycine max
  Clone ID: PAT_MRT3847_134040C.1
ggagaatggtgattgggctctatacctcccaggttggatgataaggacgaatatatggaaactaggaacatactgagacaaggctttagactcatacagtgactaaattgatggttggataaacgatgagcctgggcggtgaaacacatgagacattacacgacagcgggagtactggatgcactgcgtgatataacgggcaatgacaatggttcgagttgagttgacagatgtgagagaatgaagaatggagtcattagtatctcatgaggcatataggcgtaagtgcgggatctgggtagtaatgtaagatgagtaggctaaaggcttggcaagcgacgcccatgctgacgccattcaacttccagaaacgaggagatcttcgggacaggcgctcgggatgcttctgtttaaatgagcaccaaaatggtggaggctgtactgctatgacagagattcgcatgcctaatcactgtaggaggaatagaggggatgggcacgctgtttgatatctt

SEQ ID NO: 37698 - DNA, 805 bp, Glycine max
  Clone ID: PAT_MRT3847_134041C.1
cacgaccacaacctccaaccgccgtcgaagcttggtcgtcctcccaccgccgtcgcacgagggagcaccccacgccactgtacgtcgtcgcgccaaccaccaggccgccgccgccttgatttttgcagtgattgttactgctgctgctgctgctgttgttgttatggcagtggtggagaaggaaaagcttcaggaagaatctgtaatccgccgcttctaccagattattcttagttgggactactttgctctcctcaaggaatctaagaagctgaaaaacaaggagaagaaagggactgcggtgtcgacactcgtgaaggtgaagcaacgctacaaagatgttgatgattacattgccacatacgaacccctcgtctttgaagaagccaaatcccagatcattaaggagaaagaggaggaagaggtgactgaatggaaattgggggtggtaaaaagttggagcgaggcggacgattttcactttatagaatttccgtgtgaaatcaatgagggagaatcaatatcacagaatgatcttttgctgctttcgaaagagaagtttttggatgacaaaagattacctactgtttatgcatttgccttggtggaacatgtgcggaaattttttgaaacaaggcttcttcgagttagactctatcttgccggagagttctcaaattttaatacagataatgtacaatcttgccccagactggttaacattgcgtctcatatatgcgagacagagagacagttatattttatgaagctgtgcagcttatttaccattgctcgtgagtatttg

SEQ ID NO: 37699 - DNA, 321 bp, Glycine max
  Clone ID: PAT_MRT3847_134042C.1
ctcttgttatggaaaagaaccactatgtacgccggggtatcggaaattttcccttgcacccctatagaaaagcatgctgtgcactgtctactttttcccaaacatttgaccaaacaccacttatttttaaccgctcacactacgggttgggaaacatgaacaggctcgcataatttacatgaattttgattctagcgtccaaccaaataattactggtgggcacactaggccctctggggcccacggggcctggtgcgaacctcatccttatccttgcgagatcgttgtttaccgctactacaaatccccatcatgtggac

SEQ ID NO: 37700 - DNA, 588 bp, Glycine max
  Clone ID: PAT_MRT3847_134043C.1
aaaaatccaaagctccaaaagtagctcattttatttcctagaatcattacaatctttaagatcgcatgttcaaagtatgtataaccagcagtcctagttcatcaagtatttgactgtcatttcgaataataaaagcacaacgctttctcctgatatcaaaagaaaaggcttaattttcatcttgcctcgtttcttataataacaagaggcgacgattgttttcctgcacatatcacctccagaaacaatctagccaacaaagatcacaaagacattttgtgttcctgaacaccaaattaaatgctcttttatccagatgagacatttacctctaatcacccagacaataaaggtaggaacgtttgttcatgaaagaagacattctatatcctctaaaccggtgctttcggaatgcagttcaatgtcaaattcatgtcagaataagcagcatttttttaaacctcaatacaagagaaaaccatccccctcagcagcaatgacaatcattcatgtaattttgtgccggacatcttaaatcaatcaattgatttccagaaatgggagaaaagaaagactacacacaaggct

SEQ ID NO: 37701 - DNA, 281 bp, Glycine max
  unsure (1)..(281): unsure at all n locations
  Clone ID: PAT_MRT3847_134044C.1
aactacttattttcctttattgtgattgtataaactatttttctcttgtgtgtaaacctttggcagagatattataatgtctatggaggtcagcagntttcttcaccttactacccatctgctggagcttctggggcactaaggttgatccacaatatctaccccttttatggtcaatatgcacagagtattcaagctcctggttttggggttcagtacccccaaatggcacagnttccatttttgcctcagcattatggctccactgggatattgtcata

SEQ ID NO: 37702 - DNA, 402 bp, Glycine max
  Clone ID: PAT_MRT3847_134045C.1
ctaacaaaaaaacccaattcttaattaataattaatatggggttttcaaaaagcaaggtggtttttaggtaccaatggttaaaaatctggatcacttggattccaatttcaaggttaaacaaaatttgggacacacttaaatccttcaaggttgaacataacaaggaattccactcaaaccatgggggtaggtggacttgcgattcttgggcacaaattaacacactttttttcaatggggcccggggttgcacaacctttcattttttccttgggattgacaataacacccgcgttttttttgaagtacatgttgacccccgtctttttgggcccttggtttggctggcgaaccatgacaggtgggaagaacctttttcttaaatcggggttttccttttt

SEQ ID NO: 37703 - DNA, 412 bp, Glycine max
  Clone ID: PAT_MRT3847_134046C.1
ggctcgagctcggggagagctgactgatatatggctgaagaggagaccggatccatgcgggcaccgaacgagtcagtcatgcaagcataccgtcatgcttgcatcagcaacaaagggactgtgcaatggcccagtgacacgatcggagtgaacaacgcctatggcgttgaacgtgcacctgttcacgtgacatgtccatgatgaagcatggagctaacgacatgacatagctactacgcatcgcctgacgaccgtatgaacctgaagaatagagatagaccgacagggggacatccaatggaatgcttacacgataggtgtgagtgaaaatggagaggattgtcaatcatggataatgacaggcgaccccgcaggcctaactggacatgctatgaaacgactagggtctgat

SEQ ID NO: 37704 - DNA, 436 bp, Glycine max
  Clone ID: PAT_MRT3847_134047C.1
agtgcgagggatatctgcagaattgggcttaagcagtggtaacaacgcattttacgcggggattattcaaactaataaatgcacacaattgtcttttcaacaaaggagtgattttgatcttgattacaagccctaataacacaagttggttgaatcaattcatttgtgttgtttagttagttgtgtttgctgtaccgtaaagcagcgtcgtgcatgcaactctttctttcattcattctctctttaatcttattcaatctttatctttaagcatgcactttatcccttcatcttaaatcaatcttcaacttcaaacaccaaacatcaattcagcgttttcgtaacgcgaattggcagcaaacatcactcggattaagtagtagtatacggcttatgaacgacaagcattctgtgaattgttccacctagaggacac

SEQ ID NO: 37705 - DNA, 250 bp, Glycine max
  Clone ID: PAT_MRT3847_134048C.1
cagtatacaatttgttcacttatgtgtgtcgttttggccaattcatcatctccctcatttatgccttttctccctaccataacaaagaacccaacccaagtgttgtaagtctaattaatttccattatcgcgtgaattgccacattccatgtttcgtcacagcaatgggaagaccagcacaagatagcagtcctcgtctgattccgaactccttgctctaatgacatcccggcaccgatggaccccattc

SEQ ID NO: 37706 - DNA, 244 bp, Glycine max
  Clone ID: PAT_MRT3847_134049C.1
ggcttccttaagtctccttagtgctgctccttgcagctctaatgggatcccctcaagttcttgcaaactatgagaatcccccagtgtacaagccttccactgagataccaccattttatatgcccccacttgagatgcctcctgtttacaaacctccacttgaaaaccccccaatttattagcctccagtagagaagccaccattgtacaagcccacagttgagaaacccccagtgtacaagcc

SEQ ID NO: 37707 - DNA, 1334 bp, Glycine max
  Clone ID: PAT_MRT3847_13404C.1
atttttcttttatgcgagggcaaggcttggtgcaatggtaaattgttgccttgtggtttggaggtcatgggctcaaatcctggaaataacctctgcttgtaggggccttgataagggttttgtggatactggttattatctcaaatcaattacaatatatccaataaaatcctgtggaggtttcagtgcaagcagttggcctcttagcaacaatggcttgacacatgatcgcgagtggattctcaaaagcctaactggtgaaatacttacacagaaaaaggttcctgaaatgggctttataagcacctttatagacctcagtcagggaatgttgtttgtagaatctccacgttgtgaagaaagattgcaaattcggcttgagtcagatgtttatggtgttatagaggagattgaactatatggacagaggtacgaggtatatagttatgacaatgagaccaattcatggtttagtgaagccatcggtaaaacttgctctttgttacggtattctagtttcgatcaggattttatgttaaataagatcaaaggtgcagccacatgtagagatccgaagaacaaacttaattttgccaatgaagcacagttcttacttgtatctgaggaaagtgtttctgacctaaatagaagattaagctcagatgtacagaagggcatatatggaaaagtgatgcaagtcagtgcaagtaggtttcgtcccaatcttgtggtatctggaggtaggccttatgctgaagatggatggagatacattaggattggaaacaagtatttcagttcgcttgggggatgtaatcgatgccagataatcaaccttacaataaatgcgggacaagtgcaaaagtcaaatgaacctttggcaactttagcatcctacaggagggtaaagcagggaaaaattttgtttggtatactgctgaaacatgtttctattgacggagagcagcaaaaaggtgatttctggcttcatgtgggccaagatgtgcatccggattaaaatatgcaatgtgtgtgtataatcatacacaaatgcctgcaaattcatgtcctcaatatagttcgtgaccttgtagtgcatgtggctctaaagtatcatgtattttcttctttatgtcgtgcagttccacaattggggttgcgaaatatgctctaatgtgagaatgaatattgaaaaaatgcatattggtaataaattttgtaatgttgtataatgacaacaaaaatcaataataaagaaggtatgatgtgatttgattcaaaaacccaagatcatgaaaaaaaagcttaatcatcaattcagttctcaagttttt

SEQ ID NO: 37708 - DNA, 233 bp, Glycine max
  Clone ID: PAT_MRT3847_134050C.1
tttataaagaacatgataccacaccatacttgctattgagacaaatggagagtgacgaccagaacgtacggaccagcaacttttacggaattgatacccgttgcagaatcacctatggtgcctcttaccttaaagatactggttcaatgtctattgctcccaactgtaatgacaagagtgggtgtaacctgccttcacagattacaaaatactactatgaggcgacaaatttt

SEQ ID NO: 37709 - DNA, 545 bp, Glycine max
  Clone ID: PAT_MRT3847_134051C.1
cccacgcgtccgcggacgcgtgggttgaaaaccaaacatcttatgacttatcccaagcactttaataaatttgacgctgaagagttaaaattgttataatattgaaagaatcgcaagttattgctctcttaggggaaaatgggttggggatttgtcaatttaacgtcataatattttcttgagctgttaatacttagttatatgctaaatagtcaaatattttattgctttctttgtttaactcatttatctgttaccttaggaaaattaacaatttgatgatttattgctagatttcaatattgatggcaatggacttgttcgatatggccttcatgaggaagggtttgcttattactggtctggtgcccgagctaaggtgggaataaccagaggtagatattgttttgcctgcaaagtggtttctgcacagacggttaacatggaggacactgcccctgagcagcagcatatttgttgcctcgggatttccagaggggacaatgcggttggaaacctaggggagtccaggcagagctttggat

SEQ ID NO: 37710 - DNA, 294 bp, Glycine max
  unsure (1)..(294): unsure at all n locations
  Clone ID: PAT_MRT3847_134052C.1
aattgaaactcgngaatgtaatgcaatttctgtaattatattgataaggagggcctattagagtgggagggcctttatagcgtgtttgcccgagccccagtatattgagttattctctctacccaacatgttttacgttttgtgtggggatggccccaaagaggcccaaaagagagatgtaaaaggggctcaaagattataaagagatagtgttttttatttataaattatagttttatattaaatttatataaaaatacacggaggtggaaacttggatatttattatccttt

SEQ ID NO: 37711 - DNA, 384 bp, Glycine max
  Clone ID: PAT_MRT3847_134053C.1
ctccgcctaccgcgtccgagcggttttgtctttgtggatccaagaggacgctcgctaatcatacaactgcgtatcgtgttttttgttgcaccttgcttaagtggggtgcctttgtgggtacaatccccaagatatcttggctctgccgtgccaaagttacgtggcccaacttttgttgaaggtctgtgaacttgcctcttaagatagcgggaggcgaactgatctaacatccctatataagcttggggggggggggtttaagggacccgccctcccgcatggatgattggcgcggagtctgttttttattgtgtacaccgaaatccaattaagtgggcggggttttaccaacccctaactggaaaaacccccgtgttacccacg

SEQ ID NO: 37712 - DNA, 415 bp, Glycine max
  Clone ID: PAT_MRT3847_134054C.1
ttcttggagagatcacaacgatcgagccaaacacaacctaaaacaccttatttgtaccaaagggtactcagatcaggttccagatatagctaatcaacaagatcgggaagctcacgtcttgaggggaatgcagtgtggtccaaggagatgatatatcacttcaccatactcatatcttcacaaactcatcagattcagatgtaataataatttgtaatatatgcatattatgtctcctcggaccaggcttcattcccttcaattacagcttccatcatctaaaccaatacaaatcggtgttcttctcttctctctcagctttcaaccgatcgatcagtttcatgtatataaaacactttccaggtcagttataattattttctttttctttcaattttcagccttttttttgggt

SEQ ID NO: 37713 - DNA, 166 bp, Glycine max
  Clone ID: PAT_MRT3847_134055C.1
ttttaatacacatttttttaacaaagcaaagcccaaattctggccgcctttttctaaaatgtataggcccctaacaattaacttatcttctctaacacctaatattatttaaaaccattgttactcttccataacatctacttcaatcacttccaccttcttcttc

SEQ ID NO: 37714 - DNA, 509 bp, Glycine max
  Clone ID: PAT_MRT3847_134056C.1
cggaattcccgggtcgacccacgcgtccggggaaactaagtgaattacaaaacgcaacaatgtcgatcgcttttccttcttcactccactctcttcctcttccaaatccattccctcattttccctctctacccctaccccccctctccgtttccgcctcactcccctccgccgccccactgatcgcttttaccctctccgctcctccaccggagtccctgacggcggatccttcggaggccacggcggtcacggacacggaggacatggtggtcacggtggtggcggcggtcatgacaacgaggacaatgggagaaagaacgaggctttattggagagcgtgccggcggacctggcggcggcgataaaagccgggaagattccggcgtcggtggtcactcgctttctcgaactggagaagtctccgttcttccgggtgggtgcttcagttcgctgggttcagagagcggctcctcgcggaagatctcttcctcgcaaaggttgctatg

SEQ ID NO: 37715 - DNA, 404 bp, Glycine max
  Clone ID: PAT_MRT3847_134057C.1
attgaatgtcttattcctttttttttttgttagtttgaaaatttgatttttcttttccaaaaactctaacggaaaaattttaaaatgaactacatgctcccaaactctatctcttccaaaatcagtaccccggagtctttaacaaagcagggaaatttacccctaaacaccaaacccaccacgttcttgggaatcccctatgaaaagccattggaaaactcctgaattgcaaacagaatcctcgcacacatcaatgcaacaaagtttatggcaacccctttttttcaaaaaagcccaattgggcataggcgagaacaaaaatttaaccggggcggcgggaagatcatagtttaaaaccaaagacctttcgggccctgttattccactagccaagagggcactgt

SEQ ID NO: 37716 - DNA, 752 bp, Glycine max
  unsure (1)..(752): unsure at all n locations
  Clone ID: PAT_MRT3847_134058C.1
cgacccacgcgtccgcagcagaacataaagtgtgtttcatttgtttctccgaactagcagggaaactaagtgaattcacaaaacgcaacaatgtcgatcgctttttccttcttcactccactctcttcctcttccaaatccattccctcattttccctctctacccctaccccccctctccgtttccgcctcactcccctccgccgccccactgatcgcttttaccctctccgctcctccaccggagtccctgacggcggatccttcggaggccacggcggtcacggacacggaggacatggtggtcacggtggtggcggcggtcatgacaacgaggacaatgggagaaagaacgaggctttattggtggtggcggaggcggggaggtcgttggagagcgtgccggcggacctggcggcggcgataaaagccgggaagattccggcgtcggtggtcactcgctttctcgaactggagaagtctccgttcttccggtggctgcttcagttcgctgggttcagagagcgtctcctcgcggatgatctcttcctcgcaaaggttgctatggaatgcggcgttggcgttttcaccaagactgctgctgagtacgaaaaaagaaagaaaactttntcaacgagatcgaaattgtcttcgcggatgtggcgatggccataattgcagatttcatggttggtttatctttctgcgcctaccgtagctcttagaccggcactcgcactcactgcagggcc

SEQ ID NO: 37717 - DNA, 199 bp, Glycine max
  Clone ID: PAT_MRT3847_134059C.1
taagatcctccaatcacagcctagcgggcagtctacacaactcgtaccgacactcacacacagcagaatccatgccctgctgagacgcttcttgtttcgcttgaacaaccctcggttccttccgaaatggtgactgtaaccagttgcagattaatgcctctgaactcggagacattgcgcgccttcattgacatgattg

SEQ ID NO: 37718 - DNA, 683 bp, Glycine max
  Clone ID: PAT_MRT3847_13405C.1
ggaaaagtgatgcaagtcagtgcaagtaggtttcgtcccaatcttgtggtatctggaggtaggccttatgctgaagatggatggagatacattaggattggaaacaagtatttcagttcgcttgggggatgtaatcgatgccagataatcaaccttacaataaatgcgggacaagtgcaaaagtcaaatgaacctttggcaactttagcatcctacaggagggtaaaggttggccaagttgtttttaactagatttcagttatatatttgatttattttaatgcatcaatattctaatataaatatattacagcagggaaaaattttgtttggtatactgctgaaacatgtttctattgacggagagcagcaaaaaggtgatttctggcttcatgtgggccaagatgtgcatccggattaaaatatgcaatgtgtgtgtataatcatacacaaatgcctgcaaattcatgtcctcaatatagttcgtgaccttgtagtgcatgtggctctaaagtatcatgtattttcttctttatgtcgtgcagttccacaattggggttgcgaaatatgctctaatgtgagaatgaatattgaaaaaatgcatattggtaataaattttgtaatgttgtataatgacaacaaaaatcaataataaagaaggtatgatgtgatttgattcaa

SEQ ID NO: 37719 - DNA, 1809 bp, Glycine max
  Clone ID: PAT_MRT3847_134060C.1
taatgtatttattcaatatttaatatgaaataaacttcaacgataataatgatataagcattatcgcaacaatccaaacaaaaatgtatgcgctgtacaaaaaacaattgaaacaacaaaaacaatttttagtctctcaagtcaaaacaataacatagcataaaaatgataaaagaaatatgaaagaaaacatgaatctggggatctcccagtcacgtatctccactccctcccaagaagtcaagcaaatcggccatctcctcgtcctcgtgggcctcttctccaccgccgggagcttctgggggtgcctctcctgcttgggcctcgggccaatctccgggccatgcgacctctgccctgacctggtctggagtagggcatgaaaaagaagcgaagccctggcttctgcatgctgaggctcatctggtacagaaaatcatgggtctgtacatgtgctcggtggttggccgcctgctggcgaaccaaatgccgtaaatactgctccatgtctaatgccccagcctggccagcctgatgaggtggtggtggcgcgcctgcggcctgtggagcatcaccctgagcctgtctctgggtacagtacttctcaataaaagcccgggtgatgggcggccaaattaccttggtaggtgcaacggggactccgaatgactggaagagtcctgtgatcagcgagggaaatcccagggccctgttggacttatctggatccaaaggatgcctggtaggcgccatacctgcaaaaatataaatggcatcagcgattaactgagccacatggacgctcatctgcgtcaggatggcgtacaccagctgacacttcggcagggggaggtcggaattatgatcgctgggcaggatgttgctgaggagcaacatcatccatatctgggtcagggtggtcatgttggtgcgcatgattcgcactcgcctccctacagcagtccgggcaaaatcctgccccggtatacatagcagctgggtgatggcctcctcatcgaacccatcagaccggttcctcctctggccatactcacattcctggccctcttccaacaccaacggatatcccaggagctggccgatagcgtcggcatcaaacgggatccactgaccccttacccaggatctcatgtcacgcacgccctcctctgttggccaagcattggcataaaactcaaggactatttctggatcgaacttggccatgggagtaaccagtgatgcccaccgccggcgccctatttcctcctggaaatcagtatactcgtcgtccctgagctggacgcgtcgctcccggagaaacgaccatcccttgatggcctcgaagcgctgctggtgtacagcgctcctaaagcggtgactgtcgtactccggagcggaactagttccttcggccgccttgtccttcctggacctctttgaggcaagcttcctcggggccattcctgcgaaggcaaacatttggaaagttagttttagtgggacattactcttaaagcaaaaatggcatataacctcctcccataaatacaaacatcaatgtaaatttagagcaagcttatgcgcatacttcttcacgaacgttcacttgcggaagacattcttataactaagaaaaatgcacccatatacaatcaaggcaccttcgttacctagattatttacatgtacttccaaggtgtatttgttacttacatcacacacatctcctcggctaaattcacatacatgcatactccaagcattttggggtaccaaaaattgcacatgtgtacatcttggtatttc

SEQ ID NO: 37720 - DNA, 463 bp, Glycine max
  Clone ID: PAT_MRT3847_134061C.1
cccacgcgtccgcagaatccaacaaacttgtgggtaatttgtcatggagaatacggactccagatgctggatttattactaggtccgctgagcagagatttgtacaagatccttcctatcctgggatcctttacaatcatgacaatgagtaccttcactatcaagatgactgaaacgatgcttgggatggttatggaggtgctgttgtatacacaaggagtgcagttttgcctgaatctatagttcctgaacttgaaaaagcatctaagagtgtgggaagagactttagcaagttcatcaggacagataacacatgcgggccagagccttccctggtggaaaggctggagaaaaaggtagaggaaggagaagagaccattgtaagggaagttgaacagatagaagaagaggtggagaaggtggggaaaacggaggcgaccttatttcagaagttggcagaagg

SEQ ID NO: 37721 - DNA, 555 bp, Glycine max
  Clone ID: PAT_MRT3847_134062C.1
agaacaaggctctcaacacccgttcaaaaagtaaaactcttctttttaattagtctctaatgtagttttgctttaaatttgtcttgaaaaaaataacctatttttacaaactcagtttacaaaacaaagttcatttaaacttaaatttgtaaactttaactaaaaaaacatgcacttcctcgtccaagcaatatttttcggatgttggttttaaaaaaaaacaaaccacagcttagttattacctaatggtaatgaaaatagtgattattctttctttttaggttcatatacaattaactatccaatagactgtccttcagaaaataaataatttatataaagaaaagaataacaaccttttaccatagtatttcgaagcagtcaaatttatactaaccttccgagtagtctattcttgtggacaccttgtctaggtgtattgttagtgcaaagcttggcggtgcagggaataaaccagtggatccagtggcaaatatcagcgaggacaaaggttcggtggtttctaactgaaacaccatgaacagacgagagga

SEQ ID NO: 37722 - DNA, 2168 bp, Glycine max
  Clone ID: PAT_MRT3847_134063C.1
ttggttcttgttccactgtagtggtgcgcaggcatctaaacctatgcaaatacaatactctgaatatatatacaacaattgataaaagctgttacgtaatatttgaataattattagtatgtcagcataaaagcaatgattagggaggaaagatttctaaagccatgcaatatatatagtcaatgaataaaagcaaagataaatttaagatgatcaaaaagattatgatgtcaagttatcttggacatggttctcagacttatcttagtttccttatcggcaaggcacgtccaaagagcttttctacttcaccggcttccattttaagcccatcaagaatctccatttcttcttttgataaccctcttaagaaattttcctcatcttcttgaaacactttgaacccttctgccaacttttgaaacaaggtgctgaaataaggtcgcctccgttttccccaccttctccacctcttcttctatctgttcaacttcccttacaatggtctcttctccttcctctacctttttctccagcctttccaccagggaaggctctggcccgcatgtgttatctgtcctgatgaacttgctaaagtctcttcccacactcttagatgctttttcaagttcaggaactatagattcaggcaaaactgcactccttgtgtatacaacagcacctccataaccatcccaagcatcgtttctgcctcggtagtatacaaatacgtagtcatctgatttattctcaactttgattgccaaattataccagtcatcttgatagtgaaggtactcattgtcatgattgtaaaggatcccaggataggaaggatcttgtacaaatctctgctcagcagacctagtaataaatccagcatctggagtccgtattctccatgacaaattacccacaagtttgttggattctgtgtgaaattcatgtaattggcagtcaaaggtatcgaaggtaggattcaagccactagtgatgaaccacttgccactgaaatcagcaatgttaaagctattaacaaggacatcaggatttggagcaggaaattctcccacatcagacttcttaggtacacatttcttccgtgagactgcacactcattgaattcatcaaccacactattttcgaacaggtccccacacttaatttggcattcggtttcatcaggtctattgttgcaagtttgaagacaagcgatattggccgcacaagatgggtttgaaagacacttagctagttctatcctgcaatccttcaacaagcaagcacaagttttgagagcatcaacagcatcagctggtggaatgatcattaaaatggataccaatatggcagctactgccgtgatgcgtatattactccaatctttgagaaaaacaagcattcgatctgcctcgaatttcaacatcagttgccgtggtttttgtgtagaagtgagagaagaatatcctttcccttggttgtgttgtcccctcaaactgcaataaggtcttatcaagcgcaagcgtgttggccttttggcggtggaaaaaactttgagcactaccacactaggaccatatttaaaccctgctgttctgtgaaaccttaaatcacctctaaccgtaaggcctgcttttatacgtacattgggagtgcctccaaatgtaacctgatactgtcaaaaacaaatcagcaagatcaacttgcaacgtagaagaggccaaataataatagtaacaataacaataataaatatatgtgtacgttatgtatatgtatgtcctcacctccaattgtaacctgatactgtcaaaaacaaatcagcaagatcaactgcatatcatttagaataggtatgttaaaaaatctaacataaaaggaaaatataattgtcctaggatattgcatacccacttgtttttattagtcaagttccaaaatttagattatatatagtatgctaatatgataataatagtaattaagagcagagatatggtttagaatgagcaaagtgggaaacatgccttgcaacgtagaagaggccaattgcaggtacaatgagaaatagaataaggaaatgtaaaaggaagaggaagaagaagaaacaagagtcgccatcgcatgagtgagataagaacataatgatgatggtgttcgtgtggac

SEQ ID NO: 37723 - DNA, 485 bp, Glycine max
  Clone ID: PAT_MRT3847_134064C.1
taagaaattttcctcgtcttcttgaaacattttgaacccttctgccaacttttgaaataaggtcgcctccgttttccccaccttctccacctctttttctatctgttcaacttcccttacaatggtcttttctccttcctctacctttttttccagcctttccaccagggaaggctttggcccgcatgtgttatctgtcctgatgaacttgctaaagtctcttcccccactcttagatgctttttcaagttcaggaactatagattcaggcaaaactgcactccttgtgtatacaacagcccctccataaccatcccaagcatggtttttgcctcggtagtatacaaatacgtagtcatctgatttattttcaatcttggatggcaaaatatacctatatatatatatatatcattgtttgtaagtcttctaatgttaacaaaagactctttgtttccaattaaagaaacctcaataaaaaaaaa

SEQ ID NO: 37724 - DNA, 451 bp, Glycine max
  Clone ID: PAT_MRT3847_134065C.1
ccacgggcaccgaaccaggtgtagattttctggggcaaaaaagaggagccacttcaactttcttaaaacaagcgctcttccttggggaaccgaaaaaaaacacttcccgactctcaaaaccaggaataacaaatgattaaggaagggggggacggaccataacctggtctgcttccatcaatcctaggccattgaacggtgaacttctggggaccagctaacttacgaaagcaatatctttgttagttttttccaggcgtaaacaaataccactgatcggatgaaatttgttcgtcggccccaatgagattccttgggagtgccctaatttattggagtggcgaaacaatctgtttaagcattttgcaggattagtactgaggacgatcccgcaagaatttcacaatagcagccttgtgggagaggggggcgtaaatttcgccctcccgaa

SEQ ID NO: 37725 - DNA, 287 bp, Glycine max
  Clone ID: PAT_MRT3847_134066C.1
gccaaacgttagttcgttctgtcttccgatttcatttgaaacattggatactgaaacaccacagcacatatgcttggctgaccagctgttgataaacggtgggcagtagctgttcaatagaaattacacttggtgcgggctgcctaatctggaggggaaaagcgcacttatgacacctagcttggaaaatagaaggagggacgaagtgtttgacatggctgttattgctggtttaatcgacgctggaatagcagaatcacaatacccgtaaacatgagccttaaaag

SEQ ID NO: 37726 - DNA, 567 bp, Glycine max
  Clone ID: PAT_MRT3847_134067C.1
gggccggaattcccgcgtcgacccacgcgtccgctagctggttacactctgatatactaacctctgtcaatgaaggtagatggttgggcaagtttcctctcaacttggggcattctgataaactcaaacgcttaaggcaaggaaaaggaaatttgcggccttcaccttcaaatggtagccactcttcccactctgacatctcttcgaactggatactctgcaacaatggaaatggttgaaatgaaagagaacccccattgttgcagtagaattcctcaccaactgtcttcaccattttcatcctttctatcacaagctccttgagagaaggtagttgtccaaatggtggaagtgaaaaacaatagttgcaatcagtgatgcaaaggactataacataagaatacgaatagtaactcaaccatttaagaaagcttgtgccactgtagtatcttatgctgagtttctttaaatttgtcgatggttgcaggttctgaagtacgtctttctcaatttgtgaatcttgtggctcactgccccactccagcgtaagctcctcaatgtgctctt

SEQ ID NO: 37727 - DNA, 328 bp, Glycine max
  Clone ID: PAT_MRT3847_134068C.1
ctgccatcaaatgcaaatagtggtgtcattttatgacatggaagctggctgtggagcagcagaaccagataccacacttgccttactaacaataactcgccacttatcgtgaaagagtgatgccattacaggccaaattcacgtgactcaaagaagccttgaggagcaagaatgaatacacagtatacactatgtggatcagtatctgagacaacaaatggcacttcatcaacttggtgtcatgagacaagctaggaagcctatgagagtcttgctgaaagctctgtttcaatactgcgagcttggctctataaacatttatttcata

SEQ ID NO: 37728 - DNA, 468 bp, Glycine max
  Clone ID: PAT_MRT3847_134069C.1
ggtgtatgtgtatgcactaccacgcgaaattggagaaaacggcaaacggtgatgtgtttctggggatggggaagacatgacattgattacaggaaccagcgttgaagaggctgacaacacgcttatataggaacttgagaaaagggtgactacattggttggcattgaatgccccaaggatgaaaagcaagctcggcataaaattttggacatacctaagacgcactgattaactattctccctatggagttaaatcttgaggttcgtcagaagtatttaaatgttgtgaggatcattacgaaaaaaagggacacgcttatttgtcaagatggaatcaatccatacaccatgaaatggactgttttggccaatatataactgaggaagggcaaccatattctgcgacgcgattatgctcatgtagatcggtagattaccaagcgagctcatatcaaaatgccataaat

SEQ ID NO: 37729 - DNA, 109 bp, Glycine max
  Clone ID: PAT_MRT3847_13406C.1
ggctctagggtcgagtttaaaagatactatctaagcgctgctcctaattgccctgccagtctaacggctcgggaggcgcattggtgttgttcttcctcctcgattgact

SEQ ID NO: 37730 - DNA, 605 bp, Glycine max
  unsure (1)..(605): unsure at all n locations
  Clone ID: PAT_MRT3847_134070C.1
ggaattcccgggtacgacccacgcgtccgccgctctccccaatcccatggctctgcttttcaattccaagcttctccgatggagactctctctccatccaaaccctatctccgccttctccaccgccgaagctctctccgaccacgaccaccctcctctcccctccccgcagccccaacccccacccattgttccccctcgcgagcacaatctcgaactcaccatctgcaagatgatgtccaaccgcgcgtggaccacgcgcctccaaaactccatccgctccctcgtccctgaatttgacccttcccttgtctacaacgtcctccacggcgccgcctcgccggagcacgcgcttcagttctatcgctgggtcgagcgcgccggcctcttcacccacaccccggaaaccaccctcaagatcgtccaaatcctcggccgatactccaagctcaaccacgcgcgctgtatcctcttcacgacacgcgcgtcgtctcacgcgccgncgtcacccgagacgccntcgtcntcctcattgacagctannnnnnnnnnnnnnnnnnnnnnnnnnnnnnnnnnnnnnnnnnnnnnnnnnnnnnnnnnnnnnn

SEQ ID NO: 37731 - DNA, 324 bp, Glycine max
  Clone ID: PAT_MRT3847_134071C.1
tacggtttcgataatacggttttcggtgaacagtgcgcaatctatccactataccacaattgattatcctgtcacacattacactcagtgccataaataagttcgcgcataaaagttagctgaataggtctaatcacgattatatccgcttgacgatgcataacaacatcaggtagccatcaaatccccttcactgacgtcgcacctagcatagtttctaacgtatatgctctacctaggttcaccttatccacttaactactgttgtatcttcatgatgcatggctcttctgttgagttcgtagtcttttccacttgttccaa

SEQ ID NO: 37732 - DNA, 269 bp, Glycine max
  Clone ID: PAT_MRT3847_134072C.1
acaaatttgattatggggagattaaatctcctagtggatttcactatacgctgcttcatgcacagctttaatttctcttttcttaagggggccgtaccatcttgccgctgttattatccctctaccatctattacgcccattcatgccaatgtgaccaaaaaaacattaaacccacattaacaaaccaaatacagccccacctattcctatcccattggaaggaagatccatactgggagggttatttattattcttccttctcgaaac

SEQ ID NO: 37733 - DNA, 696 bp, Glycine max
  Clone ID: PAT_MRT3847_134073C.1
agcacgcatatgtcgaagttccagctgcatgcatcatattgataggcttgtttgcccttcaacattatggcacacacagagttggcttcttgtttgctcctgtaattatcacatggcttttctgccttagtaccattgggatatacaatatattttactggaatcctcatgtatacaaagcactctctccatattatgctttccaacttttaaggaaaactcagaaaggaggttggatggcccttggtggaattttgctgtcttttacaggatcagaagccatgtttgctgatcttgggcactttacacaattatcaatcaagattgcttttacttctgtggtttatccatctttaattcttgcatatatggggcaagctgcttatctatctaaacatcataacattgcacaagattatcactttgggttttatgaatctgtaccagagaaattgagatggcctgttctcgttatagccatacttgctgcagttgtgggaagtcaagccattatcactggaacattctcaatcatcaagcaatgctcgtcattaagttgcttcccaagagttaaagtgattcacacatcatccaaaattcacggacaaatatatatccccgagatcaattggctattgatgatgttgtgtttggccgtaactatttgtttcagagacacaaagcgcctgggtcatg

SEQ ID NO: 37734 - DNA, 240 bp, Glycine max
  Clone ID: PAT_MRT3847_134074C.1
atccttctatcgctttaaaatttaatctgtacataacaaaacccgctttcaaatttaaatgtattgtgtatactcaatgctcataccctggatttaattaacattcccaacgccagcacactcttaccatccacatatacaatattctgacctttctaaccgctgaggcttgtttattgctaaaaacatttattttttccacacatgcctacctacctacaagtcgataagaggtgcata

SEQ ID NO: 37735 - DNA, 351 bp, Glycine max
  unsure (1)..(351): unsure at all n locations
  Clone ID: PAT_MRT3847_134075C.1
tttttanaatgacttattttcataactctatgcaaaacaacacgggggactaatcaaaaaacactatacatnctttcccatatcacatctctcatatagaaaaccctacaattttaatcccaaaaagtaattcaaaaacactacatatactttacacgcaatcaccatctgctatctacaatattatcaagttaggagacaaataccccacatccactccaaacgtgtgaaaaactcattatttaccacagtttaacccacctcagacggtaagaacaatcattagaatcaccgcaatattattcccaaaacgattatctttattcttatgttttcaaaccacatctttct

SEQ ID NO: 37736 - DNA, 306 bp, Glycine max
  Clone ID: PAT_MRT3847_134076C.1
tggcgcgcctaaattggtatgcttagaggagattcaggtttatatttattgagtaacaaggagatattgatctacgttaagaaggcaatgcaatatcattctcagctgttggacacttcaactattatcattgtgtagattttactgggatattgacattttggttgtcacgactttggatgcagttcttagactttgatccactagatgggcctcatcacccaatgaaattcttcaatcattcgacgtagctgcaagcctcaacttcaccactggtgacggtgaagccgtgggatatatttagtt

SEQ ID NO: 37737 - DNA, 246 bp, Glycine max
  Clone ID: PAT_MRT3847_134077C.1
gcttggtccatgatcctcacattagcctatggtcgtacattcattgtggagggaaatcatgttgacaaacttaagctgcaaagttgggcaatacctaagtacagtcaacaatactttattagatcacaaaaaatgcccatcaacaaaatgattgaggaaacaatattggacgcagacaaaaaaggcataaaagtgttgagtttaggtcttttgaatcaaggagaagatcttaacagttatggaggg

SEQ ID NO: 37738 - DNA, 505 bp, Glycine max
  Clone ID: PAT_MRT3847_134078C.1
gttcctgtcatcactgtatgacgtcctccttctttggggggggggggggggaacgcagcgaaacggaggcagaaagagaggagagagccgaaggataacggaatggaaggcaccaacaatagcccgcatatggtacgggggtagcgttatcatgagaatgggccaggtgaaggatagtacgcgatttaaaaacaaaacgagaagtaaaaataccgcaggacacaaatgttatagtagttattgagggggccaaggtagacgcgaccaggagattagcggggcggggtaaccgccgaaatagaggatgcgtgacagtctgggaacgatattaagatatgaacgtgtcggacaataataatattgctaaaaagattacaatccacacataagcgatgccggggtgcgagacgcctgcgattaccggctacgggcggccgggccggcaaggcccaaatgttaaagttaatgggaaacttggtaggttgctacattgactagaatgcat

SEQ ID NO: 37739 - DNA, 477 bp, Glycine max
  unsure (1)..(477): unsure at all n locations
  Clone ID: PAT_MRT3847_134079C.1
agtcggcgcttagaaagggtttttttttttttttattatataggaatcatattccctctgaagactatcacgcaaacatattcatcatttcccttcttgcaatgaaacttcagaaacaacatctgacacttttgcacaatttaccatattctcccctcccccggggggggatnaaactaagngaacaaacaactccggaagtttacccaaaagaacgggggcgggggagccagatgaaaagcaattctctcttcatcatctttcaggagaaaaatgccaattattgcatatctaaaaaaaccattttggacacaaacatgtcaaatgcccctatttattccctctaaaaggctgttggattaattgaacaacacaaaagcaggcttttctttgaagacaaacatccctcgaggcactgaccacgttatgttttatgatcggcgaaataggaaaaccccgccccagaaagagagagat

SEQ ID NO: 37740 - DNA, 606 bp, Glycine max
  unsure (1)..(606): unsure at all n locations
  Clone ID: PAT_MRT3847_13407C.1
ttttcaattcatttccattttgagattataatttagattctatctgtttgttttgttgcaaattccttccttcgaagttgagtataaaattctattttatttattcctcttttcataataggtatttcatacacgggattagttaaaatttcatgtaattcagtataaagaacagaaattccagtattgctaaattgattcatgtgatttgatgaagaatggcagcaaatcggtggaatatttttcgataaaattcacggggaaattgaaaatgcttggggatggaaatgaaggaatgtctacactacctggattgaatcagatacaatttgaagggttttgtaggttcattgatcggggcttaccagaagggctttttaagtttccaaaaattgaggatacagatcaagaaattgaatttcaattatttgtagaaacatatcaattattagaacccttgataaacgaaaaagatgctgtatatgaatcgcttacatattctgctgaattatatgtatctgcgggattaatttggaaaagtagtagggacatacaagaacanactatttttgtgggaacattcctttaatgaatctctgggaactt

SEQ ID NO: 37741 - DNA, 137 bp, Glycine max
  Clone ID: PAT_MRT3847_134080C.1
ctgtcgtcctttttttgtgaataatcagaatttgactgaacgtagatcaatacaattccaaagtggctacattccgaatggaaaaactaaatacagaaacattatgacgcacatgttcgaaaatcaattacaagcca

SEQ ID NO: 37742 - DNA, 751 bp, Glycine max
  Clone ID: PAT_MRT3847_134081C.1
tctcgagccgaatcggctcgaggcgagaagacgacagaagggggaacaactaaaggagagtgaaattacgtagtgtgtgggagacaaagagagatggctaagtggtgtatgttggtgttggttcttgctctagctctggctgtggccacaagtgccagagatgcacccgaagatgttggtctcaaggaccagaagaacttcatcagctatgctggagttggtggctattcaggaattggaagcaatggactaccttttggaggtgccggaataggtggtggcaccaccgggataggtggattgggaggattcggaggtcccattggcggtggtactggtggcagtgttggaggtggcgttggcggtggtagcatacctcatcccaccccttgagtgaatgaacatgcatgcatgcatgcatatggaatttctctttccgcttctttaatttggattatcttagtcgagctagctttctttttcgttcaggaaataattgtggtttagttgcgtgtcgtttatcttacaagcattttagcgtttgatttattatcgcgcgcctattgaaagcaaaaaaatagtagtagtatatcttgtaatgtatgtcatttctgtcgatcttttcttaggttttgtgtcaaagtgtcaaccatagtatgtgctcatatatatatatgtgtggttcttttatggaatattcacatttagcatggaagtaattaacgtaatcaatgaattcaatttactacct

SEQ ID NO: 37743 - DNA, 307 bp, Glycine max
  unsure (1)..(307): unsure at all n locations
  Clone ID: PAT_MRT3847_134082C.1
nccacgcgnccgngagcaaacannnnngccnggaagggacgccanngaaanggcagcagcgggggacaagaaangggnnnncacggaccaagcannaccagcngancnngncaagagaggannggcagnngaggancccncngccccacaagggcnncgccnngnganagaggacnacccnnangcngnnganggacnngaaanangggangcnannaagacangggnccangagnangncncngngganaacccaacaaangcagcaanncaacaagacacngaacnncaagcanggnggaaggaa

SEQ ID NO: 37744 - DNA, 121 bp, Glycine max
  Clone ID: PAT_MRT3847_134083C.1
attagtcggtcctcgacttctcagcactgtctgttttagcagctgattctgggtcgttggagtaaacgtgtcatcgcgtctggactcaactacttagtccctcgattgaatatcttgatta

SEQ ID NO: 37745 - DNA, 411 bp, Glycine max
  Clone ID: PAT_MRT3847_134084C.1
gttgcataaaatcaagaactcaaaagattccaagttacaccccataatataattcaagagacaatgttcattttgttcaaattgaactatttctgactaataaacaaatccagaatatttaggagacaatcaactttgtatgacgttgaagtagatgcgtcattgacaagcttgtgcctgaaacactacagcatccaaactgcagagaataactcaagttcttgagacttgtcattgcatgtataccgtacaaaacctgaatccaaattttcccccccaggtagcaactgctgagtatcacacacataggaactgctgccatgagacttttatctggatcctttttctttatctgtttttcctgaggagcttaaaagtttctatctaaccaagaaccattgaaataataaa

SEQ ID NO: 37746 - DNA, 566 bp, Glycine max
  Clone ID: PAT_MRT3847_134085C.1
aaaaaagggaaaataaaacattttgaagtcatatttgcacacttgattagaggctaccatcccttgtgacggacgcgtggggtgctaatatcttccccgttcgtaaaaacaactctcgaacctttcacacttaaagttcgtagaccacaccttttgcgacagttggcgactccacttgggactatttttagaggaattaatgaaacattgggcttgaatccagaattgggcttggacttgaagagggcagactattttattctacaagattttatcttatctagactttatcttatctagatattatttagatttgatgtcatctagatattatttcatctagatcttatcttatcttatctagatttgattttattttatttatgggcctggatttaaaatagatttgtaagctttggggttggaaaactatataacaacaccaaggttctagtttaggctctcctctctcttctctttctccttttttttttgtttttgcaattccaaggctgactggtcggtctaacaatggaatgtcgttcgtggagctagaatcgacaaaa

SEQ ID NO: 37747 - DNA, 2350 bp, Glycine max
  Clone ID: PAT_MRT3847_134086C.1
atttctttgaaggactattaccaagagggtagccatgtctatgatgaactgaatgttttggaggcatttcgaagggctataacaacttggagtagatggattgatgccaacataaatcaatctaagtctatggtattctctccctctgcggcggtgctccttcgcattccggtgggcggcgtgggagtgctgctggtccatgtgacagtgagacggtgcctaccgagtatccggagtacttgagggttttccccccggtgctgagggttttgaaaacccttgggacctcccgaaaccccacgtcaccgaccgatttcccgctggatggccgccccccgatatgctggtcgcccctcctttcaccggaggcaagaccttccccctggagagtccaagtctccagccaggggccccgtccgcggcctctcggaggctactggggtgcccgctgcgcggaacgtctttcgagaggctgtccgtctctgcatgggcagtcagataccgaaacaccagaaccacccaccttctgcttcacccagatgcatggagtgagattctttatgccgaacttctgttgaaacagatttaaagtacaactcgtgtttgggtgaaagtttacaagacatttatttagttatattcaatgagtttattttgaggtgaagtaatatgtggtggatatttttatactaaaagcaatttatccaacacaaaagctatctaaaattgcaacaactcaaaatcaatttctcaatgtgagaccaagcatatcaacatttacctaaaatcatcttaactagtatttcatcatatgatgttggatgatccgatgtaaatccaaacacactacaaatgaattggtgcttattgtgttaattttggtctcacattacttcagtttcagtttcaatatcattcactttgacattgaattttccttaagcacattattatcatagaactagaagactgactcataaacatttgtttctaattctatcatactgctgatctatgttctgcctcacttatggtctatgagttaagctcaaacagaaccagatgctgtgtgttccatttttgttcccacgcatgtccaggatagtgaaagaaagaaaccatacagaaagtgccttctgtatttatttaaaggttcataaaattaagtgaaccaatatatactgaattaaaagatgtgagtaccttgttactgtggcataaatttgttcatatcaagtacattgattgctgaggataggccagaaaagacggctggtgttatctgatattgtactgcatccctcatcagtgatggacaatggaattctggtggtcaatgtgaaagtgaaacggaacctattaataatgagaagtacttaatcgaataaccacataagatgaaggtattggaaaaggttttgaagaatatgaaaacccatgtcacctacctaaatgtcactaaaatgacagatttcagaaaggatggtcatccctcgatatataggaagcaaaacctatcaccagaagagaggaaatctccattgaggtaccaagactgcagccactggtgcctccctggtgttccagatgcatggaatgagattctttatgccgaacttctgttgaaacagtatcagaatcagcagaagagaccataggtaaacaacaagtcatttatttagttatattcaatgagtttagctgaaagcaagaactagatgcagttattatgtataccatttttttcccttccatataaggatatggagaggaacaaaccatacaggacaagtttttctaattttgtaaagattcaaaaggttatgtttagtgaaacaatatataagagaagttccttgatgagacattaaaaaaaatcaataatttttttcatatgaattatccaagctagataggacttggagaagatagaaaataatgggtggtttagtttgttattgtaatttgtaaccaccccctaaattttgtttctaaaggctgagttcttttggaattttcgtattatgtaacgaattccttcagatgaactagtttgtcatacaaatgtgtataggatttgaaaaatacagggacatgtatgtccaatttaaaagtttggggagaggaaaaattattagtttatattctttggaactatatgtttgtttggttctagcgtaatgttcctcctctctctttagagtattttttattttttttggttcagtggtaattgtttttgtattgaaaccaatagcttggttttgtcaggatttgttttgcgccaaaaatgattctttgattgttctttgtctataaataattcaaatggatgtgaaatttcttcttc

SEQ ID NO: 37748 - DNA, 352 bp, Glycine max
  Clone ID: PAT_MRT3847_134087C.1
cgggtcgtgcagcctactagtcggtgggcgccctgcttttggcttaattttttttgatcagatttcttttaaacagatacgaataaatgacaacgggggttactttcgagttggtatattgaattacacatccactgccgtccctgactctgaaggtgggcctctgcacaactttagtgcggaggacacatagacccatgacgcgaccctggcgccaactaatagtgatgatcccacacctgtgcaagcagaatacagcgtctttcatgtttaacctgcaaatacggggtatacagttcgttttcatgtgacgaaacccaaagccgcaacacctaggcttgcttttcgcagt

SEQ ID NO: 37749 - DNA, 2324 bp, Glycine max
  Clone ID: PAT_MRT3847_134088C.1
ggttatttttgaatctctaatttgcatcctgagaaacgctgtgaaagacaaaagcaaagtttatgaagcaaatggaagagtccatttcagaggagaagcctcttattcattcatattcaaagattataacttctccgtggagcttttcgtatcccctttcttagttcaggaatgggaagttcaagtcaagaatggaacaaagaaggaaacacttcgtcttgatttagttggtaaatcttcagttcaatataaaaatgcggatataatcatcttcaacactggccactggtggactcatgataaaacttctaaagggaaggactattaccaagagggtagccatgtctatgatgaactgaatgttttggaggcatttcgaagggctataacaacttggagtagatggattcaacccaacatgcagttcctgttccaaccacaaaccagaccacggattctcacgcgccaagtttggaggtgaagtcaccaccattccttgcaagtaaggaaccgccaggtgctgtaaaaaatcagacttttaactctgatgaagctaaatctgcgagcacaaatcaaactacaaatgctactgcaactgcaactgcaaccaatgtttcagtgagtttccctgttcagaatgttccaaatctgaacacgagttctaattcttcggtgaaggtggatttggtgaagggtactgttgtgtctaatgataattacaccgcttctctggcgaggaaacagaacaatgggaaggatcacgctaaggggaacgatgaatcgatggagtctctgatgaagtgtgatttttttgatggagagtgggttaaggatgatgcatatcctctctataagccagattcttgctctttgattgatgaacagttcaattgtattaggaatggaaggcctgataaggattatcagaaatataagtggaagccaaagggttgcacacttccaaggttggatgcgcatcgaatgctgcaattgttgagagggaaacgactggtttttgttggcgattcgctcaataggaacatgtgggagtctttgatttgcatattgagaaatgctgtgaaaaataaacacaatgtttatgaagtaaatggaagagttaatttcagaggcgaagccgcttattcatttgttttcgaagattatcacttctccgtggagctttttgtgtctccattcttggttcaagaaggggaaatgactgataagaacgggacaaagaaggaaacacttcgtctcgatttggttggtaaatcttcatctcaatacaaagatgcagatattctcgtcttcaacactggccactggtggactcatgataaaacttctaaagggcaggactattaccaagaaggtagccatgtgtatgctgaattaaacgttcttgaggcattcagaagagctttaacgacttggagcaagtgggttgatgccaacataaatccgtccaagaccatggtcttcttcagaggctattctgcttcccatttcagtggtggacaatggaattcaggtggacaatgtgatagtgaaactgatccaattgacaatgagaagtatctaaccgagtatccagataaaatgaaggttttggagaaggtgctaaagaatatgaaaacccatgtgacctaccaaaacatcactagaatgacggatttccggaaggatggtcacccctcaatatacaggaagcaaaatctatcaccggaggaaagaaaatcacctttgagattccaagactgcagccattggtgccttccgggtgttcctgatttatggaatgaagttctctatgctgaacttctattgagagagtatcagaatcagcatgagcagaagcataggtaaacacataaactaccaaacttctgcctcacttatggtctatgagttaagctcaaacagaaccagatgctgtgtgttccatttttgttcccacgcatgtccaggatagtgaaagaaagaaaaaccatacagaaagtgccttctgtatttatttaaaggttcataaaattaagtgaaccaatatatactgaattaaaagatgtgagtaccttgatactgtgcaataaatttgttcatatggaaaacataaattggtgaggataggagagaatacgagggtggtgttatttgttattgtaaatcatcccttaccttgcatcttcattttctttctagcctgaaaggctgattcttgttgtaaatctataatcaattagatttttatttattataatcaaattattgggatgaactgttccagcacccttttgttaatttatcagattgtcagttttcttgtt

SEQ ID NO: 37750 - DNA, 268 bp, Glycine max
  Clone ID: PAT_MRT3847_134089C.1
gcttggacctttgggctgattgagtgcttgcatggtcgtgagaagatgatagaagggggtatagaagtacgaagaataacactagaccagcggagattgccgaaatctcaatgaggctacctatgtccggtaccacagagatggaccttatcacgtttacagaatcgatacatcagaaatataactcgcacacaaagcacaccgacgtacaccatcccaactaacctcacgaactcacgtaaacgtacatctcacacgatctcctcat

SEQ ID NO: 37751 - DNA, 633 bp, Glycine max
  Clone ID: PAT_MRT3847_13408C.1
ggaggttattatgggacagactccccacgaaggacaacttgatcaagaggcagattcaggtagatgatgatttatgtcccttctgtcacaatcaacccgaatctgcatctcatctttttttcacctgtggcaaaattatgcctatttggtgggaatacctaaattgggtaaaggaagacaaggtgtttcactgtaggcctttggataattttatccagcacttctcctcagcatcttccaaggtttcgaacacaagaagtacaatgtggtggatagcagctacagtttcaatttggaggctcagaaatgacattatttttcagaatcaaactttggacatcaacaggatgacagataacactttattccttttatggacctggttgaggggttgggaaaggaattttcagattccttattacagctggtcttcgaatatgtctatagcttttagctaaagtctatgttagtagggttttcttttgtgcagggtgttgtatctcctgaattgtcaggactccttttctgtattttgtagtacctctggtactagattctataatatattatatctttggcttccaaaaaaaaaaataaaaaaattattcgcacatatggataaaattaccttac

SEQ ID NO: 37752 - DNA, 820 bp, Glycine max
  unsure (1)..(820): unsure at all n locations
  Clone ID: PAT_MRT3847_134090C.1
gaatgttttggaggcatttcgaagggctataacaacttggagtagatggattgatgccaacatggatcaatctaagtctatggtattcttcagaggctattctgcttcacatttcagtgggggacaatggaattctggtggacaatgtgacagtgaaaccgtgcctatcaagaatgagaagtacttgagggaatacccccctaagatgagggtattggaaaaggttttgaagaacatgaaagcccatgtcacctacctaaatgtcactaaaatgaccgatttcagaaaggatgggcatccctcgatatataggaagcaaaacctatcaccagaagagagaaaatcaccattgaggtaccaagattgcagccactggtgcctccctggtgttcctgatgcatggaatgagattctatatgctgagcttctgttgaaagagtatcagaatcagcatcaacagaagcaaacataggtaaaccacaaatcacttatattgaatgagtttttagctgaaagcagaactagatgcaatatacactatatttgttccttccacaaaaggagagggaaaggaacaaaccatacagagcaattttttctagttatgtaaaggttcaaaagcttatgtttagtgaaataaaagatataagttgcttggaagttgaaactactcaataatttttttcatatgaattatacangctagataggacttggagaagatagaaaataatgggtggcttagacttgtattgaaatttgtaccacccccgtaattttgtttcttaaggctgagttctttnggaattctcgtattatg

SEQ ID NO: 37753 - DNA, 636 bp, Glycine max
  Clone ID: PAT_MRT3847_134091C.1
ggctcgaggttctagatcgcgagcggccgctcgttttctagaacgatcaacacagttgttcctatgagaaatacgcccacatcaatccacgccacccctgtcaaaatcaatccccagataccattccccttcctataacaaacacaaaacaacccaatcattgttggttcacatccgaatccacaacacactgttaataattattctgattcacgaaaaacaggaaaaccccaaaactctctttgttcacaatgggcacagagacctcatcggtagatatttcggaacccctgctcttggatcctcacgggaacgaggaaaaggaagagtatttgcgcgaagaggttccggagtggaaggagcagataacgataagagggttggtggtgagtgctgtgttggggagcttgttctgcatcatcacccacaagctaaatctcaccgttgggatcatcccttctcttaatgttgctgctggcttgttggggttcttctttgtgaggacctggactgggttgttgaccaagatgggatttttcaccaagccctttactaggcaagagaacactgttattcagacctgtgttgttgcttgctatggccttgccttcagtggggggtttggttcatccttga

SEQ ID NO: 37754 - DNA, 919 bp, Glycine max
  Clone ID: PAT_MRT3847_134092C.1
ttgccttctcgtccgcccacgcgtccgcccacgcgtccgcccacgcgtccgtctcaatacaaagatgcagatattctcgtcttcaacactggccactggtggactcatgataaaacttctaaagggcaggactattaccaagaaggtagccatgtgtatgctgaattaaacgttcttgaggcattcagaagagctttaacgacttggagcaagtgggttgatgccaacataaatccgtccaagaccatggtcttcttcagaggctattctgcttcccatttcagtggtggacaatggaattcaggtggacaatgtgatagtgaaactgatccaattgacaatgagaagtatctaaccgagtatccagataaaatgaaggttttggagaaggtgctaaagaatatgaaaacccatgtgacctaccaaaacatcactagaatgacggatttccggaaggatggtcacccctcaatatacaggaagcaaaatctatcccccgaagaaaggaaatcaccattgaggtaccaagactgcagccactggtgcctccctggtgttccaaatgcatggaatgagattctttatgccgaacttctgttgaaacagtatcagaatcagcagaagagaccataggtatacaacatagtgattcaaaatagttggtctcctttctctttgagacctctttaatgctactttttgtggttctttaagaataggttcattatgtatcataggttcattattgtgttgtttttctttattgccccccggaacaacaactgaatgagcaatcaccttactgctagagacacaagttaaaggtatttgtactctaatttctttaattttcacatctcgtggaactgtactctcccttatttcaccattttcaatgaactttacatttccagtcttc

SEQ ID NO: 37755 - DNA, 459 bp, Glycine max
  Clone ID: PAT_MRT3847_134093C.1
aattcggctcgaggccgaggtgacaacacgttttacgtaagacgtagaaatggggtcgtcgcctgtaggaatgaagactccaatcggacgagccagaggattatggaacttatcaaccgaccaggaatggaaaacacctgaaaccgaacaagaatgtcttgagtattaccaagagaaaatagcccatggccaaaataaacgactccttcctttgcaagaagacctcgctgattggttaaacaccaccctcaacttggaccacataacggggaccaatttattggatatacttgacaatggagttattctgtgccacttagcaatggtcatacaggaaagagctaaggatgctgtgagtactgggctagctgcaggtcctgttccagtaataaaagggccgttttttgagaaagcatcgaggagaagttttttttctcgtgataatcttgagaaattcat

SEQ ID NO: 37756 - DNA, 792 bp, Glycine max
  Clone ID: PAT_MRT3847_134094C.1
gaaagaaataggagagatttccatcacagtaaaagcacaacaaaggttgatttcccaatttataaaatatttactgtctgatctaatcaatcagaatacttgttacaataatgaaatcaataatatctattgactgattataatgaatattgatcgattctaacaacttaattgggaattttacttttgcattagcaccaagtcttgtttgtttccatttccaatatttttaaatatgagaagaaacgtggtttggtttttgggattttgctagttgctagaaatttagtcttatatataagttggtatagctagatgcttataattatgtaatgtatgatgaaattttcaggtaaagcatatgcactggtatgaagtgggtgagaaagtttcagtttgtgaatgtagatgcactagagcacgtttacccccaagcaagtaaagctttgacatctctttataactgtattgatgtttgagttagcacaacaatctctttggggttcattaacgcatataccctgatgctgtctgttttcttattattatataatttcttagaggatttttttgtgtcggaacatgtgatctttttatgcataccaatcttctctttccatggttgcatttttttttccattcttttcctagtgttgatgttaggctaatcaatgcttctattaaaggttaaagcaatgtggtcattgggttaatttacttatgttagctttcaattatctggaaaatgggtgtgccacaccttcttaggtgaaggaaccaagattgatgaaa

SEQ ID NO: 37757 - DNA, 1120 bp, Glycine max
  Clone ID: PAT_MRT3847_134095C.1
aaaatctacggtttgggcaatatgtggttccagagttatttgttcattgggaaggtttaccccagaattggaatgtatattctttgggggtaaaattgtttacaacttctgactggtaagacccctttttggggctagttagaaatatgaaatgtcgcatttggaaaaggaaaaccttaaagcagtcttggacttttcatctggtgaatggccgctttttcaaaccgaacagctggcatatttagcattgaggtgttgtgaaaagacttggttgaaccggccagaccttgtgtctgaaatctggagtgttcttgaaccattcaaagcaacttgcattgacacgccaccacatttgatttctaagaagcttcgtcggattccttcccattttgtctgccccattgtccaggaagtaatggaagatccatacatagctgcagatggctttacgtacgaagaagaggcaataagaggatggttgaatagtggccacgacacttcccccatgacaaacctcaaactagaccacactgatttggtacctaactatgctctacataatgcaattctggagtggcagcaacagtgattcagtgaaccttcattggccattacacttgcacatattacactggtgtaaatcatacttatcctgtaaaaaaaaaagaaaaatctaaaatgagcaagtaagggtgtgtttacacttgaattttagtaagttaaaattataatgctttttaagatcacaatacatccttacatactcattttagaagcttaactttagaagagtcatgtctaaattctgatagcaagttcggatggagaagggagtaaagagggaaaacaaatttttaattaaacctttcccttgaattagagctttctaaaatgaagaatgatcatgtaaataaaaaatcttatttatttctatgaacattttaatatttaaagttctccaaatttgaaggattaatatgtaaactacttgaatgaaacatattatttgatttcaccactcaggaaatgagattgttttaattgaaattcatttcctttgtaaacgccagaaatgtgtttgtttattttccaagtaataagatataaaaattgcatttat

SEQ ID NO: 37758 - DNA, 531 bp, Glycine max
  Clone ID: PAT_MRT3847_134096C.1
atattgtgggtgtaaaatcaaataacacatggattatgggaaatgcataagcactcattaaaagggttctttacgagtatacatcagattcagaaaatatactattaagggatatgacgcgttatctgctctcaacttatggcataaactacacatccacatgctagtgaattacttgaccagcagtatatgcaagcctttgcccatctattggaagtgcttatatacatatgtccaattggatctaaaatcccggcagaattgaaaccgaatgcttgcgctcctcagttatcaccttgagcacgtgaattagaaatacaggtaccgcatcacaagaattactctcattatcatcgacgatgcagaacacactaatgcatcagtcgcagaggctaccagccctgctagctacctacgatccttactatagtgatggacaaaatagagaatccgatgcctagaaccacataggagggcatagaagtccacaaagaaatgagaaccattctgttccacattcaagacatggaa

SEQ ID NO: 37759 - DNA, 339 bp, Glycine max
  Clone ID: PAT_MRT3847_134097C.1
tgcaaaaacacaacaaaagggctctcaccattgttggaatatgggtaccaccaatagttttaatgcaatcctaaaattattcatatataattatatccatattatgaaaattacatattacaataatgaaaattacaattacaattttgttatcattagataattatcacataccttaaagtaagggtgaaacctggtgctttctcttattttagcgggtaaagtcagtcttgatttagccatcaaatcaattgccttgtgaatttaagggctttaaatcttggaaaaaattttaatttgcaacaaattttgatcggcccaatgttttaacaaattaca

SEQ ID NO: 37760 - DNA, 1788 bp, Glycine max
  Clone ID: PAT_MRT3847_134098C.1
ggaaaaaccagacgaagagtgaagagtgaagagcagcgaggaggatgaaagaaaggcgttagagcagagtgaggcatcatcagaatctgaatctcacatgggcgaacagacgctaggtcaagcacaacccctccccgcccccgatgctgccacggcccactccgaactaaacaatgtccctcagccgacaacctccccagctacgaaaatccccctccgtccccgcaagatccggaaggtctctccggacccctccacctccgaagcccccatcaaacccgccaaacctgttggccgcaacaccacctccaaggctgctccgcctcgagccctgactgtggtccctcgcatagtggctcgctcactctcctgcgacggcgaggtcgagatctcgctccgctacctccgcaacgcggaccccctcctctcccctctgatcgacattcaccaacccccaaccttcgacaatttccacactcccttcctcgccctaacccgcagcatcttgtaccagcaactcgcgttcaaagccggcacctccatctacacgcgcttcatcggcctctgcggcggcgaaaacggcgtcgttcccgaaacagttctcgcccttactccccaacagcttcggcagattggggtttcggggcggaaggccagttaccttcacgatttggccaggaagtaccagaacgggatactctccgattccgccattgtgaacatggatgacaagtcgctcttcaccatgcttaccatggtcaatggcattggctcttggtctgttcacatgttcatgattttctcactccacagacccgatgttctccccatcaatgaccttggtgtcaggaaaggggttcagcttctctacaacctcgaggacttgccgcggccctcgcagatggaccagttgtgtgacaagtggaggccttatcggtctgttgcttcgtggtatatgtggagatttgttgaagccaagggaactccttcgagtgcggtgacggtagcgactggtgccggcttgcagcagcagcgccatcaccagcatcaacaacaggagcaacagcagcagcaacacgctccacagccacagcttctggatcccataaatagcatgtttaatcttggggctgcctgtgcttggggacaatgatcgctgtcggaatttgtatcaggcttcgttagcagtcgctcaggcgtgaagttgctaagccacgctgtgaagtgtaatgatagatcttagtactgaaacttggacattgggagcattgaagaattagtgtatgatgatcgccttgtgttcaataaaaccagtgcaagattaataaaggccactccttaatttttatttatttatcagtaattgtagttgttggaggcctattatgtcaagtcgacatttagtatgacaagactgattataggagggcagtgcttcactgcctttgctgcatggtaatgtggtttggactttttggataatgtaattaatgtatggagtccttatcttgcgtcatgcttctggacgggccctttgaattaagtgaaattcgcatcatgtaaacgaaaaagatcggtaattcctatccgtaatagaacttaggttctggatttaatatatttgagtaatgcagtttgtaatgtatggagtccttgtcttgcgtcctgctagtggactggcctttgagttaagattcgtctagtgtaaaaacgtaaaagatgtgtaattcctatccgtaatagaattgtcgtctactatatttgagcaatgcaatgcagtttgcatcc

SEQ ID NO: 37761 - DNA, 447 bp, Glycine max
  Clone ID: PAT_MRT3847_134099C.1
gtgagggcgacgggattttaaactattttagcttaaatcattaaaatttagataacaaataatcttgaaagtaaatgcctgcataggggggaggggggtatattaagggctcaacaaacttaatccctcaattaaagctttaaaaacagaggtgggtgatcccccttttttcatggcccccctattttgatgggaaagcccctttggtttgttcctcatttaaaagggtttttcccctggaattatccttttgactggcttttccactggataaaatgaaaaactatttccctgcattccaagccatgttttaacacccacagggcccccaattttaagggcctcaatcaccaactttttattgaaaaattggtcggggaaaataggcccagggaccctgggaacccctgccgtcactggtttcaacggtgaattccatccccaatg

SEQ ID NO: 37762 - DNA, 236 bp, Glycine max
  Clone ID: PAT_MRT3847_13409C.1
gcggctcgagaaaaccataagtgggaaaagtggaaatggatttaaaaaaataatgctaagctttgtgggggtactttataagaaagagggtgagatagccacaagagattcaatcaaccaaaagcaagatatgtagtggatccaacccatacccaacaaaccccacattatatatatctttaaatcaaattagattattgagtgcaataccaaccataaccaaactttgagctttt

SEQ ID NO: 37763 - DNA, 1271 bp, Glycine max
  Clone ID: PAT_MRT3847_1340C.1
cggacgcgtgggcggcctcactcactcggcggcacacacaaaaccctttctcagtcactcactcggcaaaagagaagcgtcgacggtctgcacggtgggtgcttcatcgacggcagcgacctgtggcggaggacagggttcccttcgctcttggagttcgcatcgggcagagaagcttctctgcattgcgctgggacgcaaaaccctggcagcaatcagcaccacggcgcagccgcacacctctgagacgccaccgcaatcaggatgagtgaacttctttttgatgacattttcaaggtcgagaaggtagaccctgatggtaaaaagtatgacaaggtttctcggattgtggcacggagtgagaagtgtgacatgaacatgcttctagatgtaaataccgagatttatccaatgggggaaaaagaaagattcttgatggctttgtctccttcacttgttttgaatactaaggatggttcagtgtcaattcaagacaagtttgaatacatcatgcacgggaggttatataacattacgaaacctcagcttgaaaagaaagaaaagaaagagaaacgttcagaatctcagcctgaagagaatgaggaatgttcaaaacctcagcttgaagtggaggtatatgcatcgtttggtgggcttcagttgatgctgaaaggacatgcttcccactgtgttaagtttgcagtcgatcagaagttgtttttacttataaggaaggttgaaagttgatgttggtgatgggcctgaaaagaaaaacatgctagcattaagttttaagtaatctgtataaaataaattgatttttcagaagaatgatttttgtgttttgaaagtttctctgaagttagttttttggtacattagataatttttaggcattctcttatatttattaaactgaaatatttttgccatatatatataaggaatcaacttacattaagaataactcttttagagtttcttttcattctcttcattcatttttaaaaatctaatgattgtaatgtcattaattttatctgttagattacaagaaaatgaagataaggatgaagtgtagctctaaaagagttagttagtgtaagttgatccccctttctctattttttaattggtaggaatctaaaatggtatcaaaagggttataatagtcgtatatcattttcaattaattaagttagacccttctctatatgtgttattaggaatctgtaatttatattttcattatagacatttatttcctttat

SEQ ID NO: 37764 - DNA, 238 bp, Glycine max
  Clone ID: PAT_MRT3847_134100C.1
ggtgagccgcacgccttcgtttttagagagaaaaaaaatcaatgattttggatttctaaatgcaaaggtctatgggttgcctcacaaaaggtagtgttaggaagaaacaatccagatcaatacatatatatttatatactgaatcaattgataacgtcaacaaatccttagcttagaatcaataaaacctgagaataaaaatccacgattcaacacctcaaaacaaaaggtgaaacaa

SEQ ID NO: 37765 - DNA, 914 bp, Glycine max
  unsure (1)..(914): unsure at all n locations
  Clone ID: PAT_MRT3847_134101C.1
tcatgagagaaagagtgggtgatagtgaggttctgatctaattcagagaagaagaaagaagaaaggaagttctggcaaaggaaggaaaaggatcctatggatcccctttttaggaatttggtataggtctatttgtccgttttgagtttgtggattccttactgttcaccccagtcctttttccttcttacattaaacttttatctgttcttttctacataaaatctcaacacaaagcacaaaaagacaatttcttttcattctcatcttcaattctttgcaattggctgtgctactcaagtctacttctctacaatacgtctataattcaggctgataataaaatctctgtcccctccatcccccttcacattttatttacctccaaactctcatattcgcttagttttcagtgtctttggaatccagttcaactgaaatttatttgtattattttgactttcttgaatccgactctattagtaagctagtctgagatttccaagagagtcctagttatttaacagagaaaatggcaactggggaacaactaagctccagagggcaagcatggttttgcacaacaggattgccaaatgacattgggatcgaagtggatgacatgtacttccatctacacaaggcgagctttccataccatactcattcgatattcttatgttatgcaatatgcatgcacacccaacaatacgcttgaatctggactttgttctctaaaatttggccgtgtcgcgacatgtttcatttcagtctcctctgatgtcaaagagtcgaaagcttcaacagctaatagctgagcatgaaacanatcatccctcagaagctgaagagaaagaaaaacaccgtcacttggtgttcacagacttcccaggcggctccgagacctttgaatt

SEQ ID NO: 37766 - DNA, 321 bp, Glycine max
  Clone ID: PAT_MRT3847_134102C.1
aggaggaaataagccaaaataatattattaggaggagggacaaacatcaaaaagaaaaaaaaaacattggaacaaacaagacttgaatgataatttaccccgggaaatatatgtagagagaaagccaaattcccacataaccccccccccaacagagccttggaacacaaggaatatgaaaaactaattgggagagattttaaattaaagagaaatgataaaaatgctgaaacccaaatacgaagacaaaaaatggaaacaatacccccgcccaaaatgcatatgtataagtgcgacaataacccgacagtaaaaaaagga

SEQ ID NO: 37767 - DNA, 155 bp, Glycine max
  unsure (1)..(155): unsure at all n locations
  Clone ID: PAT_MRT3847_134103C.1
cgnntccgcttttgtctcaatttcgtaccgcccctcaacccagccgtgaatggacccctcgtctccgccacccgcgcggcgcacccgcatacccctccgtctaccccacttcccaggagccacctccgagccgcnctgcctccgcgtantccccc

SEQ ID NO: 37768 - DNA, 273 bp, Glycine max
  Clone ID: PAT_MRT3847_134104C.1
gttatataatctatctcgctagttttcattatctcttttgccactatcatcagatacacgcagtcaaggtcgtagtgatatgccccactagctagagaagccactcatgtatctaactaaaatggacttgagcggagagggcctgaactatgatataattatgcgctccactccgctgccgcttaacgcactgctcaatcaggacacaaagctcgacattgaactcttatagcgcaatgacagggaggaacatataagctctacactcagatc

SEQ ID NO: 37769 - DNA, 546 bp, Glycine max
  Clone ID: PAT_MRT3847_134105C.1
tttcccttttttttttttttttttttttttttttttttttttttttttttttttttttttttttttttttttttttaagggaaaaagggttccaaaaaccaaatcccgggtaaaacaaagggggggggccaatttgaaaaagaaaaatggaaaaaaggggtcgggccaaaagggccccaaacctttccccccggtaaaacccccaggggggggcctaaaaaaaccaaaaaaaaggggggcccaaaatcaccccagcctcatcataccaggcccccgttttagggggtccccccccaaaacccaacccaaaagacctgacaatggggccccccctttctgcaaaaggtcgggggggtatctttttgcccgggcccaggaagggggttgaaaccgcctccccctatgccaaagggaaccccccgaaaaaatcccttacccccccatttttaacacccaaaaccgggggccccaaaataaaatccaccctcggattagccaaaaaccccaaaaccttggagtttccaataggaaaaagcagcccccaaa

SEQ ID NO: 37770 - DNA, 375 bp, Glycine max
  Clone ID: PAT_MRT3847_134106C.1
ccggaattcccgggtcgacgaattccggaacgagatagatcttgtagtcgggccccggcgcgatgtcgccttcgaaggcgatcgacgaatcggtgatcgtcagcttgccgttcgcccagtgcagcgcatcgctgcccggcaggttgcgttcgaagcggccggtatggcgcgtgttttcagcggcgacttgcagcgcgaccgcgcttgcgccttccgatgccgtcaggatcggcagcacgtagatgccggcggcgaatgcaacgagcgccgtcgcgagatgcgacgcgatcagtatccagattctggttttcatatcggaccctttgaacgagaacggaaggtggcgccttgccacccatctgtagtcgcgcgagc

SEQ ID NO: 37771 - DNA, 742 bp, Glycine max
  Clone ID: PAT_MRT3847_134107C.1
aattataatacacatttatgatataagaaacacaattatctctttagaagtacactcttcatgttattaaacattatatcaaaaacttgttatcaataacataataaattctagtaagaaattataaataaatttaaatgtgaaatattttattccgtaacaacacaatgcatatatataactatgtaagtataagtgtaagaaaacaattatttaataattcagcatcatcaccctgtactaatatgcagggttggaatgtgagcaatctttggccagtcttcgcctcctgggttctggcaacgctgcttgagtttggggcaggaataaccaattgtaaaatatgaaatggatccgggaagaccctcctctggtagctgttggaggttgggacagttttcaagaatcaatttcttgagagaggagagctgacagagccccttgtagtccagtttttttagatttcgaaaaccactgatggttagacaagtaagagagagtggcagcaaaccttcatcaggaaaagattccgcatcctgctctcttatcgacaaggtttccagagagggattgtctcccaaagcccctttcagtgacgccatgagtccggacgagcatttatagagtcgcatctcttttagatttgatggcaaacctccttcagggaacgactcaactctaggacaatcatctattcgtagctccttcagagatggaagctgcatatgcatgcttccaggca

SEQ ID NO: 37772 - DNA, 218 bp, Glycine max
  Clone ID: PAT_MRT3847_134108C.1
cgttgttattggatatgtcgtttgaagactcttatacacccgaaaacttggggcgcaaggagcataacccttgaagtggaatacttcatcaccatgggcatcggatatactgagatgcatgacaaggaggggatcctacctgaccagcctagacttatcatggtgggtcaacaaattgaggatggggggacgcttgacgcttacaacatgccaaagga

SEQ ID NO: 37773 - DNA, 468 bp, Glycine max
  unsure (1)..(468): unsure at all n locations
  Clone ID: PAT_MRT3847_134109C.1
tcgagccttcatcttccaataggcagcatgaccccaaatccctatncnncttcattcacagatgatcagaatgctgnctcgtctccagataatacttgcgaagtgagtttcgtaccaaatagagctagagtcgcatattattataggtgatcgtcccgatagatgcanatgagagttggcttcagagagtttagtgcaaataaccatgagaggtagggttaggagagtgagtgtatagcctttgtctaggctaggttataaagagcccaaccatcctatgttacccatcgtaaagagcttgggttatccgggccccaaatgcttagcatgatagcacccaacaaagatatttgggatgggtgattagcntnnccgttcagaaaatatatagtgtagcaaagcctagnncattcccaagggatcccnnngctgttcttttggaaatagctgagtnnntcattcaagcag

SEQ ID NO: 37774 - DNA, 397 bp, Glycine max
  Clone ID: PAT_MRT3847_13410C.1
ttgtgaaggccgttggagtttcaaactatagtggtaattctttattactattatctgtcttgaagtcttcaatattgtgcaaaaccatgtatcagttctaccgagaaaagggtaattcccttaatgtataacagcttaatgtgctaagatgaatgtttgatacattttttagtaagaacataattagattgatgattaatattattaaggtttatcagagatgggatatatagagaatcaaataactgttgggagagatcctgacctttcaaacagcctgagacactctgtatttcctatttttatgttgtttctgtatagagtgaggaagagttctactaattatgttcaaacctgccactgttattggtatacactatatatatatagcacaatt

SEQ ID NO: 37775 - DNA, 286 bp, Glycine max
  Clone ID: PAT_MRT3847_134110C.1
cccacgcgtccgtgaaaaaccagtttctctcaagcctgagcacattcggaatgagaaactgagggttcttgaatcagtacttcctattaaagatgatgaggttgttctaggacaatatgaacgctataaagatgatccaactgtgcctgacaattcaaacactcctacttttgcaactgttattctgcgagtacacaatgaacgatgggagggtgctcctttcatactaaaggctgtgaacgccttaaatgcaagaaaggcagacataccgcttcaattcaaggat

SEQ ID NO: 37776 - DNA, 378 bp, Glycine max
  Clone ID: PAT_MRT3847_134111C.1
ctcccgtcgggggggtcagagaccactgaccccgcaacaaagatgctgaacacaagtccccttctggcgagctggtaaccactctcactttgatctagaaagccaccctattataacatcgccattgcacccggaagaccatgcgagatcaatttttctagaaaagagagatggagaactggggagcggtaagattgctatccacacgatagagaactcaaccaacaggcgagatacttactcaatgcgaacgaatgtgatcctagagaacgcctagggagtaactgttctatgtgacgctcaccttcacgcttatcatcgtttgccgtctctggaaagaggcaggactacatgatccgttctaccaagttgatctga

SEQ ID NO: 37777 - DNA, 218 bp, Glycine max
  Clone ID: PAT_MRT3847_134112C.1
caggggtgggagaacaaaacgttttgtttaaccacaaatttacaattgtgcattcaaggcaaaaatggtgcatatgaaaaaaccaaatgcccctggacgcaaggggttttaatacaggctattccctactcaagccgggggcgggaaaattaacaaattcatatttgttcaaattttaaacgggtttttgttagaaccttggaaaggcagaattttgg

SEQ ID NO: 37778 - DNA, 344 bp, Glycine max
  Clone ID: PAT_MRT3847_134113C.1
ttttttttttttttttttttttttttttttttttttttttttttttttttttttttttttttttttttttttttttttttttttttttttttttttttactcaattgaagcatcacctttctcactcactcattcatcaataactaaagtgcaagagcttacattcaacggttcaacaatcttttctacaatttatctttctcaacgtacagagcaagtatcccatttgctgaggcatagcataaattaagccagcacatcatatgcaaatgcttgctacatataaatcaaattaaatatatttatatataaataaaagggggctaaatcatccggacgcgtgg

SEQ ID NO: 37779 - DNA, 1076 bp, Glycine max
  Clone ID: PAT_MRT3847_134114C.1
aattcggctcgagagaatatacaaatttgagtgcggtttcgacgcaatagcgccaacagcaaaatctagttgttcgccgtttcggaatcagagggagagaagaatcctttccaaacggcgccgtattgtcattcacccctctctttaaaaggggaactctaacaccagaagaggcaagaaggcccgagatcaaattcaagagattcccaaacttttttactttttattccctttttctcactatacaatacaaatacacattcaacaattttcgattcaagttcaaagccatcgacgagtgttgaggaagaataacaatgggaatgatagtggattttgaaaatgaccaaaacgacgccgttctggttccgccccctaacttcgccatggttgaagactgcgttttccgatccagcttccccaccccttccaatttcccctttctccaaaccctaaaccttcgctccatcatatacctgtgccccgagccttatccggaagaaaatctcgagttcctccgctcgcagaatattcgcctctttcaatttggaattgaggggaaaacggacgtttctatgcctgttctcaaggattctatcatggatgcactgaaagttttaattgatgtgagaaatcaccccattttggttcattgcaagcgaggaaagcatagaacaggttgcctagttggttgcttgcgaaaattacagaactggtgttggtactcctcaaacacagaggacaaacgatttgctggtgctaaatccaggacaacggatttaacattcatagaaatgtttgatgttctaagcctgagtcagtgcctttacagcatcatctaccagtaccatggttcaaagaagcgtcggttgttgtataaagatgagaatttacagaagccccgactgacatcattttagctgtgccgggatcttattcttcttacccttttattttgtagaactcatactcaatatagttgctcagattcatacatcgttgttttcaaatttcttttaagactactgctaaagaaaaacatatggtcttgtcttttccacctttcctgttaaaaa

SEQ ID NO: 37780 - DNA, 348 bp, Glycine max
  Clone ID: PAT_MRT3847_134115C.1
gaacaaagaaagaaagaagttcggagtgagagaacgtaagcggcgttgttccttctttgttcattgttcattcacatacactattctctctttctcgcaaactctcaaaccctgaaacctttttctttgttgttgtttcgttctaacaccttcactttggtgggacgaagaacctgaaaaaaaaaaccttttttatttatttggtgaaactgagacataaacgtgtttttcctcggagacacaggcatcctttcgattacttgaacatatggtttgctcgtaatgttccttgttcgtgttcagttgctaccctcttggcccctttttaagtttcggtgattttccgga

SEQ ID NO: 37781 - DNA, 472 bp, Glycine max
  Clone ID: PAT_MRT3847_134116C.1
gcggccgccctccaatcttttctatagacttaaaagaccctctgagaattcgagaaacaatttttccactctacttcatcctatgctaaaacggacttacaatggtgaagcttctgttttaccacactcttctcctctcgctctagctggaatatatccacgaccttgcggcgcccctgaaggaaaagcatggacaaactgaacgaccacgctctcccattcccactggacctcgtaagaaacttctaaaacctctaactggggcttggtaaaccggagaactccctcagggaatatgatgcatacaccaacccccatgacattcttatatatggaataacttcttccagacgaatctgtgagggtaccattcaccgcccgagcctatgctccatcttctggcgcctatgcaaccatgaaagctgttgaatacccctctttatagcgatataattctgcagatatgtgcttt

SEQ ID NO: 37782 - DNA, 462 bp, Glycine max
  unsure (1)..(462): unsure at all n locations
  Clone ID: PAT_MRT3847_134117C.1
ccacgcgtccgaaacttgctgagaataaaaaggtcgctctgacactcaatactggtaaacccgccgcaaaggggaaagtagcgaaagatacctaacatagtctcataagagtcctccaagatgctttcttagttttcatggaggaatttaagaaggcgttcaacaaggaacatcccgacaacaaagcattgtctgctgttttcaagagctgatggatcaaagatggaagacgatgtctgatgctgaaaaagcaccttatgtggcaaagtctgagaaaaggaaagtggagtacgagaagaacatgaaagcttataacaagaaacatgcggaaggtcctactgatggggatgaaacaagagttngaaaagtctgtatctgagagagaatgatgaggatgatgacagaagaatgcatagtcgaggaggaggatgacgattacagaatgcactgatgataataaca

SEQ ID NO: 37783 - DNA, 468 bp, Glycine max
  unsure (1)..(468): unsure at all n locations
  Clone ID: PAT_MRT3847_134118C.1
gtacctgtccataattcctttttctacccacgcgtccgatcggttccagaaaaccacaaaaggggacaggggtgcactttaaacaacacgtgagaataaaacaacacanagagaaacatcttaataaactctcttgtctgaaaaacctgatttcttctcttcttctctactctttcgttcacatcttcaatctctgaaaatgagatagtgcattccaatccacatctgtcaggcctgtattcaagatccaaactcctgctgatacctctactgcctaaaacaccgcattcagcctgatgggcaaattccaaatgataacactgttggtggaggtgatgatgctttcaacaccttctacaatgaaactaatgctggaaagcacgtcccctctaacgattttcttaaacctccaccctactatgactgatgaactcaggactggaacataccaacaactatttcattctg

SEQ ID NO: 37784 - DNA, 328 bp, Glycine max
  Clone ID: PAT_MRT3847_134119C.1
gactgaaattacagcccaagtatttacacacaaaacaaaggcgggcaagcagagaacattttgaaaaggaatcccccacaaaaaaacaaagacccagaagggccaggattacgccagtagcacgaacaacaactcatcatgcgcagccagcaagaccaaccacgctgactaaaacacgaaaaacagacacgaaggatcaccggaaggcacccagtctcaccaaaaaacggaagagacggcaatgccgccgaacaaaccaggaccatgcctgcagagcgcaggccaggcgacaatgggtaagaatggggatagcagtctgccgggtgaa

SEQ ID NO: 37785 - DNA, 203 bp, Glycine max
  Clone ID: PAT_MRT3847_13411C.1
tacggctgcgagaagaccacagaaaggcttgatacaagcatgttcatttttttaaaactgacagaaaatattgactaacaaaacgctaactcacaaatcacataggggttcattggtggccatacccccaacatataacagaagaccaaaggttttctttttaccagtttccagacacagtttcatcgggggccgccaatatt

SEQ ID NO: 37786 - DNA, 519 bp, Glycine max
  Clone ID: PAT_MRT3847_134120C.1
aactctttaacaacattgactattgaaactttttaatatatttttaattgttccaatcctggaaaaagagacttaggcacccaatacgagagtcttctatgaataagaacctaagagaaaattacccttaacccaaactagaaacacctattttagcatgtcttccacgattcattcacaaacaaaaagatgtgtaaaatcatacacaaaaacccagagtaaagatagacacaacctgatccatcctttatgcaaaaccttgcttgactgaagaagtgttcttgttatctcgagaaagtgacacaactcacttatcacaaaagatattcacaatcaaaagatttaaaggtgagttacttttttaagcacttttcttctcttctttctttaactaataacaacacatgatcttagctcattcagaagctcaaaatattatgtctcgttattttttaagagagcacaagcaggttatttatagaaaaaacaattataacctcatgtaatcgattaaatcta

SEQ ID NO: 37787 - DNA, 572 bp, Glycine max
  unsure (1)..(572): unsure at all n locations
  Clone ID: PAT_MRT3847_134121C.1
ctttttttttttttttgtgaacggcgctagtgcctctcttgactatataattgtgcgttggttttgatcttaattttttaaaatgatttcttntaatataatatttttgtttttagttttgatctttcatattaatttgcttatgttaatattgtttatatgactcgcagaaggtcactccaacatgatagattatacgtcaatactaaacaatagcatacacacatttggaacaaaaataaattaatatatattataaggattattatgacaaaaacaaaatcataaaacaatagtcattcaggaaatcaaaaatctaaaaactcttgcgtgggacgagctattgtgttccctttgagttcatgaagttcaccttcagaacaaaaatcatctgccaaagaaagatttcattgccctcaagtttagagagaccaaatccaaaagagaagaaaagaagcgctcttatgaagcttttaaagtgcagatggatgagtatgatgcttcagataatagtttggaggattcacaaatgatggagtgattctgatgtctagaaatttcaaacatatact

SEQ ID NO: 37788 - DNA, 315 bp, Glycine max
  Clone ID: PAT_MRT3847_134122C.1
tcctttcttccgttttggttggattatttcgggcaagataaagagagaagggactccaaattgttattaaaaccaaacgttgctaggctccacttctaggaatggcttgtgggatatctcttgctcttctgatcacaacctgtgtggttgcagcctctgctaaatacttcaaccaagactgtgagataacattgggtgatggtcgttccaacatccttattagtggggaacttttcaccttgtccctaggcaagacctatggctctggatttcgccctagacatgagttcttgtatggaaaaattgacatgcaac

SEQ ID NO: 37789 - DNA, 323 bp, Glycine max
  Clone ID: PAT_MRT3847_134123C.1
atgtgctcgtcattttttgcgatacccccaaatgatttatcacttgggtgccaccaatgaattggacaataatatgaaccaaaaagccaatacactgcctcatgatgtgggtgactctaccaatcatgcccgtgaaggaagtcattcaactgcacgaccacctccatttagatggtttaaatgtctacaccatgaaaaccttcgatctatgggcacagcactatcatgattcaaacgcaatgatgaccaacctatgaatagccaggctgctcgccaggcaatgcccctccgccgtccacggatgaaccaaatgatccgatcta

SEQ ID NO: 37790 - DNA, 317 bp, Glycine max
  Clone ID: PAT_MRT3847_134124C.1
gtgtgttgtattttttttccttgatgttcaatctttttttttttttgttttggggtttatgccaaaaagcacagttggttatttccaaaaaaaaaaaaaaaaaagggggcggcgcttaaagagacccaacttacgaccccggtgaagcggaagaataagtttactttaggggaacgaaaaataaatcgagcggccgggtttttccaacctatgggtggggaaaaccccagctggaccaaatttaattaggtgtggagtagatccccttttgccagctgggggatatatgaaggagcccaaaacctctcattttaaaa

SEQ ID NO: 37791 - DNA, 448 bp, Glycine max
  Clone ID: PAT_MRT3847_134125C.1
aaccttttattaaccctcacttttccggaccaagtttaaccttccattctttaaggaccccctcccaagcttcctttaagaatgggaatccactaaattaggccatgggttaagtcttcggttttgggacctactttaacggaaaacagaaggggttcctgggggaattaactttggtggaaatggcagggccaaaaggggctgttggttggattggaagtcctccagctaaccacttccacaagggttctggaccagggtttaccacctggttagttaactttgagggaggaggttggggcaccaccgttcctactggcctttcccgtagggacactcgattaggtccatctaaaaaatgggttacttaactttccttttctgggtttttaagtaccagtaaaaagtccattccagatttctttgatgggacagattcaaggttagg

SEQ ID NO: 37792 - DNA, 1084 bp, Glycine max
  Clone ID: PAT_MRT3847_134126C.1
ggaattcaaataaaaatgtcatcatttactatttataatccagggtataagcatctaaaaaatctagaataccattttcacaagtgctgaagtgcattaatagattcagcggttgttccatacagcatccagtccttggtacatacaagagcctccagtgtctctggccgcaaggaactccgatactcatcaatttctttgctttttgaataaaacacagaatcaggagcaaccgtagaaactggaatggataatatatcccgggccatcttggaaagagtaggatacttgattttgtttagcttccaccaagctaatacatcaaagtctggtacacgtggtaacagtgattcttcaagatactgatctagctcagatttcgtctgttggctagtggtttccatgatataggcatcaaaatctgtaagaccattatcagacaacacagcacctcctggggattcctccatcttactgtggctttcagcacttccattttcagaatacaccggtcttagtggtaggggatgggctacatactcatgaaacagctcctgaattccatcatccacagtcctgatatagaaatgagcatcctcaccatagatttttgtgaaactgaactccacaagtttcatcttaaaacgaggatccataactactgcaagagccaaaaccagactacactctctccaatacttatcaatcttttcactcataattttattaaggttgctaatgaagggatcttcactcgtaactgcacgagctgcatctaactgcaacttccaaacttcgtgaaagaaggcaatagtagtgggatgagttgttgtagtaagaatgtttgctgcatcaaaaagtggcttcaagtagctacagaggatctcaaccagcttccaatcctgcatagatgggggggctcccttgtaatcaggatcagaagtgtccaaacaagaaaaaacttcctttagctcagaagctgccacaagcatttgatatgacctattccaatgaatttggtcatcaataaaaaggctcctttcactaggaacctgaagatgccgcttcagctccaagaattttt

SEQ ID NO: 37793 - DNA, 334 bp, Glycine max
  Clone ID: PAT_MRT3847_134127C.1
ctgttttttttttttttttttttaagcaattatgcatccaacattgggtacgggggattatggatatattaaaaaaaacctctgacatcaaacacttttttccattcagtaagacacccaccagtaatcagtttataagtcccagcagacgctacaaatatatatgctaatcaagtcgggcaaaatataataataatgaaattctggtagtgttacaagtctggtgatacaattgatgggggggatgaatatctggaccccctcgcggttttcttccgatagtttgggggaggcattttgggggtgggttggcgaaattaccgggcgggaccgg

SEQ ID NO: 37794 - DNA, 242 bp, Glycine max
  Clone ID: PAT_MRT3847_134128C.1
aggcgaatccagctttaatatactttaattgaagccgggcaacaatattatccacttaccacacacaccttgttattcttcaccaacccatcattcattacttcaacaccatgaatctctctattcattgacattttactttctcctgaactaccatttaagttaattcctcctgaaaaacccttttaataacaacccttgtcccacccccaacccttctatatttttctaattaaataatc

SEQ ID NO: 37795 - DNA, 228 bp, Glycine max
  Clone ID: PAT_MRT3847_134129C.1
ttcgtccacgcgtacgaaaaaaatggtttttagttcataatcttaatctcagtctaaaccgctccaagaccgagttgtaatcgatacctatctagtcccgcgtaatctggcacgtgaaattgcgcttaacctcgtcatacttggctcgcgactcattgtcaactacaccttcaactcggtccaagccgacttcagtcgcggtgcagatcaacgccggtttcatcacca

SEQ ID NO: 37796 - DNA, 1397 bp, Glycine max
  Clone ID: PAT_MRT3847_13412C.1
ctcgagccgaaaagattggtttgagtcggtatcgattcagttaaaacacgtcgtgtcctaagactactggtactaggtaggttgtacttctcttcatctggagaaacaaatggctaggtctgcgaaagggcatcaggatgaattcgacgaagatgatgaagaagaactcttaactggaaacatctcttccaaagtgaaggtggatgaacccagcacggggaagagggtgaaccctcatcgttcaaagcattcagaaactgagcaacgtagaaggagcaagattaacgaaaggtttcaggttctgagagatctcatacctcaaaatgatcaaaaaagagataaggcatccttcttgttggaggtcattgagtatattcagttcctacaggaaaaattacaaatttatgaacagacttatgaaggatggaatcaggagcccacgaaattaactccatggagaaataatcacggacctgcagaaaatactacagatccttctcaagctactcaaaatgggtctgttgatgagaaaaataacaatgtctctccattgttgcccaaaaatgtacagaacccgatagagtctgacttctcaatgacaactattcagaagggcaacatccctggttcaactacagaagcagttcccctgcccatgcaaatgcgattggacatgtttgatccagttgttagcagtagtatggcaacccaacatctgctggaacctgtatctaatgttaacatgctttcccatacccagcctcaattgtggcttgataaacgaaacaagggcaactatattcttccacataatgatacaatgaaggaacaggaggagctggtgaatgaaagtgggtcagatagcatctcaagtgcctattctcagggaattttagattctctcacacaagcactgcactcttcaggcgtagatatgtcccaaactaatgtctcagtgcaaattgatgttggtagacaagaaaatgctgggctgatcccctctgcatctacttcaaagggtcatgaaaaccaatctgtgagcaatccagcaatagcacgttccggagttgattactgcaatattgattctgaacaaagttcaaagaggctcagacaagaagcaagctagagattcctctcatgttcattttgtcaggagtttctttttttgctgtttgtcttcagatgagagtaagaggaattgggtggatcggttcatttttgccatgctggttagggccagatcaaatgtaaattttcacgattctggttttgggactaagacattctgaaataaaatgttatatatgcttgcttctacttcaattttccattttaatgccttcgagtatgcttgatattttaatgtcatatattcatggttttgacatttattt

SEQ ID NO: 37797 - DNA, 841 bp, Glycine max
  Clone ID: PAT_MRT3847_134130C.1
gggtggataaggcaatattgctgaagcggtactttagcaaggaaattcgaggtggcactcaattgccggagtcagatatagttaaatcttgtcgaaggttgttggatgagaggcagagtttgaatgtgaggcgatgccgtgaagttattaacgagagacctgacataagtgaagggttgagaaaactacattgccgttcgcttatttttgttggggatatgtcaccatttcactcggaggctgttcacatgacttcaaagttagacagacgattcagtgccttagttgaggttcaagcatgtggatcaatggtaacagaggagcagcctcatgccatgttaataccaatggagtactttctcatgggatatggcttgtacaagccatccaagttgagtgtcagcccaagaagtcccttgagcccatcatgcatttcgcctgagctttattcaccagagagcatgggtttgaaattgaaacccataaagacacgaatttctctggaaatctagaagtagattaataaaaggctgggaaattggtgccccttctgattgtatggttagagggaatgaatgaggggatgccatgccagatcgttgtagatagggagaaagggaaataagaaatcaacaaagaggaaagaaatgggaagagtttagtagaaatcaacttatagtgattctttcatttgtaataaatcatagatcatagattttagtcaatgagtctcaagcctatgaatagttgtaaagcttcggaattgttttcattttagagggaaaaatggaaagtcgattacattgtaaaaccacctcggagggcagaatcattacgtgtg

SEQ ID NO: 37798 - DNA, 526 bp, Glycine max
  unsure (1)..(526): unsure at all n locations
  Clone ID: PAT_MRT3847_134131C.1
nnnnnnnnnnnnnnnnnnnnnnnnnnnnnnnnnnnnnnnnnnnnnnnnnnnnnnnnnnnnnnnnnnnnnnatatgtgtgctagcatggttatggttggcttgcctgcttgtttggggattgagagtgattctgatgccctaaagttggggacacatttcagggatacttttggggttgaggttccgatatactatcggcccccaaaagaaggggaagttggggtggttactggatatgccaggatttctcatcaagtgtataacaaggttgatgactattacaagttcagggatgcagttaaccagcttgtgcaaaatgggttcacttgtgctgttctttcggattgaagaggtttgccccgacctcccttgaactgtacttcattttcaacaataaatgttttcaaatgtcaagtctgcattggaactagatgtaggaatgcagtgaagctggtgattgtgccgtaatgtggtgccaattccattgacaaatgtcattataaataaaagtaattgactttgcccc

SEQ ID NO: 37799 - DNA, 423 bp, Glycine max
  Clone ID: PAT_MRT3847_134132C.1
gggggacaggacccgaaaacacgggacgacccacgcgacccgatacacaaacccaccacggaggccaaagccggaggagataaagaggacaacgcccgaaacaccacgaagagggagaagataacgaacggaaccgaggacgaggcaaaagcaaaggaaaaaacgccaaagatgggctacgacaacaaagcaacaggggcagaggaacagaggactacgaaggagaaccgaaatgcagacacaaggatacagtaccggacgcgcagacacgatgatgtgagcaaagaagaccagactgcaaccgcagagggcaacaaaaaaacaaggccgaccaagaaagcaccaacagccacgcaaaagaaggcggaccccgaaggagaaaaagctaccggcagagcagcaacagcagctggcacaaaacac

SEQ ID NO: 37800 - DNA, 194 bp, Glycine max
  Clone ID: PAT_MRT3847_134133C.1
gcgcccacgcgtccgcacgctccaactttgctgatctctcatattcagatcgactcagcctactcagggaaataggccaatattaacaacaccatcgccagtcccaccactgaataccataccaagctccagatcaacaaccatcacaaactacgatcattcactgacaaaaccatctcacaggatgtcatcac

SEQ ID NO: 37801 - DNA, 401 bp, Glycine max
  Clone ID: PAT_MRT3847_134134C.1
ggctcgagacttgctttacaaaacttatgcgttcttcgatgctagcaaaccctccgggagccgggggaacaaactcggggttggtatctcatgatcaacctgaaacatggattcatacattactgaggcatcatgtgatgacacaccaggtccagggcaatacataggcgaatttcttgctgtctgttattggggagttgagctggccttgcacacggggcctggggggacccatacataagctggctacacccaggggcatgtgccttattcagcctatgaagacgtgctgccagggtctatcaaccattcaaaggtagcaaggattgaatatgatgcacatgactgcaactatgagactgtgcttgacatgtgctgacctagacatgatactaccacta

SEQ ID NO: 37802 - DNA, 580 bp, Glycine max
  Clone ID: PAT_MRT3847_134135C.1
ctgtacactggggacactcaccgtgcaccagaggctcgcaacaagtgtttaaaacagcggccacaccatcaatgctcccaaggtggggttcccaaaccaccaagaagtattcagcgtaactggagctcgattaaacagccggacacgtcttaagggctcgggagtccagagtcgatgcaacagcaactgtaccaacttaggtcagagggtaagaaaaagggttggtccatagtgacaaggagggcgcaccgcctgtcaaactagccccagctaaagtggttgtcgttcgccacgtcataggtcaacaaccaacatcagaaacgcatgcttttccagggccacaaattggtgacactgaacccataaccacaaaaggtcaaaccgccgcggccgcagcagcggcagcatttatactggtaccaggggtggtaccgtagctacttgtcccggaacgtgaaaagcgccctcaagcagatcgtcaggcgcattaagcggcctaataaataactaagcttaaagaaccagaagcagcccctagtcgcgctaacgcagtacacgcctgtaggtcaacagccggggt

SEQ ID NO: 37803 - DNA, 1578 bp, Glycine max
  Clone ID: PAT_MRT3847_134136C.1
tggggaacaaccacaacaacaaattttccaattagccactatgagaaagagttggaagaaatgaagcacatgactaggcaagagtacgttgcgtcattgagaaggaagagtagtgggttttctcgcggtgcatccatttatcgaggagtgacgagacaccaccaacatggaaggtggcaagcgaggattggaagagttgctggcaacaaggatctttacttgggaacttttagcacccaagaagaggcagcggaagcatatgatgtagcagcaatcaaattccgaggactaagtgctgttacaaactttgacatgagcagatatgacgtgaaaagcatacttgagagcaccactttgccaataggtggtgctgcaaagcgtttgaaggatatggagcaggttgaactgagtgtggataatggtcatagagcagatcaagtagatcatagtatcatcatgagttctcacctaactcaaggaatcaataacaactatgcaggagggggaacagcaactcatcataactggcacaatgctcatgcattccaccaacctcaaccttgcaccaccatgcactacccttatggacaaagaattaattggtgcaagcaagaacaacaagacaactctgatgcccctcactctttgtcttattcagatattcatcaacttcagctagggaacaatggaacacataacttctttcacacaaattcagggttgcaccctaatgttgagcatggattctgctttcattgacaatagctattcatcaactacagctagggaacaatggcacacacaacttctttcacacaaattcatgcctatgggaactactactgctgttgttgcaagtgatggtgatcaaaatccaagaagcaatcatggttttggtgataatgagataaaagcacttggttatgaaagtgtgtatggctctgcaactgattcttatcatgcacatgcaaggaacttgtattatcttactcaacagcaatcatcttctgttgatacagtgaaggctagtgcatatgatcaagggtctgcatgcaatacttgggttccaactgctattccaactcatgcacccagatcaactactagtatggctctctgccatggggctactacacccttctctttattgcatgaataggtggaaaactagggagagaaggaagagtcaaaaaggtgatgaagaagatgcatatattgctgacttgtttcttcctcttgtgaagttgctaatttgatagtgtgcacttttgaagatgaggatatataggatttctttcactatctctaacttgcaggatccttatttcactagggtctaagtaatctagcctcaagtttagtcatggcagaagcatttgctgtgaattttgggaattaactttggagaatgtgtggacagatcattgggatgtttttattatcagcggactttttaattctggaataacaacgatcataccaagggtggagttttcctcaatgtatatgcatggcacttgtttttagttttttaaccaaattctttttatacattatgcatggtaatgggtgttagtg

SEQ ID NO: 37804 - DNA, 265 bp, Glycine max
  Clone ID: PAT_MRT3847_134137C.1
ggctcgaggcctggctctgtctctgtctttgtgtttgatgctgacgattccgaaccagcgaccttgttcgtttgtcgcaaagttcaagtgatcatgggtaaggacaagactcacatcaacattgccgtcattggacatgtcgactgtgggacgtcaactaccactgcacatttgacctactcgctgggaggtatcgccgcgcgagggactgagaggttcgaaattgcggctgctgagaagaacaagaggacattcaagaatgcct

SEQ ID NO: 37805 - DNA, 202 bp, Glycine max
  Clone ID: PAT_MRT3847_134138C.1
gaggagcctcagcttcaactgcagacgccatgtgtatcactacagaacgatgcacatgcatgacatccaacttttacccaaggaagggcctaccatataagcagagaccatgataatgctttgatggagtctaactacaacgcgcaacaaggctctcaacgaactgactgttcacatcaatgtgtacatgctctgtacagtg

SEQ ID NO: 37806 - DNA, 355 bp, Glycine max
  unsure (1)..(355): unsure at all n locations
  Clone ID: PAT_MRT3847_134139C.1
ttgataaaccgcgaccacanggggccgttttttaaaaccgggagcttattttttccccactngatntcaagaatctctcaatttcttcctacttctttgtgtacaatttcttcaggggatgaatattactctctgtgctggccccagacttcctgaatcattttcttttccactcttggtttatttgtttaacactctcttatttgattttttactttctgtctaccttaaacttcttctttctttctttcaacctctttttcctattttattctttctcctttttcctctcttcttatcttattctcctattttcctttttttcctctctcttctccgctttagtcctcccttt

SEQ ID NO: 37807 - DNA, 427 bp, Glycine max
  Clone ID: PAT_MRT3847_13413C.1
ggctcgaggaagaatggaatcaacggcgaggggctgccaccgtatggaacaggggaagagtgaaagcgggaccttccggtgactggaagggcattgaggcgatctacaacaccagacctgggcctatgcctgaaccgaccatgactatttcttctttaattgcacctagactggcgcgtaaaggcggagaggacgaacctttacgtatgggaaagcagagagtatctgaggaatctttgcgtaaggaatgaagagactttcaaagcgcacatacaacgggccgaccataactcgggactatgcaacacgttgtagtctgggacaacgaaagtagccgtgccagttgtttctcatggatgggataaggacatggaacatgggcaccagcaaagacaggttatgccatacctgacagaattgaagctgc

SEQ ID NO: 37808 - DNA, 238 bp, Glycine max
  Clone ID: PAT_MRT3847_134140C.1
ccagcatcagcgatgtgctatgaatagctgcagctgaggcacttgccatgggcaaatttgtaagttgttgctgatcatccatgcagatgagttcttcaggtcatttccgaactgattgacttagaagacatccgaagactttgtgacataagtaatagaagctgtagaacatgagccttatcctctaacacctgagcaaagatatcgagtttcttgggaggctgctactcaaagaatt

SEQ ID NO: 37809 - DNA, 473 bp, Glycine max
  Clone ID: PAT_MRT3847_134141C.1
acgagattcgatcagtctatatgttcagaccccaatgagatgttcttccactattgtccatgcttaggttaaaccattaaagtctttttaaaagtttctatgatggttgttgtgttgatccattttgtttagttagcaaagttatgtattcttctatccttaaggtgtgctgatagacattaactttgtttaccagatggctaagagacctgtttctgacattaactttttgtaaagtgataatgtaagatgagagacttagtctttttgatataatgaagtaaaagctagagttgcactaaaataaagagaccaaaactttgaaattagcaacaattccacccctctcaatgtaatattttagttttgttttatttttttcatattaattccttctttagcatttataaacttgtttcgctccaatgttccttgcacctacctacctctaacaaagttaaaaatatacaaga

SEQ ID NO: 37810 - DNA, 425 bp, Glycine max
  Clone ID: PAT_MRT3847_134142C.1
gaaccatggagtgaaggattcctcaaaccgttctggtttcatgaacgaaaccagggacggctgaaaaatgtgagcccttgacttattcattactatgctacacaaatagatctctctttgtcgtactactgaccaatataactgcttaacttggaaacttacgtgcaaagccttagacaagtaactctatctcgtaccatataaggggaaaataaactcttatgatgccataaccccagggcttatgatatggagatcaaatgcgaaataccaaataggagtctcttgcattgccaaatccacgcgatggttacgtgacccacaaatgatgaacattcttgacctaagaatcacatattattatggactaggggcaaaccacaccatcaacaccgagtcttgagctgggcacgtcgatgagcaca

SEQ ID NO: 37811 - DNA, 892 bp, Glycine max
  unsure (1)..(892): unsure at all n locations
  Clone ID: PAT_MRT3847_134143C.1
cccagcggggaaaggggaagtgctgcaanggaataagtgggtaagccaggttttcccagtcaggagttgaaaacgacggccagngatngtaataaacaatagcacttgaggctagcatatgctaaattagattggctgtagtttaatttggacttgagaatgataaggaacacaaacatagtcttgccattagcaagtccattgaatcaaaatggcaagttaatattggtgagcacaaaatcttcctcaacatcaagaagaaaaggagttaaaatacatcaatcactaagaacacattcatcttgaaaatatgccaacccctgcttcaatctgaaatctggattattgatagatcccatggaaatatcaatctcaattaagttttcatcctcattcatgtcattgatttcttctaagagctccattaggccttgctgcttgaaaatggaatctggcaggaaatctggcaacttggtttgcaatttttgcttaggatcttcaatcaagtcaggaaagtggctgcttggaaggttaatttcaatcaaggtatcctcttcctcctcatcctcatcctcctcataatcatcatcagaattcaagctttcagaaataatatcctcattttgatttccaatgtgatccatctcaaaactttcccccattattgagtcatcactgctttcactatctgatggaagtgaataatctgactgcatatcttcttgcagcctatgctcttgaacattgagctcaaaagtttcatccatgatagaaaaattgcagctttcactatcagttggaaatgaatagtctgaatgtgcttccgcttgctgttcaagattctcatcaggttcactttgtcggacggcgtgggtcgacccgggaattccgg

SEQ ID NO: 37812 - DNA, 242 bp, Glycine max
  unsure (1)..(242): unsure at all n locations
  Clone ID: PAT_MRT3847_134144C.1
caattctctatatttaacctctttccctcatnctcttctttcactttcacttcctcatggcatcaacaaagagcatgttcatgtcnnnnnnnnnnnnnnnnnnnnnnnnnnnnnnntcgcaccgtgtcgctcagggtctccaacacggtcggatgcggagagtgnccagtctgantcgctcgtcanggtgtgggtgtgtgtcagttgcanttcagatgatgattcatcaaggtatgggttgt

SEQ ID NO: 37813 - DNA, 875 bp, Glycine max
  Clone ID: PAT_MRT3847_134146C.1
caatttgaaaatgaaggcaggcgggttggttacgggactccagaaaatgcaactgctgccaggaaattattagatcgacagatgtctatcaatagtgtgccaaaaaaggtcattgcacacctcttaaagcctcgtggatggaaaccaccagtacgccggcagtttttcttagattgtaatgaaattgctgatctttgtgacagtgctgagcggatattttcaagtgaaccaagtgtcttgcaacttatggcaccaattaaaatatttggtgatctacatggacagtttggtgatctcatgcgcctttttggcaggttgagtatcccaacaatgtacatttaatacgtggaaaccatgaagctgcagatattaatgcactgtttggtttccgaattgagtgcatagagaggatggtaaggaatttcatgtactagaaattgtgtcttgtttatattgggttcatcaaccaatcatgaaaaattgttgatcagggtgagagagatggaatttggacatggcatcggataaacaagctgtttaattggcttcctctggcagctttaattgagaaaaaaattatttgcatgcacggtggtattggtcgttcaataaatcatgtagaacagattgaaaacattcagcgtccaattccaatggaagcaggatcaattgtgcttatggatctattgtggtctgatcctacagagaatgacagcgtggaaggactgcgaccaaatgctagaggtcctggattagttacttttgggcccgatcgggtcatggaattttgtaacaacaatgatcttcagctgattgttcgtgcacatgaaatgttgatggatggggtttgagcgttttgcccaaggacatttgat

SEQ ID NO: 37814 - DNA, 821 bp, Glycine max
  unsure (1)..(821): unsure at all n locations
  Clone ID: PAT_MRT3847_134147C.1
cttaaatgttaaactgcattatgctaacatattcacgttcaccaatccagtcccaacaaggtattttgcacattgcagtaacataaagggtttttgacacatcctaacattcacatgagcaaatcctacagtattcaaatctccctgacaaaagaaaatcccgacagataattaacaaccctttgggtctaaaaaagtgaaaagttaaagaaagagagtcattaaatattctttggccctaccaaagtgattggagcttcatgttctgaaggttaattggtcatttgctgcacctgaattggctgcaggtgtcagcaccaccagcattatctgaagttcacacctgttgtttggtttcagaacctccaccttcaatttgggtgctgacacttgaacctggcagctcagtttttgtttccccagaagaatttgtctgcaacaactggggttcataacttggtccagccatagatgttggtgctggtatctgagaagctatggcacctgtcactggtgctgttgctggaacttgtgcttgagatagtacggtcatcaggagctgagccaaaagtacctgtggatcattatcaccttgttgaacttgagcattaattgcattagacagagcattgatgtcaggtgggtaaattgcttgaagccctgagagtgccccagacagggcttgctgctgtgctggcctactccagatgaagcacgcctaagttttgataagtgttttttcnccagtcatatgactctggtaaacaacttgtgactcacatttaacatcacacagctcacatctaaaagacatagtttgt

SEQ ID NO: 37815 - DNA, 398 bp, Glycine max
  Clone ID: PAT_MRT3847_134148C.1
gcgagaaaatatctcgtttcgagccttaattctctccttacaaactcagtcgttctcttgctcaatatttttgaaggcaccctctgattgccagggcggaaaaaatctaaaagcataaatcaacatccacaaattataatcacccgcaaacataaaacataaatcagctcacgaaaagcaaatgaacatgagctttctggaactattggaggtggctactatgccacttattcaagtcctacttatcagagcatctttagctttaatggcaactcacttattcgataatattctttcaccatacattcagaaagcctttaactaaattgtctatgctatatccacaccttcaattgagttttccaactacagcaagaatgttctacttgatgatatta

SEQ ID NO: 37816 - DNA, 362 bp, Glycine max
  Clone ID: PAT_MRT3847_134149C.1
atcggaactggttcggatcaaaatgacatcagggggggtgctggtgacctaatgcaggatggtatagcctccctagtcatctcccttgattcttgggaactttttgttgagcaatcataagcctacaaggagagtgttttccctgctgctgcttcagccagagttagctttgttgcatgatcaacatttggttgggagaaaattgttggagcaaatggaaaagcaattggcattgttcgttttgttgctagtgctccatctggatagattttacaaagaattttgtttcactaaagtagcttctaactgctcccagttatgagcttttttattactttttattttttttgccttctgttttt

SEQ ID NO: 37817 - DNA, 2127 bp, Glycine max
  Clone ID: PAT_MRT3847_13414C.1
catgacgaagaagatgtcgaagtcgcggaatgagcatccagttaaatcacgtcgtgtccttcccacgcgtcggagtaggttggttctaactattccccatctcgagattacattacacttctcttcatctggggaaacaaatggctaggtctgcgaaagggcatcaagatgaattcgacgacgatgatgaagaagaactcttaactgctaataacacctctttcaaagtgaaggtggatgaacccagcacggggaagagggtgaacccacagcgttcaaagcattcagaaaccgagcaacgtagaaggagcaagattaacgaaaggcaagctttaaagaaaagaagaagaaaaaattctttttgttgagttaattgtttgtgtgtaggttttgagtggaagtttgatgtaattctatattatttggcaatatatgctcgcttgaaaaaattgtgtttttgagccaggtttcaggttctgagagatctgatacctcaaaatgatcaaaaaagagataaggcatccttcttgttggaggtcattgagtatattcagttcctacaggaaaaattacaaatttatgaacagacttatgaaggatggaatcaggagcccacgaaattaactccatgggtaaagttatttggaatggtgcaatgcgaacattttttgtatctgtatactctggaccttgatttatgaaatgttaggcaatgcattatgcatggcaatgcaagtgtgcactatagcagctttcccgactgatagtggtgccacctcaacattgttagacttgtgattttctgattgtataaggattcattttgtatagactgcaaaagaaagagcatcaactaggaagccttattcccactaagtagggtcaccaacatggatttgggaacaccgatgtacttggtcatgtgccatgtactcatgatgccaactgcaaaaaattctcataaagagtttaagttcctttcatgtttaggatttcactactttatgctgtttctttgaattcatgtctgcttgttttctttttttatttatttacaatgtccttttcttccagagctagtagcccagtatgcatatttgaatgagttcaggatggcattgtggcaacttcagtgatctatttgtcacaatggttggttgtgacttagtgtcttgaaattgtaacaatggctttttatctgaagtttattgttctcatctgtttttttttcagagaaataatcacgggcctgcagaaaatactacagatccttctcaagctactcaaaatgggtctgttgatgagaaaaataacaatgtctctccattgttgcccaaaaatgtacagaacccgatagagtctgacttctcaatgacaactattcagaagggcaacatccctggttcaactacagaagcagttcccctgcccatgcaaatgcgattggacatgtttgatccagttgttagcagtagtatggcaacccaacatctgctggaacctgtatctaatgttaacatgctttcccatacccagcctcaattgtggcttgataaacgaaacaagggcaactatattcttccacataatgatacaatgaaggaacaggaggagctggtgaatgaaagtgggtcagatagcatctcaagtgcctattctcagggaattttagattctctcacacaagcactgcactcttcaggcgtagatatgtcccagactaatgtctcagtgcaaattgatgttggtagacaagaaaatgctgggctgatcccctctgcatctacttcaaagggtcatgaaaaccaatctgtgagcaatccagcaatagcacgttccggagttgattactgcaatattgattctgaacaaagttcaaagaggctcagacaagaagcaagctagagattcctctcatgttcattttgtcaggagtttctttttttgctgtttgtcttcagatgagagtaagagcctaagagggattgggtggatcggttcatttttgccatgctggttagggccagatcaaatgtaaattttcacgattctggttttgggactaagacattctgaaataaaatgttatatatgcttatgcctgcttctacttcaatcttccattcc

SEQ ID NO: 37818 - DNA, 769 bp, Glycine max
  Clone ID: PAT_MRT3847_134150C.1
gaagagacatggatgcaggagttgaatgctaacagaccaccaacaccaactagaggccgtcctcaagtaacaaatgaccgaggttctcttgcttggatatagttatttattagtaagaatggccttattgtttatgccttgacggcttgtgctatcgcctgaatttccggtgttacgaatatgacatgatgccgtttacggggtattcaagttcgtgatataatacccgcagaaagcttgagggaccaagctttcatttgtcctggttctcatcactcgatcatctggcctgtagaagatccaagtccgagaagcaaagcaaagttggtagccactgctaagttggttcactttgacaaaagctagaagttgcagtatgggttcccacccacctgttgtaaattgagcccgtagggtacaaaatcaaggtcatggatgtccgtgtggctatttttctcattattttttacaaattttttttactcattgtccctaggttattgttttttttttttttttcattttatatttttaaatcaagaggacaagggtttcttttctctttttctgtgatggtgagatatataaatcagaaaatctttcttgggggtccatgtatcataggggtgttgctttgtgtaattcccatccatgctctgtacaactaatttttgtgtgaatcaacatattctgacagaaatgtgaattttgggaatagaattttgtatattgccttatgctgcaaatagcttagactgtttcctaagat

SEQ ID NO: 37819 - DNA, 641 bp, Glycine max
  unsure (1)..(641): unsure at all n locations
  Clone ID: PAT_MRT3847_134151C.1
ctattctcaaaattcacatttctgtcagaatatgttgattcacacaaaaattagttgtacagagcatggatgggaactacacaaccctatgatacatggacccccaagaaagatttctgatttatatatctcaccatcacaggaaaaaaaaacccttgtcctcttgatttaaaaatataaattgaaaaaaaaacaataacctagggacaatgagtaaaaaaaatatgtaaaaaataatgagaaaaatagccagcactgacattccatgacacggacatccatgaccttgattttgtaccctagggctcaatttacaacaggtgggtaggaacccatactgcaacttctagcttttgtcaattgaaccaacctagcagtggctaccaactttgcttgcttctcgaacttgtatcgtctacaggccagatgattgagcgatgagaaccgggacaaataaaagcttgatccttgaagctttcagcgggtaagctcgaataccctgtanacggcatcatgctatatacgtaacaccggaaattcaggcaatagcacaacccgtcaggcataaacaataaggccattcttaataatgaataactatatccaagcaagagaacctcggtcgtttgttacttgaggac

SEQ ID NO: 37820 - DNA, 535 bp, Glycine max
  Clone ID: PAT_MRT3847_134152C.1
ctcggggagaaaaaatgggacccattccgggccaaaccatgggccctttacttaaaacccattttttttttttcgaccccggggccggcccggggggcccccccggaattccggccccggtcctggggggcttcccacttttccttatggggggtctttataaacctgggggacctaggggcaaaccttttccccgggggaaaaaggtttcccgtgaccaatctcccaaaacatttgcccgggaaccaaaaagggaaaaccccggggcccccagggggggggccccccccccttaaggggggggcccccccggcccccttgccaggggggaaaccggggccccccccttttttttaaaacccgccccccccccgggggggggggtttgcttttgggccccccggggggtttttttttccccccggggcccggccacaggtttgtggcccttaccgggcgggcccaggaaagggtgccccaggggctcccccctgtttcccccacaggggggaaaaacccgggttggggggggggg

SEQ ID NO: 37821 - DNA, 434 bp, Glycine max
  unsure (1)..(434): unsure at all n locations
  Clone ID: PAT_MRT3847_134153C.1
aagctccgctatgtccttttcccaatttggaccctccttttaacacttctcttctctgctctctctttcaagtgtgtctctctgtcacacttacttactttcatcactcactgaacagaaacaatgtccactccatattacacacttgttcttcttcttcttcttcttattgtactcatttccccatcctcctcctctcttcatccaacggacctgaatgcccttctctccatcaagaacaccctcaccgaagtctcacccacgaagcccttcttctccacgtggaacctcaccgcaccggatccctgctcctccttctccggcgtcacctgcttcctctcccgcgtctccattctctccctcggcacccccctcccttncactcgccggcaccctccccgccgagtcaatctcccaactcacagagttgactc

SEQ ID NO: 37822 - DNA, 265 bp, Glycine max
  Clone ID: PAT_MRT3847_134154C.1
aatcgtcatgacgatactctagaagagagctcacaatgttgcaaaccaactaatcaatcatcaatgcgccgaatcgtgaaatcccacctaggtaatacacccacacactgaactgcagaatctccttgaacggcttggacatgacctgaatcagacgagaatggcagtatccagagtactgctgaagcagggagcgggtgagattcaggacatcgtcgtggacattggccatatgaccatctccaggtgcgtcaagggcagcgtc

SEQ ID NO: 37823 - DNA, 372 bp, Glycine max
  Clone ID: PAT_MRT3847_134155C.1
ggaccgaacgatccgtctatacaacccacagaaggctcctacgacctgtgtcgcgcctaccgcctcgaacgtgtacccgcccgggctcgtcaacaagtacagcgcgcatggctatgaagtcctttccattgacgtcaataccgacaatgataaattcgtgtccaccggcggcgacaagacagtctttgtatgggacgtgcagactgctcagacagtgagacgcttcaccggccactcagggcgcatcaatcgcggagtcttcggtggcgagggagacagcatcatcgcgagcgggagcttcgacgggacggtcaagatttgggacctgaagtcgaacgcatataagcccatcatgacgctcgatgacgccaa

SEQ ID NO: 37824 - DNA, 389 bp, Glycine max
  Clone ID: PAT_MRT3847_134156C.1
ttggggttaaaatctattttttttttagccggagacaagacccacggggggattgtcattttttgggacccaaaaccaatctctaataaaaaaactatggaccgtaatttagaaccccggggtttagggccaacagacggattgggtggtccaccccccggcggggctggagagacaaccaagaaggggatcggggaagccctaaaaagcccaaaaaaaggggaccctgggcaaaataaaaagggcccacacaggggacacggcccatgggccctacctgaaaatctccaccagcaccggggggcctgggatagagtcctccccacccccggggggggcaaaatggccaccgggttacaaaaccccaggggggaaaattggggggtttt

SEQ ID NO: 37825 - DNA, 421 bp, Glycine max
  Clone ID: PAT_MRT3847_134157C.1
cccatgcgtccactctacctgccaactctttcgtacatttttttataacccccaattctaaggcaacacagggggtgttttcaacacatacagacgacacatccttttgtatatttcgacttctataagtgtctaatcttcctcctcaaattgatcccaatatcacaatttacccaattctgatgttattcccatcttgctacatccactacaaggatttatttaacagaccccccttcaaaaaaatattttcctctttctcaacattattacaaatctccaggaatcaaaaaaatgtccctaactttaattgacccttccaaaaacattacttggccttaaaaactaggaattagacgccttcttaattgagtttttgcaaaaaaaggttcatttttttttaacacttccctattttttt

SEQ ID NO: 37826 - DNA, 768 bp, Glycine max
  Clone ID: PAT_MRT3847_134158C.1
ccggggatcctctacagtcgacctgcagtgcctatagataatagacttgtcttcaaaaccatcataaaagggcaggtgggaaacttttctttcttgataaatacaaagatgatgtataaattacaagaaaagttaaagggatttcaaatctaaaagccctttattacctgatgaccattttccaaaggctgtagtagcgagatcaggaaaaaagacattagtacaatctccagtaaggataaacaaggatgatagtcagagactgttgagacaaagaattattaattcacattactcattaacttggtttaattgaaattttctaaattttcctcaattatatgcgaatagacaactaagaatacaattacttaggagttaggactaactttaaaaaaataattacttgaggataattaaaaaaatatcaatgataagtaattgatagggaatgtgaattgaacagcctcacttaataagcaattgttttgtatttaccggagttgtagcaggtgcaagctttcctgacattctccgggatgatgaactcaacaaggcttgctgccgcaaaacttggttctcagtttccatatcagatagcttttcttcaagcctaacacgcaacaaagcaacatatcaaaccaatgaaaacatcaaatattccctataatgaaaaccagcaccaacaaaggataacataagaacctctgcatatttgtctttgtctcaatcatctttgattctgtctctataatttgattcatgcgc

SEQ ID NO: 37827 - DNA, 1338 bp, Glycine max
  Clone ID: PAT_MRT3847_134159C.1
accgaaggttatttttggacatttacctttacatactaactagaaccttccttggacatttactttacatcctaaccgatacctcgcgcttttcctcgttcccaaacccgaaaggcccagccacagagtctccattgcccatcgctctctctattagttcacgcgcggcaattggagattcacgcgccaccatggcctctccatcgagcctccctatatcctcccaatcaagcgcttccgccgccggcgcctcgcagtcccagcctccgatcgcgacgccggcgttccgcgccttcatctcccgcatctcctcgtcgctccgccacgccttcgcgcagcgccgcccgtggacggagctcatcgaccggagctccatgtcccgacccgacaccctcgccgaagcatactctcggatccgtaagaacttcgcctacttccgcgtcaattacctaaccctaatcgtgttggcgctcgcggtctcgctcatcacgcatccgttctcgctattcgtcctcttcggtctcctcgcgtcgtggtcgttcctttatctctttcgcccttcggatcagcctgtcgtcctcttcggacgcaccttcgccgatcgcgaaaccctagggatcctcgttgtgctcaccgtgttcgtcattttcctcaccagcgttggatccttgttaatctctgcactcatggttggattggcgatcgtgtgcgcgcacggcgctttccgcgttcccgaggatctgtttctcgacgatcaggagcctaacagctccggattcctctcgttcctcggcggcgccgccgcttctgccgccgcgccggcagtcgcgcgcgtgtgaacggcgggatctggacggccggtcagttcggtggattcttctcaggttggttcggcctttttagttgtaatatgttgaactgaaattgttgcgatattctttgtcttttgagatccaaagcgaattgcttagggtttagttctgttactactttttgttttacgccaatatattattgtgctattaaacctcaagtaatgcagcagcttagtcattgattttgcttctgaaattgttcgtcattttcggtagatttgtatgtgcatttttttcttccattgtcgtaatggtacgatttaattgttggaattggactagagattcagagaatgagactggatttttaattaaacgatagattactgtgaaaactgaaatctactctattttcgcttgagatgttaatatatacatacattgaaaaagttgagcctattcaagtcattggaagccttttttaatttttcaattttatttttgccgaatttctggttaaaaa

SEQ ID NO: 37828 - DNA, 262 bp, Glycine max
  Clone ID: PAT_MRT3847_13415C.1
catatttaagacattgtttggtttggttacttgctcgaattcctcgaatcgctaatttgttttgattagttaaaccgcaccggggatctgtttctcgactggttaactgtcaggcaaggggttcggacgcttagtcccagaaccaagcggatgaggttgaaccgtgtggagcccataacttccgtgaattcgaaggcggtgggaagaaccgtgccctcgaccttaagaggtggttccatggtccgcccttacagcagttttt

SEQ ID NO: 37829 - DNA, 336 bp, Glycine max
  Clone ID: PAT_MRT3847_134160C.1
ggggaccataaaaaagaaccctttttttgaaggttaataacctaagctggaaaagggcccaggcttctttaaagacggcaaataaaaaaaggttttaacccgcccttttaaaaaacaattttggaggtccctttgggccccgggcccctaattaaacccaaaattatccttgggttaaaatttattggaatttaacggggtttgcgcccggtttttttaagggaaaaaggccccccaaaatttttcaaacctggggcgcctttggtttttaagaaaaccgggaaaccctttaggtttaggggggccccccagccctttaaggggtccttggttaaa

SEQ ID NO: 37830 - DNA, 208 bp, Glycine max
  Clone ID: PAT_MRT3847_134161C.1
cacaattggcaacgctttgttgtttgagatcgtgatgaccttcagcttggtgtacacaatgtacgccactgccgctgaccccatgaagggctatttgtgaatcatagctaccatacgcatagatttcattggaggggctaacattttgttgagcggggccttctccggagcacgcatgaaccctgctgtgacatttgtgcctgctgtg

SEQ ID NO: 37831 - DNA, 438 bp, Glycine max
  unsure (1)..(438): unsure at all n locations
  Clone ID: PAT_MRT3847_134162C.1
gagaaaaataaaactacactcactacaactacgccgcattgataataataaacaaaccccccaacccccnnaaactataaaaatttctcctcttaaatttcaacacattaaacaaaacaaacccatatatatcattttttacaaaaaaccaaaaaaaccactaaacttctacataataattacttgatacttgtttttatctaaaattaaattatccctctaattaccatttcaataaccatttaaattcaactacctaatatatttcccctccccaatcnatncgcaattctatccacaccctttaaactactaaaaattccacaataaaaaacactatcaccaccattaatccatcaaatctatccctattattcataaaaaacccaatttctcacatttaaaacaacttcataactccccaaaccactcaaaatc

SEQ ID NO: 37832 - DNA, 622 bp, Glycine max
  Clone ID: PAT_MRT3847_134163C.1
ccacgcgtccgtttttatctgttttaatattcgaggaatttacttaatatcacataaatttaataggccaaattaatctcaaataaacttttaatcattaataaatagacaaaactaatagtttaatctttaaaaaataaatatttaagtcagaattatgaaaagctcttgcctaagttttttttatttttaaaataactattctttataaaagaatcaattcattatacgtattctacatcaatgtataataataaaataatcatagcgaaaggttgacagaaaataataaaataacaattgaataatattatgtaaacgaaataaaataattatatttataatagtttttcctattttttgtgactttttcctattatttaaatgatatatttttaatgttttatattgataataaaaaaatttaactgtaatgggaatattatttttttactatttattgtatggtggctggtattttataatagtataatatcattttattacaatagtacgcatatgtatttaatgctgaaaaaaggtatatggatttaataggattttattatataatggtatacaataaaaataaccggggggtaaaagaaaagaaaacataatt

SEQ ID NO: 37833 - DNA, 726 bp, Glycine max
  Clone ID: PAT_MRT3847_134164C.1
aatgctattctatcaatgtttacaaatgatagaacctaatggttcttgtaagatgccatatatacattttaaataccacaacttgaacctaggaaatactacttaacacgagagcgtcctgtgaaaagctacataggtacaaagttttgttttgtttttttaactttcttattttttttgaagaattggcaaatcttaaatgcaagttgatgcctttgaagtcctctgattcatccctagcatgattacaattacggtcacgtcgtcatggtacttccttctccttccagctggaatattcatcaactcttccatgctcagacctgcatgagtgttacttagccaaccaataatcatgtaatataacaaataaacatttacattgatgcaaataaaattaaatttagcattagatcttgaaaatgaccggcagaatcagctgctctagctacaagctgttctatgagaaactttgctggatcaccaaaaggattgttcaagatataagactccacaagctttactgcctcatcattgctgaagaagtcaaataaaccatcactccctactataacaaattgatcggaatttgagattctatggacattcaatgatgggttagcggatatgtatggtgggcttttaagatcgtgaactcgaaggattcccatcaaagcatcattcagacttttctgcatgagaataaaataagaaaatcaaatctat

SEQ ID NO: 37834 - DNA, 510 bp, Glycine max
  Clone ID: PAT_MRT3847_134165C.1
gggtgtttttttttttttttttttttttttttttttttttttttttttttttttttttaaaaaaaaaaatctttggtttttttttagttttggcataaaccctgggaatactttaaagatcattttgaagcctccctccccgggggtggtttttaatttttaaaacgggggaacgttttttaggctaaaacctccttttttaaacgggggaaaaggaacccctccctcacaaagggggggcttttgcccatacaagacctaaaaaaccctggttcttaagggtaaactttaaaaaaaatgttttgtttaaagccccccccccccaatcttgggaactggcgtttgggggatgggtcttcatgcccaaatccgggtttttgactagtctgagaggggattggggggtgggccatggttttcaccccttgattaggataggggtttgggatccctttttttttttcagtgaaagaagggtaatacaaatttccaaaggcggcccttgccccc

SEQ ID NO: 37835 - DNA, 498 bp, Glycine max
  Clone ID: PAT_MRT3847_134166C.1
gaagaacgttcatatggaccaaaatgtattgcaagagtttgggaaagagatgatggcgcacagacgttatccgacagaagcaccctttgtgatcgatcaagctgcttcggaagctggagactccagaccaagagcatctgtcaactgctctgcagagcggtaccgcctaatacctgtaattatgtactgaatctgctgtggaacgtacactattgctctagtggagttgagagggctaaatgcctactgacacttgatggatcgatgaaggtggcgggcactgagcagagcataacggtgtccagcggttgcagccttgaatatgatacgatagcgtgtactggccatgtgtccgtagaagcatgaggcttgcttgaggcctgacatgtgctaacgggcatagtactgatgcagacagtaggtatacatgaatgaccgagatgaaccaccacatacgaatgatctagacgaccactcatgatcctcagcagcaagctg

SEQ ID NO: 37836 - DNA, 377 bp, Glycine max
  Clone ID: PAT_MRT3847_134167C.1
ctgtaagtctataatactcgtccatagtaattctatctggctcgagcaggattacctcctgtgataaatacctgtgccggttaagtcagagttgtggtgatcagtgatcgagccacagcaagagccatgtacaagggaagattaggaggcaaggctcagcttggatatgttgaaactgaccctttgggtcgatatggacgtttcagggacattctaagcaaaggagcagtgaaggtagtgtatagggcctttgatgaggtcctaggaatagaggtggcttggaaccaagtcaagcttggtgatgtgtttcattcaccagatctacttccgaggctttattcagagggtcatcttcttaagaacttggaacatgactt

SEQ ID NO: 37837 - DNA, 399 bp, Glycine max
  Clone ID: PAT_MRT3847_134168C.1
ccgttttgttcgccaagaagaagccatgaacagaagaacgactttgcttgcacaaacgctagtgttccttttttgactcaacttcttaactctcttactctcctaaataacccacaaaacttcttcttatccatctacttctttacaactaaaaaaaccttgcagctatattacaccacttcagcaccaaacgcacttctcagagacatggcctattctcctgacctacctaccgaggaaggaggctgctaccacggtcactacccgctcctgcgaggcccacacctggaacggcttaatgcgcgggcgggacctggtgctattccgcagcggagccgggtggatacagtgccgtcacaacgaaacgctcccgagctccatgtgcgagggcgggaggct

SEQ ID NO: 37838 - DNA, 267 bp, Glycine max
  unsure (1)..(267): unsure at all n locations
  Clone ID: PAT_MRT3847_134169C.1
aattactactttctctctctttgtaacttgtaagcatggantcctcaaagatctatgcttacctcttcctttgnnnnnnnnnnnnnnnnnnnnnnnnntcccattctcggttgtggtactgtggcaaacccccaaaaagcacaagcctggtaaaacaccaaaganacccacagtacccgttgttaagccaccagtnacaatccttcccattgtaatccaccagtcacaatccctccnattgttnaatccaccngggnnggttccccc

SEQ ID NO: 37839 - DNA, 492 bp, Glycine max
  Clone ID: PAT_MRT3847_13416C.1
gagagatgaaccgaagaactcatcattaaaacacgcgtgaaaacccagtaaaaattacattagttttaacgacgttggtaataaaatgagaaacaacaggaaatttttttaattggttatgtagggataaatcaaaattcgcaagaacatccgcaacttggttcccttctcaaagcatatgatttcactttaaagaacctccctacaaggaatactccttagtccttaatatcttgaatcaaactaaaggaagggtgataagatggccatcccttgtttagtaaagacgtaactagacacctttgaatcagaatcaacaattgaacccacgactccaaccaaattaaattgtccaaaggttagctataacagctgaacaagaaccaatatcagctgcataagaaaacataaacctggccatttgaatccctaaatacacctccagcagctgctttattcaaagcactcactgatccaccggaatttaactta

SEQ ID NO: 37840 - DNA, 328 bp, Glycine max
  Clone ID: PAT_MRT3847_134170C.1
gggtatctctatgatctttgctggaattaactccactgtctaccccgccggttctggcatgtttgctgcattctctggcctccattacttggatggctttcccaccagatatacaacatatctacttttctacattgctagcaaccgtggaagagtgcaatgcttgcaagtgtagacatcagttggcaaggagaagtgcgatactcttctctacctgtcccatcttgatgattcacaactgccatacgaattccaatgctttcttaggagaggatggattccttactagcaatgctagttggaactcggatgactgtaccatgagcac

SEQ ID NO: 37841 - DNA, 364 bp, Glycine max
  Clone ID: PAT_MRT3847_134171C.1
atcctgtacgtacgaaatcagctcgaaccccgccgtgagcgtagaaataatcgagcagtccgagagcccggacagcgacgcgtgcctaggaggacaactcttctcctacatggtggcacgcaagccgggtcacctgttcctgtacaagcgttgtgtggcgtacgacgagcaaaaggactacggtgtgatatagcacgcggctttgttcacgtacaccatcatgagcaggcttgtagcgaggcccaacgtgaagctgttgaacgcggtggcggcggatgacttgatcgtgaaagaacggatggttgtaaggtgtcggacaaacaggacatttgtgtggtgaacgatgaaacgaaatatgcatgga

SEQ ID NO: 37842 - DNA, 1021 bp, Glycine max
  Clone ID: PAT_MRT3847_134172C.1
tctagatcgcgagcggccgctcgcgatctagacccacgcgtccggacaaagatggcagagtaacatttgaggaactgaaggctgggttgaggaaggttggttcacaattggctgagccagagataaagatgctgatggaagtggctgatgttgatgggaatggagtacttgactatggagagtttgtagccgtgacaattcacttgcaaagaatggagaatgatgagcatttccgcaaagcattcatgtattttgacaaagatgggagtgggtatatcgagttaggggagctagagaaagcattaacagatgagtcgggagatactgatactgctgtattgaatgacatcatgcgtgaagtcgacactgacaaggatggtcgcatcagttatgaagagtttgtggccatgatgaaaactggaactgactggagaaaagcatcaaggcagtattcaagggagagattcaagagcttgagcataaatttgatgaaggatggctcacttcagcttcatgacgatattagtggtcaagctgaagtggtttgagtccgaaattgtaatcttagtgctcactcagtttctcatcttccttcaccacttaatatgcttgaaagcatagtttctttactctccttgaaaaagcaagcaagtttagtgttgaagcattttgaagcatactgatttaccttgggttggagttgggttgcttaggttttggattggatgttattagatgcctgaagcttgaagcatgcgttggatggttgcatactaaagtcgttttatagcttgtcagcacaagttgcgcgggcacatgctgcaggcctcaaaatgtcacatattctttgtatatctttgtcgtgttgttcttgttttgataatttcattggtaattgtgatttttctaattgatgggctaaaaacagttgggatttgtctcattggcggtgtgatcgaacttctaatgtaaagtacctgtaaaagcaattcaaagttcaaaatatagatatcttgtgccc

SEQ ID NO: 37843 - DNA, 2628 bp, Glycine max
  Clone ID: PAT_MRT3847_134173C.1
ctccaagcagctatctagcttgttctcttttattttttttcggttcaccggcggcatggggaactgcaacgcctgcgttcgagtcgatgacgtggcagactcaaaccgcggcaaaaagaataagaaaaccaaaccgaacccctacgcggaggaagagatacgctccggcgttccgatccgtgtgctgaaggacgtgacgtcacggagcctcatcggcgacaagtacgtgataggccgggagctaggtcgtggcgagttcgggataacgtacctctgcacggaccgcgaaacgaagcaggagctcgcgtgcaagtcgatctcgaagcggaagctgagaaccgcgatcgacgtggaggacgtgcggcgagaggtggcgatcatgtcgacgctgccggagcacgctaacgtggtgaagctgaaggcgacttacgaggacgaagagaacgttcatctcgttatggagctttgcgccggcggggagctctttgatcggatcgtcgcgcgggggcactacagcgagcgtgcggccgcgaacgtggcgaggactattgctgaggttgttagaatgtgtcacgccaatggtgttatgcatcgagaccttaagccagagaattttctctttgcgaataagaaggagaattctgttctcaaggctattgactttggtctctgtgtgtttttcattccaggggagaggtttttggagattgttgggagtccttactacatggcgccggaggttttgaaacggaattatgggccagaggttgatgtgtggagtgctggggtgattctttatattttgttgtgtggtgttcctccgttttgggcagaggccgagcaaggggtggctttggcgatcttgagaggtgtgattgacttcaagagggaaccttggccacagatatcggagagtgccaagagccttgtgcggcgaatgttggagccggatcctaaaaagcgcttgacagcggaacaggtgcttgaacatccctggctacaaaatgcaaagaaagctccaaatgttccattaggagatattgtgaggacaaggcttaagcagttttctatgatgaatagattcaaaaagagagctcttcgggtaattgcagaacatttatctgttgaagaggtagaaataatcaaagacatgtttacattgatggatactgacaaagatggcagagtaacatttgaggaactgaaggttgggttaaggaaggttggttcacaattggctgagccagagataaagatgctgatggaagtggctgatgttgatgggaatggagtacttgactatggagagtttgtagccgtgacaattcacttgcaaagaatggagaatgatgagcatttccgcaaagcattcatgtattttgacaaagatgggagtgggtatatcgagttaggggagctggagaaagcattaacagatgagtcgggagatactgatactgaatgacatcatgcgtgaagtcgacactgacaaggatggtcgcatggtcgtatacggctgcgagaagatgacggaagggggaactgactggaggaaagcatctaggcaatattcaagggagagattcaagagtttgagcctaaatttgatgaaagatggctcgcttcagcttcatgatgaaattactggtcaagctgtggtggtttgagtgtaaagtaatttctttctgtaacctcatgccatgcgctcactcagttactcatttttcttgcaccgcctattgtgcgtgaaatgaaatatatcatttgcggaatctctccacggagcaagttttgggcaggtttgagttttagtgtttgaagcattcaaatgatcttgagttggagttggagttggagttggttatcttaggtttcttagttggcttggatgttagatgcctgaagcctgcgttggaggattgcaattgcatactaaagagggttcattgttcatagcttaacaccaaaaagtgtggggcacatgctacagctacatacccgaaaaaaattacatattctttgtatatgtgttatatttgtgtttgataattccattggtaaatgtgatttttctaactcgtgtgcagaaaaccagttataggatttgtctcattggcgacatgaacttctgagaaagtttatagaaagtctaggcatctgctagttgaagcaatttaatttgtctgaaaatgtagctatcttaagccctcattttttcatttcccccacttgtttataaattatcctttgcccctatttatgaactttatggttaatttgaatgaggtagaaacattatctgaaaaaaaaaaagctctaaatggtaaatacattggtttgttgtgttcaacatatgctgaatgcgttgaatggttcaaaactaaagtcgttttatagcttgtcagcccaagttgggggggcacatgctgcaggcctcaaaatgtcacatattctttgaaaatctttgtcgggtggttcttgttttgataatttcattggtaattgtgatttttctaattgatgggctaaaaacagttgggatttgtctcattggcggtgtgatcgaacttttaatgtaaagtacctgtaaaagcaattcaaagttcaaaatatagatatcttgtgccc

SEQ ID NO: 37844 - DNA, 489 bp, Glycine max
  Clone ID: PAT_MRT3847_134174C.1
gcaataagcttatctaattgtatctcaagctttcgagacaagcttttataatcaaattcctcctttattttcagcatattctcaactttcatagccctttggccaaacaatatagtactagaagtctctcctcggtgacttttagatgggccaacagtcacaatcaatgaagtcctagctgtgcctccaaaagaatctcgaagcatcctggtaagcttcgaatcacgaaatggaacatgagcattgttctcagctagagcattaatacattttcccaatgaactaagtgaaagattgatagatttagcttcctctagcatgtgcccttcacttcctgatttatggacacgttctgaacctgctaagtctaccacaaccaacttgctcttccgtacaagtggttttgaaggtttagtcaaatgagaggcatcaccattttgactagacacaatatcttcattttccaagacagacctcttaatatgaacc

SEQ ID NO: 37845 - DNA, 470 bp, Glycine max
  Clone ID: PAT_MRT3847_134175C.1
gctacactacagaaccgggggtgtgcatatatgatgtagctcatagatggtgaaacactgatatcaagttcacaatggtggaaagacactgttcctaatgcatttggatgggaacttaatctggggagacaaacttctatgagtataagccttgcacagagcatggatccaaccaagttggccatatctgctgtatattaagaatctaaagctgatgatgtgacgttctttaacttgtttaaactggaatgccttatcttacatgaaacatcttctactcatagctgaaacactgggatgctaggtagcgcgcatgcttatactatagtgtgtctgtataattactatagttgactatggaaggataggctatgctaaccgatggaagcagcatcttatacttcggatgactgccttaatggtggggaatggaaagctactggatccttaaaagtcttaaacagatattt

SEQ ID NO: 37846 - DNA, 527 bp, Glycine max
  Clone ID: PAT_MRT3847_134176C.1
cccacgcgtccgcccacgcgtccgcccacgcgtccgcccacgcgtccgacggctgcgagaagacgacagaaggggaggttttttctgaaacctgaaaaaccctttgttcatcgtcgccggaatcatgacgtcatcgtcatcatcaagcaacgcctacgacgtgccatgggtagagaagtaccgtcccagcaaggtcgccgacattgtcggcaacgaggacgccgtctccaggctccaaatcatcgctcgcgacggcaacatgcccaatctcattttattcgggccttcccggaccggaaaaaccactagcatactcgccctcgcgcacgagctcctcgggggaccaaattgcaaggaagctggtctcgaactaaacgcctccgatgataaaggaattgatgttgtgaggaacaagaataaaagtttgctcataaaaaaaagacgctgacccccgggaggcgccagataatgatactggatgaaactgatagcatgaccaccggggcaccacaagcattgagaaagac

SEQ ID NO: 37847 - DNA, 376 bp, Glycine max
  Clone ID: PAT_MRT3847_134177C.1
gtaagaccccaggactagcaatatctagaaattttgtgacagagatggggtatgaacattatttcttttccacatgtctttttaatcatacaatagctccttttattgtcagttttctgacaaagccaaaatgcaaaagcgtataaaaaatatgtaattgtttcatgtaaagaccaacttattttgtttttgttttttcttcttctaatttttaatgtgctagttgtgctcaagtaagtgtccacaagttgtgtttatcgtatcacatttaggttaagtatccatccaagttttttacagtgtgtttggtttttgcagtttgcactttccaagggaccaatttgaatgtcaatccaattctcattgatgattattg

SEQ ID NO: 37848 - DNA, 821 bp, Glycine max
  Clone ID: PAT_MRT3847_134178C.1
ccggacgcgtgggcttacgcgtgggaactcatctctctttgtttctttctctttctttccctcctcacaagtttgtgaagattcttccccgcgatttcactctgcaattcaatgcaacactttccatgccctcttgaaaattttcaacaagcacccctttgaaaggttggcttcaaaggccggtattattatttaaataaaagacactatggtagccaaaatcaggcaaagtgctgctaactctccaaatccaacaaaaccagtggttggagagattgacaccagtccaccttttcaatctgttaaagatgctgtttctctatttggtgaaggtgctttctctggtgaaacacctcccaatgctcccattaagaaggccaaatcttattttgctgagagtgtttgggcaaaggagagacaacttcacttagcccagaaagatctgaaaaaattaaaggaacaactaaagaatgcagaaactaccaaagctcaagtcctggtggagcttgaaaaggctaaaagagtggttgaggatctctcacaaaagcttaaagttctcagtgaatccagagaatcagcaattcaggcaacggaagcttcaaaaagtcaagcaaaacagcttaaagaagaaaaatgtggtgatcctgatggaaccaatcatgcttggaaagaagagttagaaactgccgttaataattttgcatctgtaattacagaacttgatgttgcaaagcaagaactgagtaaaattcgtcaggggtatgatttatccttggaagcaagagtttctgctctcaagcaaacagcagaagctgaagatg

SEQ ID NO: 37849 - DNA, 266 bp, Glycine max
  Clone ID: PAT_MRT3847_134179C.1
ggttgtgtgagtgaagaagcagacggagtatcggcattaaaaatgcagatcttcgtgaaaactctgatagggaagaccataaccctcgacgtctagagcagctacaccatcgacaatgtcaatgccaatattcacgacaaggaacgcattcctcctgtatagcaacctctgattttccccgtaaagcaccttgattattgaacgaccctggccgattacaacatccataatgaatcaacccttcatctcgtcctcaggcttcgtgg

SEQ ID NO: 37850 - DNA, 163 bp, Glycine max
  Clone ID: PAT_MRT3847_13417C.1
accgcagcaccggaccggaatgaccgactcgacccactcgttcggatttcgcatcgttatggagaagcaacttatgttcctgggatgcgagtagggagaaccacatggaatcacatgggtaacgtgtagacctcccaattcatctaggagatcgggtagggaa

SEQ ID NO: 37851 - DNA, 612 bp, Glycine max
  Clone ID: PAT_MRT3847_134180C.1
atatgtttgtttttttttttttttttttttttttattttttttttttttttttggcttaaagcataaattaaattgtaggtatatttgcctcacgccaaaactagaaacctattatggacaaatcaccctcaaagcccaaaatgccgcaaaggaaaaaataacccgaattcaagcccccctttaggcccatcaattcaacagttcttattaaagattcctataaaccacacagtttcaaccccctcgggttcctttccaaaacatttgccttcctcaaattaccggctccactttgctggaagaacctttccattcccatctctagaaaatgaaacaggtctgtcacttttggggccacctttgcctccggatagaacctgtctcaaggtcctaggtgaatgccaactaattttgccattagttgaggatggccaaaaatgtcccccagaatggaaggttttttcacttccatgttgtccaaaactcggggatccttgggccttcaactttgcctttgcaaaataaggagctgccatgaaacttgtgagggctggactattttgtataccatactttgcacgttcctgctttgggaaaaatggggctcttcc

SEQ ID NO: 37852 - DNA, 299 bp, Glycine max
  unsure (1)..(299): unsure at all n locations
  Clone ID: PAT_MRT3847_134181C.1
actcgganncacgcnnactaanctcanaattcngctcgatcaaaaggttacnanatcatncaccangcncagttgnaatctttnntgancnnnggcttgntggtacatgcnncangtgcnccgcaaataatgtttcatatcgtnttacagtgncttttcttnggtcgntngtgatgatcntnaagcccttgcttatngagctcgtanggctggaacaccctgggcatcagattgacnggttatncncnttgtaaaggggaaccaatnaatgaagngagagattgtaaaannttganatt

SEQ ID NO: 37853 - DNA, 234 bp, Glycine max
  Clone ID: PAT_MRT3847_134182C.1
attccttgtagattccaagctttacatatactcattacaaacttaccttcccgggcattcgagctcttagaggtatcttcatatcacctacattcaattaaatcaccctctatctacaacatcaagactccttctaacttcaaaatatccttctaaattttcttgcaacataacaacctttaaccatataccccattatccattatttccgcatctttcctattttccaacaat

SEQ ID NO: 37854 - DNA, 907 bp, Glycine max
  Clone ID: PAT_MRT3847_134183C.1
actgataatttaaaatttttatttctctaggataatatacaatcaaacataacccaagtagcggggttacaaaccaaccaaaccacagactaatagcactcgaattagcaaccagatacacgcacaatttctcacttttgtttttctcactcataaatagatcacaagatagggaaaaaggaaaaagagagagagagagagagagagagagagagagagagagaaattaaggcacagccctcgctactatggtcccataaacctgcattagatcgaaggaaaaaaaatcagaacaaatgttagcaaacgtttgtcattgttcattattgtaaaaaaatcctaaatatctctttcttatatttacttattttcatgtttttaatctttttcctttcatttcctttcacttattatgtctctagaatgcagtgtacactaatcattacacatgtaaaaataggagatacatgcgggagcagaaattgacgatcatagttttttccaatatacctatatagaaactaaaatttgaccaataattccatggttataacatcttagatcgcccgaaaaagaattatatgaagtttaaaaatgagatctaacacacagggtgtcatcgtgcccgaatgtataatttccctaactaatgttagctcaaaagtgatagaagaaaataagatcataattaaatttcctaattcatcatccatgttgttgtaatagaccaatgtggaaagatttaattttgacagagccaaacataaaaatgcaaaacaaaagtataccttttaaatatataggtgatgcagcagtttaatcactgtcactgctgctgctgctgtcatggccatgctcatggccatgctccttcttcttcttctccttcttggtctttctcgccccc

SEQ ID NO: 37855 - DNA, 1188 bp, Glycine max
  unsure (1)..(1188): unsure at all n locations
  Clone ID: PAT_MRT3847_134184C.1
aggttttgggccggaattcccggctcgacccacgcgtccgcacaagccaagtgaaagtgagaaaaaataaaaatcaaagagcataatgtcagggatcattcacaagattggggagacccttcatgtgggagggcacaagaaggaggaggagcataagggtgagcaccatgctggagaatacaaaggggagcaccatggtgaacacagtagtgagtacaaaggagagcatcatggtgaacacaaagctggagagtaccatggtgagcacaagccagagcacaaagaggggttcctagacaaagtcaaggacaagatccatggtgagggcggcgccgccgagggcgagaagaagaagaaggagaagaagaagaaggagcatggccatgagcatggccatgacagcagcagcagcagtgacagtgattaaactgctgcatcacctatatatttaaaaggtttatgggaccatagtagcgagggctgtgccttaatttctctctctctctctctctctctctctctctctctctctttttcctttttccctatcttgtgatctatttatgagtgagaaaaacaaaagtgagaaattgtgcgtgtatctggttgctaattcgagtgctattagtctgtggtttggttggtttgtaaccccgctacttgggttatgtttgattgtatattatcctagagaaataaaaattttaaattatcagtacgtattggtattacatgctagtgagctgtggttacatttttctttttttttaaaggagctattgtggttacactgtattccaacataatgcaattgatgtgattataattgccacagcaataattctaaaaacttgatattgtggctacaattacatattattttttagaatcatgatcattcgcaccaataaatgttgatcaattttataattgttataaatgtttaaaagaaaaaaaaggatatggacaatataagataatttaatgttctcatttaattattatcatatgttaagttttttacattttataataattatttcaaaagtcatactagtgatttacttttagataattatataaatttttttacagtattattaaatgatttaaaaatgaaaatattatgaagcatcaanattgtatgttttttttttaaaaaaaaaaaaaaaaaactcgcgactagtg

SEQ ID NO: 37856 - DNA, 335 bp, Glycine max
  unsure (1)..(335): unsure at all n locations
  Clone ID: PAT_MRT3847_134185C.1
ctgtcatatgatggagaatggattttgatctaaatatatattatttagtattttaattttgatttcatatttaggaatcaagtggattccaatcgaagaaaataaaggcttccatgagaaaaataagaaaagaaagctgaaaaacacccggcccaactttaaggccttgggagaatttttataatngagcacaaatacccccacagagggaatgaaattaggaccttgctggaggagttagggattgacagaagaagcaaatatctcggaatggttttgccacacgaaggttaaaagatataagattgatgaaagaggaagctgttgctaatggg

SEQ ID NO: 37857 - DNA, 1437 bp, Glycine max
  Clone ID: PAT_MRT3847_134186C.1
ggagcagaagaagaaaaggctttagatatagggaaactttttaattatttttggtatggtgagaagtgcaagaagaggaagaagttgagttgagttgaggttggagctgaaagaaaattgagtgagaattcaatgacacagaatctgaagcataccgtggatttggaatgcagtgataatagcaggccgtcaaagatatcaaaaatcgagtatccgagtgacagtgacattgacgaagaagaagaaggaatgagccaaaaccctaggaatgggattcagcgctatttggttgcaatcgagtatattgggactctcttctccggttctcagaagcagctcaatgtccgtaccgtcgtcggtgctcttgaggaagctttttccaaatttgttggccaaccggtctctgtgtcttgttcaagtcgaactgatgctggagtgcatgctttgtcaaatgtttgtcatgttgatattcaacgcatcagcaaaaggaggcctggtgaagtgttaccacctcatgaacctgctgtcgttggaagagctgtaaaccatttcttacagaagcacgacagtgacttaatggttattgatgttcgatgtgttccatctgattttcatgcaagatttaaagcgcaagagcgcacatacttctatcggttgctttctgggccagagcctttgtcaaccttcgagaaagatcgagcatggcatgtacctgaggagcttagtcttccagctatgcaagttacatgccagctccttatacgaactcgtgactcaatcttgcagcgggcagagtgattgatgatatcgatgccaattagcatgcaggatgaactcagtgtccatgaggtaattgaaagtccatattttccatctctaatggatagagaacaacataataaagtcagtggtgatcttcgtagctgccccaacaactctgaaactgacattcctcctacttctaatcctagcattgataaagtaatggcatcaagtcaagatgtaggatttggcaaaagaaggcgacatcgttgcctggtggtaacagcacgtgcacgtgcttttctttaccatcaggttagactacttgttggtgttctcaaggctgttggcactggaaacttaacaattccggacgttgaaagaattttgaatgcgaggactgttacggccgcaagtccaatggccccggcatgtggtctctacctaggagaggtgaaatatgatctgcctaccacatagtagatatttcagggtctctctcggaaacactaatgcattcaatccaatggactggatttttttatatttccttccaagtccaccagcagaggattaattttgtcccttgtatctctattaattttcgtttaacattactcggactcccatcattactttttcttttacttttaaaaaataaaaagaatcttctgc

SEQ ID NO: 37858 - DNA, 845 bp, Glycine max
  unsure (1)..(845): unsure at all n locations
  Clone ID: PAT_MRT3847_134187C.1
agttgtagttatgattgaatttccatttaaaggatttattttagtttaatgctctatggtacattcttctaaagtgttttttagcatttttcccnccgttcaaaaatcatcattcctgttttgattttctacaacatctcatgtnaaaagtctctttgaactatccataacatatgatgatgtagaattcccccatcncaggcaaagtcacctattagaactttggatgaactcagtgtcaatgaggtaattgaaagtccatattttccatctctaatggatagagaacaacataataaagtcagtggtgatcttcgtagctgctccaacaacactgaaactgacattcctcctatttctaatccaagcattgataaagtaattacatcaagtcaagatgcaggatttggcaaaagaaggcgacatcgttgcttggtggtaacagcacgtgcgcgttcttttctttaccatcaggttagactacttgttggtgttctcaaggctgctggcactggaaacttaacaattccggatgttgagagaattttgaatgcgaagactgttactgccgcaagtccaatggccccggcatgtggtctctacctaggagaggtgaaatatgatctacctaccacttaagtagatagatatttcagggtctctcggaaacactcatgcattcgagttaaaagctgctgtaggattcaatttcaatccaatggactagatttttttatattttgtgtaaatgtgccatttaagggtttttatatccttggaagtcccccagcagaggattaattttgtccgttctatctctattaattttcgtttaacattaaaaa

SEQ ID NO: 37859 - DNA, 574 bp, Glycine max
  Clone ID: PAT_MRT3847_134188C.1
gggctatcttagaatttattggtactgctaaccgggaataataatacaataattcacttaacaaatatgtcaattttttcagctatgtaattttccaatgctaaatcagcagtttgactaattggctgcaaattcaaagattctctgcctctccaatttccaatggctaggaatgaatgtttttgcacggttcaaatccagttatttggtccaattttggcctcaaggttaaacattccccaataaaaaaaaggccaaaatatatccaatacaatcaaaatcatatgaaaaaagacattatataagattccaagggaaaataatcccttgaatttcctgattcaaaacccgatccacttgtctccatttgactatcacaacgtattcaacctgagacttaatgtattactctcacgtctactccgacaatcaaaatctgccatccgtggaagacgtgaatacaataacaaaccatttaccaaatcgctactatgctttagcttctatccatcatccactttaacttctctttcagctttgattttaaccactttttttgcccttctcttaaaaa

SEQ ID NO: 37860 - DNA, 260 bp, Glycine max
  unsure (1)..(260): unsure at all n locations
  Clone ID: PAT_MRT3847_134189C.1
aagatcatctttggtggtttgggcatgtggaaaggcgggtagaagccccaataatcaaagaatagcctaattgctagagtacgaaggaaactcagaagaactatatgtgaactcattaaganggatntagaagtcaatcgtttgttgatagaaatgntttgataaacattatggtgtcgnttgatccacctagccaatctcaccaagtgggaaaaggcttngttgttgnttctgttgtancnacatgatggnatgcaatg

SEQ ID NO: 37861 - DNA, 237 bp, Glycine max
  Clone ID: PAT_MRT3847_13418C.1
accaggggtaggctctttttccttcctcgtaataggagcaaattgccttccatgtttgcccttgtagaggtccccaccatgagacagaaccttggcccactcaagcaatcacagcgtttagaaccaaacttaaagcagcaacacattgcgggtcctgacatcccacctgtgacgatgtgaaaaactttgctcttgtctctacgtgatacacgtgtatccaatgcctttatattttct

SEQ ID NO: 37862 - DNA, 329 bp, Glycine max
  Clone ID: PAT_MRT3847_134190C.1
gaggaaaaaaacacccccacgggtttgggggaccaacccgcaaaatgttattccccccctacaataacactctacctggggggagggggtggctaaccccccataaataggggggttatccaggggaaaaccccctatcccgggggggggggtaaaaaaaacaaaaaaaaattggtctgggccaaggggggaaaaaattaaaaatgttgcttggggcgaaccaagggactccccgcgggaaccctgcgctataaggtgggcacaccataaaaaaaaaccccttgggctggggagggaaaaaatgggcgcttttttaaacccctttttac

SEQ ID NO: 37863 - DNA, 362 bp, Glycine max
  Clone ID: PAT_MRT3847_134191C.1
aagggaaaaagaaactaccacatctttagtttcgtaaaattttcattctgaacacaaatcaactcccttggtaacaagggtggtgatccatatcaatgcacaaaacttttggggtcacactttattccatacataaggggatctaaggaaatatatgccgccttctttcttgggctgcatgttccttcaacattttttccccataaccctggacattttaggggaacaaggcaaaaaaggacaagactggggcaccacccaaggggccaccaggggggggggaggcacccctgttagggccaggggcgggtgcaaagacctttgggggagcccatgctggactcatgggggcaggggcaatg

SEQ ID NO: 37864 - DNA, 947 bp, Glycine max
  Clone ID: PAT_MRT3847_134192C.1
atttgcacctgtactaaatataaggcagtggaagaaggtttaattactgtgaatgttagggaagaagtactgaaggtgtggtgatgggtgttccacaacctccacctccctctcaacatctctatccacaagaaattcagcttaaaatttccgtgaatgttagagaagaagtactgaaggtgtggtgatgggtgttccacaacctccacctccctctcaacatctctatccacaagaaattcagcttaaactttaccaagccttcatattctcaattcccatactcttttccatcattttggttcttttgttttacttgttctacctcaaaaggagggcttcttctctctcatcaccacctctccacatacttcccagtactactaattcacaaactacatatccttatccttcacaaccttgccgtttagatctgacagtgcaatttctggacaaacttccaagaattttgtttcatgaggatttaagaacaggagattcagtatgttgtgtttgcctaggagaatttgagctgaaggaagagttgctacagattccttattgcaagcatgtgtttcatataagctgcataagtaactggctgcaatcaaactccacgtgtccactttgtagatgctccatcattccctctaccaagttccttaatcccgcgccacctattatatcagacccaacacggcaaggtggagtttcaggctcttcatcacacatcttgtcattgcctcatcaacaagaagaagttggtgcttccacaaatactaccatttttcaagggaatgatgtataatgtattaaataataaatagacaataataccttttgaattgtagggggaggaggcattcaactggtcctcatgagtctagagttctgtatattcaaaaccaatattaatgtatgaaataaaatgtggcctttctttatct

SEQ ID NO: 37865 - DNA, 657 bp, Glycine max
  Clone ID: PAT_MRT3847_134193C.1
ctcaaatgttcttcccctcctcttccctcctatgaaccacttttcttcctgctctcagcaacaactcaaatacctttctccctcactcaattcctaaatcctaatccccccttttcaaatcaaatcccaattcccctcccaaaccccaaaaacattcacctcttcgtaaaaatcccacctttccttcgattttcccctacccacccaccctctcagtttttcacttcaagattcagatgcgctttctttccgctactcttcttttcttcgtgggttcctttcccctttatgaaatgcttaatcctacgcggccacgatttcttcaatagccttcaacgcgcaccgtctctgcgttgcccagaaaacctaggtgcttagggctcttcaaatccttcgtgggttttgctcaaaattcgaattttccgattcttttgcaagtgggtatggtggggaacgatgacgcgggccacctctccgcctcccggaagatgttctggcggtcggcgtcgtggtcctcctcgcgaaccgccgccggaaacgcctcttccggcgagacggagaagggtttcgctgattccggtgccgctgacggtactcacggccagaaccggcggtttggtccgccgccgctgacgcctcggtcgcagcagaattgca

SEQ ID NO: 37866 - DNA, 381 bp, Glycine max
  Clone ID: PAT_MRT3847_134194C.1
atacgaattgagagaattttttttaccaatgtagtattaacttatttaatgatgaataatttttaatcatgaacaagcatgtaaatctttgatacttttaccttgcttgtttttgtcacacgtcacttctagcttgatcccacatatttttagtctttctacatgttcaattttttctatttttgcttcgcattttactggcatagcaaagagtggtcaatatgataatcaaaataattagccaagcaaaagtgaaaaccatattgaaatttggaattctgtgggaaaaaaatgtcaaggcaatatgtgaaggttcttaattttatggtcttcaagaacatatggggggttttaagtaagccctggtttaaggattaaaaa

SEQ ID NO: 37867 - DNA, 1948 bp, Glycine max
  Clone ID: PAT_MRT3847_134195C.1
ccacgcgtccgctaattaataccagctgattcgtgatatctgctatgggatccaaatctcctttgtgcaaatcagctccatttataaatcagtgctgctcatgcacaaccaatcatccatttccccatccaaaacaagtctctttctaataccggtagtgatatgtactcgggaagtggaaactcgattccagaaatatatgaactcatcgtcttatccagattcatcatcatcattcttccttatcagtgagcattcgaaatcgctgttgttgggaggcgaaggcaaccatgaccatgaacggccaccataccgttaacatcgctaacagtaacaggcaccccaacgacgatgaccaccacgccctccctccctcctccgaccatgatgatgacgaacaagaactcgtggatcccgatgatccttttgacattactcaaaccaagaacgtatcgcacgacacgcttcgccgttggagacaagcagcactcgtgctcaatgcgtccaggcgttttagatatactttggacttgagaaaggaagaagagaaagagcaaaagaaacacttgattagagcccatgcacaagtcataagagcagcactgcttttcagattggccggtgaacgcgagctagtgataagtacagcagtgtcacccccaactccagttggtgactatgatattgggctcgaacaacttgtttcaatgtctaaggatcagaatatttctgctttacaacaatatggagggattagaggcttatcaaatttaataaaatctaatccggataaaggtgttagtggcagatgatgctgatctgttaaaaaggaaaaatgcatttggaactaatacatatcctcggaaaaaaggaagaagtttctggaggtttttatgggcaagcttggcaagatctgactctcataatactgataatagctgctatggtgtcattggcacttggaataaattgatagggtttggctgaaggatggtatgatgggggaagcattgcttttgcagttcttcttgtcattgtagttactgctgtcagtgattatcggcagtctctgcagtttcagaatttgaatgcagaaaaacaaaatatacaattggaggttattagaggtgggagaacaattaaaatttcaatatttgatattgttgttggtgatgttataccccttaaaataggagatcaggttcctgctgatggagtattaatcacgggccattcacttgcaattgatgaatccagtatgactggtgaaagcaagatttgttctgtaggttcacaaggatcacaaaacaccattttttatgtctggttgcaaagtagcagatggagttggtgttatgctggtaactggtgttggtataaatactgaatggggattgttgatggcaagtatctcagaggacactggagaagagactccgttacaggtacgtttgaatggagtagcaacttttattggtgtagttgggcttactgtagctgttttagtgcttgctgtcctcttgggcagatacttttccggccataccaaagatatagatggaaatgttgaatttgttgctggaaagactagtgttagcaatgcagtagatgatgtcatcaaaatttttaccatcgcagtcacaattgtggtcgtggcagtccctgaaggtctacctttggctgttaccttaaccttggcatactcaatgcggaaaatgatggcagacaaggccttggtacggcggctatcggcctgtgaaactatgggctctcccacaacaatttgcactgataagacaggaacattcaccttaaatcagatgactgtagttgaagcatatgttgggagcacaaaagtaaatccaccggatgactcatcaaagttgcatccaaaagcattgtctctgataaatgagggcattgcacagaatacaacctgaaaggtttt

SEQ ID NO: 37868 - DNA, 362 bp, Glycine max
  Clone ID: PAT_MRT3847_134196C.1
gggaaaacgggaaaaaaaaaagtaaattgggaagcgggatccaacacaagggaaaggaaaaaaggttgtttacaaaaacacaaaaactcccttaaaacacaatttggggaaaacaacactaacaaaaacccttaaaagcccttatcccccacatgggaaaaacaataaatttggctggggaattacgggataaaaaacgttcccccggttaattacaacaaaaaaaaccctttgccaaacatataaaataaaaggggcgtatgtaggcctgatttaaatgggaaaactggttgttccccccacccattatttggaattcccaaccttggtgggcaaaataaaaacttttaggggcctttccc

SEQ ID NO: 37869 - DNA, 445 bp, Glycine max
  Clone ID: PAT_MRT3847_134197C.1
ggtttttgaacttgtattgatctcattaattatgatttcaattggaataagttagctcacctaccatagggatgctgctaggaattgatatttgttgtatcttgatgcactgttgcatgcctatttctcctaaatgtcatgttatttcagttaacctatagacacatggatagatttacaatgcatgttttttgtatctttgttctttgatggaaagaaatttaacatgattgcaattgaaacatggtatataataaataaaatttccattggctcaaactcacaggaagtacaataccatgtactgaaatgctctgatattgtttcctgtagaagcagtttgtactgtcaccagtctttgttgctgcatatttggtacttatgatgtctatctaatgcttgcaaacctgcagaaagaacaagtcaaggttatcagcttgaattt

SEQ ID NO: 37870 - DNA, 169 bp, Glycine max
  Clone ID: PAT_MRT3847_134198C.1
aaggtttaaaaataccgtgattactggatgatgtaccttaaaaccggtaactaattgcaagggtgacctgaatacaagaaagggacagttttgtatgtagttgatgtgtggacgattctttaagggaaagaaaataattctttgtgttagggcacagagatttgtgaaa

SEQ ID NO: 37871 - DNA, 948 bp, Glycine max
  Clone ID: PAT_MRT3847_134199C.1
accagcttgtgacaagttatctgaaaacaaaggaaatatggctgggttgagggttaaaaagatcatgaagagagtctctgatgatggagaatcatccttggtagttcaaaatctaaggcaagaaattagagaagctgtccgtaacaaatcctctataaactttgaggataaccattttgatcccaagcttcttgaagcatttagggctgctatacaagggcctaaaactgaacttgtaaacaagttatcccctgcagctataaaggcaaagaaatcaatgttgcagaaaggaaaagtgcgtgaaaatctaacaaagaaaatttttgggacatccaatggaagaagaaagcgtgcatgggatagggactgtgaaattgagttttggaaatatcgttgcatgagagctacaaagcctgaaaagattgaaactttaaaatcagttcttgatctactgagaaaaggttcaaacaatccagtatcaaagcaggcttctgaatgtcaggccaagaatcctattctttccaggttgtatttagcagatacatctgttttcccccggaaaaaagatgtcaaaccactctctgtgcttaaaaccattgctaactcggagcaaactaaacatagcctgtcagaaaaagtaccaaatctatcggttgataacaatactattaaagcaactgatataaataatcttttatcaaagaacagtgtttgttcatctgaaaaaaaagtagataagaagcttgtacgtggtccagttggtgatagttcaacttctggtaaagtacgttcagacaatcactcagaaaggacatcagtttcatcagctggtgccaaaactagcacaaaagagttggaccttaaatctggttgtatgaagagtgataaaagaaaatgggccttggaagttcttgcgaggaaaacagctgccacaagtgggaacacagc

SEQ ID NO: 37872 - DNA, 1963 bp, Glycine max
  Clone ID: PAT_MRT3847_13419C.1
ctctttttcatttcccacttcctcaccaaatccaactcccttcctcaccaaatccaactcctctttcttcttccacactgccattgacctctcttcagcaccttcgatttgaagctccgtctcaattggatacctgctactgtcttttcctttttccaaaagttatcccaggagattgcttctaaatatcagttgcaatgcgtgcaccagcattacttgcgcagtgcttacctggcctagtgcctcatgatcgtggaagtctcagcatatcgtccgttcctgagaaagattttcatctcccatcaccagcagtagagattctcccttccaagacagttcacactgaaaaagataatggggagaatatagatcattttaagggtttagttagtgttgccgatattgttggattcagtggttcagagacaatatccttaaaacctgatggttatctgaaatcctggactagttccattgatcttgttagtgttcttaagcatgagattcgtgatggacaactgaccttcagaggaaaaagagtacttgagctcagttgcaactatggacttcctggaattttcgcttgcttgaagggagcttctgtggtgcattttcaagatcagagtgcagaaactgtcagatgcacaactataccaaatgttcttgctaatctcaagcaagctcgtgataggcagagtcgacagccagagtctcctcttactccttcaagacagactctggcaccatcagttaacttttatgccggggactgggaagaattaccttctgtgctgtctattgcgaaaagtgatggatatgaagtgatgcctggaatgagtttgagcttttctgaggaagattttatggatgggtgtagtagtcaagatggtagcatcattggacacgaatctcactcaaggcggtctaggaagctctcaggaagtcgagcatgggaaagaggtagtgaggcagatcaaggagagggtggctatgatattattttgatgacagagattccatactctgttacctctttgaagaagctgtatgcacttattaagaagtgcttgaggcctccatatggggtggtatatctagctcctactaagaggcactatgttggcttcagtaatggcgtacgacagctgagaagtctggtagatgaggagggcatttttggagctcatttagtcaaggatttggctgacagggatgtctggaagttctttcacaagtaaacaagaatttgaaaatcagatgactccctcagcaaacatacgatagaatattctaatggcaccatacatttttataatatgaatcacaggcattcttttgttttttaaatccttgatttttcttattgcttagtaataatggaggtctgaatttgaatgctcagtttacgtgcatcatcagcatgaagctgcctcatttagttgagtaaatttccacattaatatcctcaagattgcttgggttgatcattttagtccttgatagttgatattgtgttagtctttgattttataaagtgacactcatttagtgtcaaatgatagtagaaaataaagtaaaaaataaaaaaaccctgtaaagtgagagactaatagaggatatttaaagtcttagggattaaaaatgtagtagtactatgattctacaatctcgaggattgatgtgaagatttattccatttaattctcttgcacacttatctcgttggaaaagaaattcagatattggaattgtaaatcaaaccttagttatattgaaaaagtagtagtactagtacaatattactactattgtttattgcatgtatcattttcagttttcagttaacactgaggctttgagcttgttttgaagtacgtgcctggctggatcagagtggaacgccaattattagaggtgagaagcgacctgcgtgtgagtgagaagataacgaagatggatctgt

SEQ ID NO: 37873 - DNA, 151 bp, Glycine max
  Clone ID: PAT_MRT3847_1341C.1
gtttgggagggtacccaaaaagagcgataatactaggtactacaaaatcctcggcgtctcgaagaacgctccgcaggatgatctgaagatggcttacaagaaagcctccatcaagattcaccctgacaagggcggtgatcccgagaagttc

SEQ ID NO: 37874 - DNA, 2099 bp, Glycine max
  Clone ID: PAT_MRT3847_134200C.1
gtggagcaatagtggatggccccgatttaggtcgaagtatatgagtgctgaggaaattaaaattcggcttaaggagaagcaatagtggatggccccgatttaagtcgaagtatatgactactgaggaaattgagaatattcttagaatgcagcttgtagcaacacacagtaatgatccatatgttgatgactattaccaccaaggctgtcttgcgaaaaagtcatctggtgctaaattgaggcatcacttttctccagctcaaataaaggaactccctctacgaccctcttctaatgctgaaccacatgcttttcttcaggttgatgcactagggagagttccattctcatcaattcgcaggcctcgtcctctactggaagttgatcctcccaattcctctcatgcaggtagcccctgagcaatgcatttcagagaaaccccttgaacatgaaccaatgcttgcagctagggttactattgaagatggtatttatcttcttcttgatgtagatgatattgaccgtttcctacggtttaatcaccttcaagaatggtgtgtcttgtgttaaaatggaaactgcaaggtcttctggaaggacttgctacctctctgcagtcaggccctctcactggtaaagaatggacgtacggatacacttgctgcaaaagatgactttgtctttctccagggagtttctctattgcacgggtcgtaagctactgagtaaattagtgcgactgctgtccaaggtttaggtgttccaagttggatagtctgcatggccatctttcggcatttaaggttgttatttggtggccttccctccgacccagctgcagcagaaactataagtaaccttgcgagggttgtttcgaggtgcattcgtgaaatggatctaggtgcagtaagtgcttgtctagcagcagttgtttatacttccgagccgcctcccctacgtccccttggaagttctgctggagatggggcttcccttattctagtgtctgtgcttgagagggcaactgaacttctaactgatcctcatgctgctagcaactacaatattgcaaatcgttcactttggcaggctacatttgatgaattctttggccttctaaccaagtattgtgtgaataaatatgatagtgtcatgcaatcattccttatacaggggacaccaaatatggcttccattggttcagatgttgccagagctattagtagggaaatgccagttgagctcttacgtgcaagtctacctcacactgatgaccgccagaaaaaacaattacttcattttgctcagcgctctattcctgtagttggatttaatagtaattcgggggatcaaggtcaccatgtgaactcagagtcagtcctgagttaattagataattggacattcatctatggaactgtttttcaaattacggcagtaaattttgcagggacaactgttgtgtgtctaatatctttggagcagtctgatgtggaaggaccgggtgcatgcatctaccttggaagttttaaccgcttcatatcttgttatattgcggtaatgccatgtagcattgtgataaatttgcaatcaggccctttgtgtattatgatagacttggcttgatttgttcctcttgtcttgtctttttttcttttgacaggggagcttattgttgctcgatttgtggtttctagagcaaagtagtgggtagtgtgtccaggctttaggtgtttaagttggattcccatgttcctttattattaccatacaggcatgggattgtggttgtgttcatactccatatctacctttatagatatcatgtgtccaaattgaagtagcatgggatgcaccaatttaaccagtcggcaaggtggcattggcatgcctaagaataaattgtgttaacctagtttcatggtttcagttttctcttcttttccattggtgtagatgtgtagttttgtatcatcatttcttgtttctcaagtcaattggactattattgctctatcgttgttatccccaaaaaaaaaaaaaaaaaatcggtatgtcttgaatttaatgttttgcttatatatatgattttggaagta

SEQ ID NO: 37875 - DNA, 380 bp, Glycine max
  Clone ID: PAT_MRT3847_134201C.1
ctattccctttgtcccacaatcctctatactttttatttttaaaaccaagtatttctagacagaaagtaaaaaattaatcccttagaatattaaaattcattagggtatgaggacattgctacgtgcacctagcaaaattgctggcacacccaacaattgcatgattttcccgtgttgcccttctataaaaggaacacggattgactaatttgaagtgtttttttttcttcaaaaatatattttatgaattaatttaaaattaatggtccaagcaagagttaactttcgtgttattaacacgacactctaaccaattaagcaaataagttaattatgttataaaataaataatgttactatatataacactaaaatttct

SEQ ID NO: 37876 - DNA, 234 bp, Glycine max
  Clone ID: PAT_MRT3847_134202C.1
tttttacttttttaaaaaattctctcagggtggcaatcaggacataatgtataatcttacatatggtctaaggtagaaacactcacaagattattgctcagacgtaagatgcaattgcgtcacaaacaactaaagaaagaccgggcatgctaagagaggagtcttataccttggcatgaataaagagcttaagatgaattattgtggtatcaccttgtaagggcaccttcaatg

SEQ ID NO: 37877 - DNA, 979 bp, Glycine max
  Clone ID: PAT_MRT3847_134203C.1
acgacccacgcgtccggtgtctgctgcaccctacaatggtgttcgctaccaacatggtttcgctactttcaccacaaggtcggatactccgtttccctcgccgtgaagaacaataaaggagatccaatcacagccagagagataaatgatgctgtttggaaaaacttctttctaggaaagctgacatacttgctctggaataaaggagaggagatggcccctactattgatggaaaagcagtaactcttgttcggaaattaccagctgtagacccaacgagtgtttttgtaggagatgttgtggttatgaaggaccctgagaagccagataactacctactcagaagattaactgcaattgaaggctatgaagtggtttctactgatgaaaaggatgaaccctttattcttgagaaggatcaatgctgggtagaggctgaaaatgaaaaattgaatgccaaggaagcgaaggatagccgaacatttggtccagttcagatgacagacattgtaggcagagtcatatattgcctgcgaagtgctgtagaccatggccgtgtacaaaacagtgatttcggcatgcgaaacgatacaccagtgctggaagtggaacttgatgttgatgagatggcaaagagtcacaaagcctgaaacatttttcccaagaaacactaactagtttactttacgcatgccttagtttcttcttatggattttccttgaagcacagattgaagaataaaaaaaatatgatttttaaattgttgcaatgggatgatggtgttatgtggatgtcctctgcatgctaggcaattggctgcggcctgtgttaaagcttgagttcaacattattgtatgctaagttctagcaaggactcctctgccctttgttctattcatttggctgtaaaattgaccaagttttggtctttttttgttaatggtcgaggaagataataaaagatgctgcgttgttag

SEQ ID NO: 37878 - DNA, 1273 bp, Glycine max
  Clone ID: PAT_MRT3847_134204C.1
ccggaattcccggctcgacccacgcgtccgcggacgcgtgggttcatatgcaaaagcgtaataagaaataacgagagaaaaattctggggtttagaggagaaaaggggagaaagggtgggtattgcttcacacaaacacaacagtgtctgctgcaccttgcaatggtttcgctatcaacatggtttcgctacattgcccacaagctcgaatactccttctccctcagctggaagaactacaaaggaggtcaaattacagacagagaggtacgtgatgttgtttggaaaaacttctttcaaggaaagctgacgtacttgcactggaataaaggagaggagatggcccctactattgatggaaaagcagtaactcttgttcggaaattaccagttgtagacccaacgcgtgtttttgtaggagatgttgtggttgtgaaggaccctgagaagccagataactacctactcagaagattaactgcagttgaaggctatgaaatggtttctactgatgaaaaggatgaagcctttgttctcgagaaggatcaatgctgggtagtggctgaaaatgaaaaattgaaagccaaggaagcgaaggatagccgaacatttggtccagttcagatgacagacattgtaggcagagtcatatattgcctgcgaagtgctgtagaccatggccgggtacaaaacagttatttcggcatgcgaaaggatacaccagtgctggaagtggaacttgatgttgatgagatggcaaagagtcacaaagcctgaaacatttgtcccgagaaacactaactagtttgctttacgcatgccttagtttcttcttgtggattttccttgaagcacagattgaataataaaaaatatgatttttaaattgttgcaatgggatgatggtgttatgtggatgtcctctgcatgctaggcaattggctagctcttcccaagcagaaattggaagcggtctgtgttaaagcttgagttcgacattattgtatgctaagttctagcaaggactcctctgccctttgttctattcatatttggctgtaaaattgaccgagttttggtcatttttgttaatagtcgaggatgatagaaaaaaaggctgcattgttagaaataatagtttcagatattttcattttatgaagacctagtgcctcgactgagtgttcacttcttgccaatttgtctttctagggaacaatcgttgatatctgttctctttagtcagttgagtgaaaaagaacgtttaagtgaa

SEQ ID NO: 37879 - DNA, 244 bp, Glycine max
  unsure (1)..(244): unsure at all n locations
  Clone ID: PAT_MRT3847_134205C.1
tctcangcacgcgtacgtacagctcggaattcggctcgagtgnngaatcctaagccctctcctgctcgngatntnactctcncnagattagagnttgnngatggtntctgacgcgancnngangantgctgcgcagtnnaangcggcngcagggccaagagaggangcnnngcatcagctgcttcgtcgaaaacgacgtcgtcngnnaaggccgccgacaagctnncagacgnaattggtngtt

SEQ ID NO: 37880 - DNA, 423 bp, Glycine max
  Clone ID: PAT_MRT3847_134206C.1
aaaaagggatttgggaaaaaacccattccccttggggggaaaaaactttccaattaaattggcaaaagggccaaaaaaattcccccccctaaaacatcccgggggaaaagggcccctttaaaaggggagggccaactttgaaaaaagaaaaccccttttccgggttttagcggttgggaccccttaaaaaaaaattaccgaaaaaggtttttaaaaaatttttccccggggcccctttttgaaactaaattcccacaaaaaggaaaacaaggggccttttttaaaacttaggctagcattggatccacattgggcgattaaaaaaaaaggaaaatgggggtttttgaaagccctaatttttggaaaggaactggtttccttgaggaaagggccccaccctatccaaattttttatcccttcaa

SEQ ID NO: 37881 - DNA, 605 bp, Glycine max
  Clone ID: PAT_MRT3847_134207C.1
cattagcaataattcacaaacacaaaaccgccaccaccaacacacaatggcacgccaagtgattgtcatcgccgctctactcatggtagccattgttggtgtggccctggccgatgaagccccatcagcatcacctaagtcagcaccaacaccatcatcattaccaaaagcaccaacatcatcaccgaaggcaccggcaccatcatcctccaaggcatcaccaccaacctcatctcctccgacaacttcccctgttgttgggcaagagcccgcctccccaccggccccaggcagcgaggaaattgaattgggtgcccccgtgcccgctcctgctaatgaagtggccgttgaggagcctgttccagctgagaccaccactagcatcgcctctacccttagagtgcctgctatcattgttgtcatcgctagcttcttcgccttctaagctgctaccttttacgagcttttcttatatgtgttgtgttacaccaccttgagtgttgtgtttgtgaaatgactgtgtgttattgaatgaatgaattaacttaaaaaaaaaaaaaaaaaagaataaaaataaaaaaaaaaaaaaaataaaataagataag

SEQ ID NO: 37882 - DNA, 475 bp, Glycine max
  Clone ID: PAT_MRT3847_134208C.1
tacggctgcgagaagacgacagaagggttatagattattaatatcattgatgttttaaatatataattatgaatgtgttaaaatttgagtttaatttataggcattttaagtataaaaacattttacattattgatcaattgaaaataatagttgacattctttttaacatgactattataaatgttcacaaacttattatattatgctgaaatgataattaaatttttttttacacaatcaacatatacattgttttctcataaaattaaatgtgtacatatttgttgaatgaatttaatttaatttattgtctataatagtgatgttgccttatattcagggccaactacagggttacagattaagagaatgtacagggattagtttactgtataaaacataagatcctatatcttttctttgtgaaaaatagaaaaatctctcaaacacatgttgtaggtcatatcgatcaa

SEQ ID NO: 37883 - DNA, 432 bp, Glycine max
  Clone ID: PAT_MRT3847_134209C.1
aaaagaagttgcttttgttcattttccccaaaaattttatgctactgggaaagacgaccctttaggaattcagatgacaatcttggctaagaactccggcaggctagaaccaaggggactgcaaggtcctttctacgggggatcaaactagccaacatagaagaaaagtcatttatggtctctctccagaaaacattgaacaggatggcctggatatatggttcagccacagaggacgtgctcaccgggctgacaatacatattaaaggttggagatcagaattctgtatgcctagcccaacttgaattcaccggttttgatcgaggaagtggcccttattcaatggcccatcaaaagatatgggccacaggactcgcccgagatgtccccttgcaagcatccccctatggttagcaccctttttcataagc

SEQ ID NO: 37884 - DNA, 258 bp, Glycine max
  Clone ID: PAT_MRT3847_13420C.1
acggctgcgagaagacgacagaagggggaatatcgcttgactatttttgttcttgcgcactctcctttgttgactccttttctctctgtgtctacaaacctagcttctcttgctctcactctttgttaaagctccctccagtgccgcgtagttgaaactacctctcgccctcactctctgcaaagttaagatccctctctcccccttgaaccctctcgttgtgtttctctcaccatcgaaccttctctcgctctctgc

SEQ ID NO: 37885 - DNA, 522 bp, Glycine max
  Clone ID: PAT_MRT3847_134210C.1
gcaaaacaaatccaaaactacagttctctcaatgaagctcccagcacattgctttctggcttcaactttgaagtcacttgtccgtttgacagtactattactagttgtttccagcaacaaaacaaagggtgccgtgaaacttccaccaaatatctcggttccagcagtgttggtatttggagattcgatcatggacactggcaacaacaacaacaacttgataacatcagctcggagcaacttcccaccatatggccaagattttaagggagggatccctactggtcgattttgcaatggaaaggttccttcagatattctaggtttgcttgcttcgaggacacttataaattgattttttttatatattaaattgaacgaaatttaattatattaaatcttatccactaagtttttaacacttttaaaatttaatttattgatttaaactttgttttggtctatattataacctaaggtttattaaatacccattcatatatgccgcaattctttttaatt

SEQ ID NO: 37886 - DNA, 2006 bp, Glycine max
  Clone ID: PAT_MRT3847_134211C.1
tacggctgcgagaagacgacagaagggggctcagatcgaagaagcaaaacaaagccaaaactacagttctctcaatgaagctcccagcacattgttttctggcttcaacttttaagtcacttgtccgtttgacagtactattactagttgtttccagcaacaaaacaaagggtgccgtgaaacttccaccaaatgtctcggttccagcagtgttggtatttggagattcgatcatggacactggcaacaacaacaacaacttgataacatcagctcggagcaacttctcaccatatggccaagattttatgggagggatccctactggtcgattttgcaatggaaaggttccatcagacattctagttgaagaattaggcataaaagagtttctacccgcatacttggatccaaatctgcagcttagtgaattagccaccggtgtgtgctttgcatcgggtggttccggatacgatcctttgacatcacaaactgcgacagctataccattatctggtcaactagacatgttcaaagaatacatagtgaagctaaaaggacacgttggagaggacagaacaaacttcatcctagccaacggtcttttctttgtcgttttacgcagcaatgacatttccaacacatactttttgacccatcttagagaactgcaatatgatgttcccacttactccgacttcatgcttaacttagcttctaatttcttcaaggaaatatatcaactaggtgcgcggaggattgcagtagttagtgcaccaccggttggttgtgtaccgtttcacagaacattgagtggtggaatagcaagaaaatgtgtacaaaagtacaacgatgcagtgctgttatttaacgacaaactgtcgaagaaaataaattcccttaatcttaaacttccaaacagcaggattgtttacttcgatgtttacaaccctttgcttgatgtcactgtgaaccaccaaaaatatggttccaaagtcggggacagagggtgttgtggcacaggcaatctagaggttgcattgacatgcaaccatttggatgccacgtgttccaacgttttggattatgtgttttgggacggttttcaccctagtgaaagcgtttacaaacagcttgtgccccctctcctacagaaatatatacaccggtttgcgtgagcaattaatctatttcctttttacacaaatctatctctgattttttatgtaatttcgggtttgattaattcttagctacgtggctaccaaataattcgttatatctaaaagctaaaaaatcatgcatacaatttctagagggttgtggctttttcagacaatagtagcagaaacaagtgcctctgagatgcattttctttgagatgcattttatattttgagtgcatagcttgctcaaaagtatggaagctaaattggattatcattttctcagctttgcgtaataattgcaaggtctgttatcttcaatttctcgcttaattactaagttgttgttcagtcttgaggaaggagcggcaaactatttggcacgcagtagtatgaaatagaattattttgtaataaaaaaagatcggagatagaagaaatagtggattcaggtttatgatatggtatcttgcttttaaatttgatgtggtattttttattcaatcttattttaaggggtcatgtaaatttgactcgaaaaaaaaaaaaaaaaaaaaaagggcggccgctaggaagcgttgcttgcttcgaggacacttataaattgattttttttatatattaaattgaacgaaatttaattatataaaatcttatccactaagttataacactttaaattaatttatgatttagacttgtttgtctatatatactaagttataatacatcagatgcgattctttatgcgttgttgaattcgaattattctttttttttttcattacatgtattgtgtgcgataagttaaatatttatttatttcctttttagtaaaaa

SEQ ID NO: 37887 - DNA, 230 bp, Glycine max
  Clone ID: PAT_MRT3847_134212C.1
ctgaatgagcaacaccccagtggagggatacacaaaaaaggtggtcatactcaatatcaatttcaaaaaacatattttagtaactgagattagcaaaacatgactcacattctcaaactgttattagctttgcatcaaaattttttaaatcatataaaaaattcacgactaacaaataacttataatcaacttaagccaaccatattgttgtgaaaccataattaacact

SEQ ID NO: 37888 - DNA, 145 bp, Glycine max
  Clone ID: PAT_MRT3847_134213C.1
ctcaaaccaaatatgctaaaagccctacactaaatctgggggggctttatttatagcatttgtaacttaaactgatcataccattatttttcagggtctgaccaaaaaactggtgcaaaaaatagagattcacgaatatggggtg

SEQ ID NO: 37889 - DNA, 327 bp, Glycine max
  Clone ID: PAT_MRT3847_134214C.1
tttttaattcaaccacaagtctccatactcaacataattctacacccactcgtcttaatgccctgtaaggactaaagaattatacacaatggatctacaacgcatgatgaataatgacgtggctacataaaccctatgtgatagaacaactcgttaaaccataaagggactatagccgcctgattgagaatccacaaaaacacaaccaagaacatcataatttccaatgaaaccttcattctagaaccacagcttgaaaccactgaacgaaaagaacaatactacccataaaagaaaacctgactaggaaaaccaatttcatcaacc

SEQ ID NO: 37890 - DNA, 2683 bp, Glycine max
  Clone ID: PAT_MRT3847_134215C.1
cccgacccgatcacagaccaaactcatctcgttctcttctcttgcactctcgcgcagatacatatatatcttcccaaatccctcgccgttttttctcttcaaatctccgaatctcccaaagcacgtgattcacttcaagtaattaattcatagattctgatcgtcgctgagctctagttttcaaaacactcgatttttctatagagagaggagtttgctctcttaccatgctttggacgctgctggagcatggttaatgatatccacctttcaatattttcttgctcccaaccataataggaacagctacaacagatttattttttggtaaggcagaggttgatgttccacaatgtcttcccttcaactgttgcaactaactcggcgtggccagagttttctggcttcaaggaggaaaactttattacttgcatctggtatcttaatcgctggtggaactgctgcatatgtgcaatcaaggtttagagttaataatcacgatttatttggccattgcaatgggcacagtaatgataaagaagttgcagaggaggttgtgaaggatgttagtactccaaaaaataaacaaaagaaagggttgaagtcactccaagttctagccgcaattctactatctggaatgggcaaatttggtgcaagtgatcttttaggtttagttgcgatagcggtgctgcgaactgctttgagcaacaggctagctaaagtgcaaggcttcctatttcgtgctgcttttcttcgacgtgtaccattgtttcttcggctaatttcagaaaatattcttttgtgcttccttttgtcaaccattcattctacgtcaaagtatataacagggactttgagtttacatttcagaaaaatattgacaaagcttatccattcccactattttgagaacatggtgtattacaaaatatcgcatgttgatggtcggataactaatccagagcaaagaattgccagtgatgtgccaaggttctgttcggagttgagtgaaattgtacaggatgatctaacagcagttactgatggacttttatacacttggcggttgtgttcatatgctagcccaaaatatgtcgtctggatattggcatatgtacttggagctggtgctgcaatcagaaacttctctccttcatttggaaaacttatgtctaaagagcagcaattggaaggagagtatcgacagcttcacgcacgattaaggactcactcagaaagcatagcattctatggtggagagaggaaagaagaagctcatattcaacagaagtttaaaaccttggacttattattgaagtaccttggtgctactgttgctgttattttgatcattgaacctttcttttctggtcatctaaggcccgatagttcaactttagggcgtgcagagatgttaagcaatcttagatatcatactagtgtcataatttccttatttcagtctctaggaactctttctatcagtgcaagacggctcaatcgcctcagtgggtatgctgatcgcatttatgaattaatggccgtatcaagggagctaagcttggtgaatgagaaatcttccctgcaaagaaatgcaagtagaaattgcatacgtgaagctaactacattgaatttgatggtgtcaaggttgtaacacccactggtaatgtcttggtggatgatctgactcttagggttgaatcaggatctaatcttttaattacaggtccaaatggcagtggaaaaagctcccttttccgggttctaggtggtctttggccattgatatctggacatatagtgaaacctggaattggctctgatcttaataaggagattttctatgtgccgcaaaggccatacactgctgtaggaacacttcgagatcagttgatttatcctcttactgaagatcaagagattgaacttctcacagatcgtgggatggtggagctgttaaaaaatgttgaccttgaatacctgttggaccgttacccacctgaaaaggaggtaaactggggtgatgaactgtcattgggtgaacaacagagattgggcatggcaagacttttctatcataagcctaaatttgcaattctagatgagtgcacaagtgctgtcactaccgatatggaagaacggttttgtgctaaagttagggccatgggaacatcatgcattaccatatcacatcgtccagcattggttgcattccatgatgtggttttatccttagatggtgaaggaggatggagtgttcattataaaagggagggctcttctactgaaatggggattgatacgatgaaggcatcagaaaaaaaacgacagagtgatgcaaaggcagttcaacgtgcattttccatgagcaaaaaggattctgcattctcaagtccaaaggcacagtcatattttgcggaggtgatatcatcatctccatctatcaatcatacaatttcaccatctgctgttccccaactccatggtaatacaagggtattgccattgagagcagctgccatgtgtaaagtattgaaaggatcaatagtagtggtagcagtgatgagggtgtttgtggggcaagggggtggcggttatggtagtgatggtagcggtggcggtcaattgaatggtgattgggctggtgacaacaatgccggtgatgatggtggaaagtag

SEQ ID NO: 37891 - DNA, 908 bp, Glycine max
  Clone ID: PAT_MRT3847_134216C.1
actaatgtctatcttttgtcttttcttattcttttccttcattagttgcatgactaattcatctgaagaatgcaccatgctagacatagatgtagtgcaacgaattgtggaatacttcttgatgcatgaacaacagcagattcaacagcaacagaagactaggaaattcaatattagtaggctcttggataattacctagctgaaattgcaagagatccaaatctttcaattaccaagttccaagtttttgctgaattgctaccagaaaatactcgatcatatgatgatggcctatatagagccattgacacctacctcaagacccagccttcactgaccgagcatgaccgtaaaagactctgcaaaatcatgaactgtgaaaaactctcacttgatgcatgcctgcatgctgcacaaaatgagagattgcccctaagaactgttgtccaggtaaacatgcaggttctattttcagagcaagtaaagatgagggcagcaatgcatgagaaagagccagcacaaattggaatccaatctgaacaagaagaaaaccagacatctgcaactatggacattaaggcactcaaagcagaacttgagaatgtaaagtcccaaatggtagaactgcagaatgactattgtgaattacaacaggagtatgaaaagttaagcaacaagccaaagaattcatcaggctggagtttaaattggcggaagattaagaactccttacatacaaaaccagcaggagttgaaattggagacagacaggatgcacccaagtcaccaaacaccattctacgtagactaaaccctagaagaaggctctccatgtcttaaaagtatttcatttttcaagtttcagcataaaaagtcctgtagtaaaaacacccagctagccattctt

SEQ ID NO: 37892 - DNA, 241 bp, Glycine max
  Clone ID: PAT_MRT3847_134217C.1
ctcgagcgctcgagccgaaacactccctttctctttcccctaatccttcttctgtgtgtgatgatgattgatagagaatacgaagagaccagtgtgcagtgagtaatacgttggtcagttcttgtgtggctttgtttggttctctgtgttggaatttgttgatgggtgaagagggagaagatgtgtcaagagatacggaccagcaacacatgggtgtttattgaaatgagtggttcttagt

SEQ ID NO: 37893 - DNA, 268 bp, Glycine max
  Clone ID: PAT_MRT3847_134218C.1
caccatggaagcttgtactgggctttttgctggtaccccaaacagcaatgagcttgtggtcattcaaggacacgatgagcctaagcctgtgaagaacttagatggtcagctctgtgagatatgtggtgattctgtgggacttacggtggatggagacttatttgtagcttgtgaagagtgtggtttccctgtgtgcatgccatgttatgagtatgaaagaagggaagggactcaagtttgtcctcagtgtcatacaagatacaagcgt

SEQ ID NO: 37894 - DNA, 184 bp, Glycine max
  Clone ID: PAT_MRT3847_134219C.1
ctcaagcttccataccaatggcaaccaacacctctgtgttatccggaccactatgaggtcactaagccatccaccacgcttacctgccatccatgccacacttctgtctattcttgtccagtcctaaccccctgaagatctccataacagatacagatgcaccatcgtgccacacagaccacat

SEQ ID NO: 37895 - DNA, 1189 bp, Glycine max
  Clone ID: PAT_MRT3847_13421C.1
ctctttttctgttcccacttcctcaccaaatccaactcctccctctttcttcttccacactgtcattcacctctctctctctctctctctctctcgctgttattcaatttattattatttttctttctgatcgtgtcttattctgccttctctccactttcgatttgaagctccgtgtcaattggatacctgccactgtcttttcctttttgcaaaaagttattccaggagattgcttctaaatatcagttgcaatgcgtgcaccggcattacttgcgcagtgcttacctggcctagtgcctcatgatcgtggaagtcttagcatgtcatccgttcctgagaaggattttcatctcccatcaccagcagtagagattctaccttccaaggcagttcacactgacaaggataatggggagaatatagatcatttcaagggtttaattagtgttgctgatattgttggattcagtggttcagagacaatatccttaaaacctgatggttatctgaaatactggacgtggtttgttgatcttgcttgaatactctgtcttcttggtgtgaatggcaaaagtttcaatatttcttttgggggagcttctgtggtgcattctatagaccacagtgcagaaactgtcagatgcacaacgataccaaatgttcttgctaatctcaagcaagctcgtgataggcagagtcgacagccagagtctcctcttactccttcaagacagactctggcaccatcagttaacttttatgccggggactgggaagaattaccttctgtgctgtctattgcgaaaagtgatggatatgaagtgatgcctggaatgagtttgagcttttctgaggaagattttatggatgggtgtagtagtcaagatggtagcatcattggacacgaatctcactcaaggcggtctaggaagctctcaggaagtcgagcatgggaaagaggtagtgaggcagatcaaggagagggtggctatgatattattttgatgacagagattccatactctgttacctctttgaagaagctgtatgcacttataaagaagtgcttgaggcctccatatgggggtgggatatctagcttctactaagaggcactatgttggcttcagtaatggcgtacgacagctgagaagtctggtagatgaagagggcatttttggagcta

SEQ ID NO: 37896 - DNA, 485 bp, Glycine max
  Clone ID: PAT_MRT3847_134220C.1
aaaaaaaacacacacttcacacctcattacgataatcaaaagagggggggaaattttcaaatacgcagagcctactcaacaagagggtcctgcctattcccctttcttgaattaaacaagcgaacaatcaaaagaaaacacattttccaaatcatgcaaaggattccgcattttcaaaaaatctggccctagcctgtggaacagaaaaagccggcctaagactattaccagcactctcaaaatctggagaactccccaagagaacatcaaatacggttaaccgttagggattgtcattaaggaaactcaaacgccctgaacttcagattcgcccactcaaaaccccacatttcatatccattattaggaccacattcctctcttgggaaaatcaattcccaagaatggggttaccattttgtccacttacttgcataaaaatgctctgcactgtggctgctcgttaaaaacacttggtccaaaga

SEQ ID NO: 37897 - DNA, 110 bp, Glycine max
  Clone ID: PAT_MRT3847_134221C.1
cctcccgttctcccttcacactcctccaagcatcttccctctcttaaaatcatagctagctaatctgtccagccctatcatgacggacactacgacacccttccataaaa

SEQ ID NO: 37898 - DNA, 167 bp, Glycine max
  Clone ID: PAT_MRT3847_134222C.1
gagagtgcgtgattcctgcttcgcatgccgaggcacttaaatggcactccgacccgcgcggacagatgaaattctcgtaccggagcgtcgaagctcagttggtgtacaacgcaccacaggatgatgtctctacactgacgtccgtgagacggtgcctgacggctatg

SEQ ID NO: 37899 - DNA, 513 bp, Glycine max
  Clone ID: PAT_MRT3847_134223C.1
gaaaactactggcgcaattggagtaggacttgaggaactagggagctaaccaccatcaaggaagcctcttcctaagaattctcttgacaaagcatctgcaacagtattgttagtgccagagctcgcgaacatacgcgaaagaagagtgcatgtatttgtttgctgaaaaaatctaataggtgaccatgctgagaaagaattgcactaatggccactgaagaagcatcaatttccaacttaaagacatcctaaaacaggaagaaccaacactggcacaatggtgactaactcttttcattttgtaaaggcatgttgtgcctttgtagtctaaattaatggagaagtagatatcaatgtggtgagaggagtggtgtgtgtggcgtagtgtcaaacaaaataggggtaaaaatcggtgaggcctaaaaatcccctgagagacgtgttagatcgtggtcgagtcttgttaatgattgctttaaatttatccaaattggggggaaacaccatgattag

SEQ ID NO: 37900 - DNA, 545 bp, Glycine max
  Clone ID: PAT_MRT3847_134224C.1
caggcaacctcatgttagatctttcatgtatatcataatggtaagtagttgagtacaaaaaggggttggagaaaggcattattgaaaaagtaagaaggtatacattatttctcctcaaagcgccgcagcacagactcagcgaagatttgttgctttccttctctgtgctttggactagggcgagaatacttcagatatccatcccaaggaacctttttaagcccagctcgatgtgagattatgtctctaaccctctctgcaaattcaatgggtgtctcccctggcttcaaattttgtggctccaagtaccaaacatcacaaactacagcccaagatgtcattaattgcaagagatgagttgtgaatgattgctttcgactattccaaaaagcatctacgaaaattttgttgtacttgattgcgactgggcaaattgtgcagccaagttcaaacgcacccttcttgaacatgacagagtagtgattatttacacaagttcctttcagaaatataagaaaagggttgttgttagctcccaggacatg

SEQ ID NO: 37901 - DNA, 358 bp, Glycine max
  unsure (1)..(358): unsure at all n locations
  Clone ID: PAT_MRT3847_134225C.1
caantactactcnctctctctttgcaactttttttcatcaacccctcaaaaatctaggcgtgcctattactatgcatgcggttccttttctcctccacttccattctcggatctcgctactgctccaaaccccccaaaaaacacaagcctaataaaacaccaaatacacccacagtactccttgttaaaccaccactcacaatacctcccattattaactcaccattaacaatccctcccattgttaattcaccagacacaatcccttccattgttaatccaccaatcacaattccatccatttttaatccaccatttacaattccacaccctttgctttcaccaataaataatcccc

SEQ ID NO: 37902 - DNA, 300 bp, Glycine max
  Clone ID: PAT_MRT3847_134226C.1
attgctgctgtttgcctataggtgtactttggggtactctaccctgctggatgcctcatgtagcgatcgcgcggaaatcagatctagagcagaacgaggcagaactagcatctatctgaattctctgaatatggtgctggcatactatctgctgctagcacaatttcctgttcttgctttatgaatatttgatgcactatgagtccactacgtcactttgtctggacatgtgctctacgtatcggctcttatcgactcgtagttgttatgtatgcatctctatacgtttctatgttttaa

SEQ ID NO: 37903 - DNA, 2054 bp, Glycine max
  Clone ID: PAT_MRT3847_134227C.1
gttgatttttctacacatgaagctgctgtagcttgtgttgatggcgtaaataaatcagaattgggtgatggggcatcaaagataaaagtgagagctagactttcaaatccgctgcctaaaacacaggctgtcaaaggtggtatgagtggtgggttccgaataagtcatgctaggagtggagccttttcaagaccaggaagggggtttgggcggggaagacagcccttcaacaacaggggaaatttcaacaggggcaggagtttctatcgcggtggacacagtcaaattggaagaatgggttttcgggatgaccatgattttagtatgcatccggatttccgtcaaaggcaatttggtccacaaggagctgtgaggggtggacattatgcaggtagccgaggtgctgcatttgcgggaccatctagaccttatcatgatagagcatggtacggtatccctgatggaggccctagtgagcctattcctccaaggaggccctactccccaggtggacagtttgacatgccttttatgggaaggcattttgatgatccatatctatacgatgacaatatgcaaggaatgaaacggccattttatatgactgaccctgagcctgattacatggggcctactagactacgtcctcgattggattatgcagatccacctatatttcctggaactcatcaccatgattcttttggggctggcagcagacagtacccgccggactattacggttctgattatggtagaggttcatattcatcttattacgggggtgatggctcacatgggcatggatactattattaatgtgatgaatcttttggtggatctggaattgtgggatagacatcttcaaatataagcttgcggcttgagcatacaagtctgaagttgcatatttattttatacacttctctgttattcctcttccacctggtttgtttctatatatctatatctatttgggcataggtggtatagactaaattgtttaatgatagttgggtaggttgtctttcaggtcctggagtaaggtattaataagatttatatggaatgggctagattttctttaacaacttaggtatgatgagatcagggacttgtatttgaggatgctttgttgattgtacaatattaatctttgactcatcaaatataaatttggtgattggaaagtttaaaggactattggaagcaaaaaatctttccagtgatggatttatctttttatgaagtgataggcaaggtttgatatttgaatatgaatattgaggctcttgtgattcttatggatgacttttggagagtttagctacagtttactttcattattaggagccaattttgatctgaactgaaagctttaccatattttggagttcttatgattggccgagatccttcaaatatttattgatatccatacagaagcagcctttatatagagaactttatgttcactgaatatactgggagatgagactagggactaaatacagtgaaaggctgactttcatttggcatgatgttcatggataatgttatggttatggagcaaatgatctgtatgattgatttgattccttatgatgctcttgagtaattactaagttgggtttccttgaggagatctccatattttttactttccaatgtagctttggtgtggactgagaataaaattgctgttgattttgagtgtgaatacctaatgccgagggcagctaaggatgtttctgactgttttaattgtctgaaatttatttcggacggttttgtgaaacattgtgaaccatgaatcaaatggaactgttgaaagatcttcgttttgctgtgacgattaccaggttacttctctttctgtagcttttttagaatttattttgcagtgaataggtggtgggtgcaacgtgatttgagtgcttcttttgatgtagcatggtcagtgcctgcctcttgaatattaaatgattaagttatgtaatacctagaagttcgaggtgtaatataatttattctgagcaataccaatttgttc

SEQ ID NO: 37904 - DNA, 734 bp, Glycine max
  Clone ID: PAT_MRT3847_134228C.1
ggctcgaggcttattgtgatggtgcatattaccaatttgggttcccttctcttgattttgggggtcataactcttggctcttctttcccttccaccgctggtacctctacttctatgagaaaatcttgggaagcttgatcaaagatcttgaccctaattttgcccttcccttttggaactgggatttccccaatggcatgccaatgccagccatgtacactgatcccaagtcaccactttatgactccctcagaaacgcaaatcataaaccgccaaaactcgttgacctagactacaacggcgttgaagaccaatcctcaacacaagaacaaatatcaaccaatctcaacaccatgtaccggcaactggtgtcaagttcaaagactccaacgctcttcttcggtagcccttaccgtgcaggagaagatagtgatcccggtggtggcactgtggagaacattcctcacggtccggtccatatatggaccggtgataacacacaacctaactttgaggacatggggactctctattctgctgctagagaccctattttctattctcaccacgctaatgtggatagaatgtggtccatatggaaaactcttggaggaaagagaagtgacatcaaagaccctgattggttggaatctgggtttcttttctacgatgagaacaagaatcttgttcgtgtgaaggttaaggattgtcttgatactagaaagcttggatat

SEQ ID NO: 37905 - DNA, 466 bp, Glycine max
  unsure (1)..(466): unsure at all n locations
  Clone ID: PAT_MRT3847_134229C.1
gaaatggtctactttctcgtggcgagaaaaatgtgagtgatgatgattctataatgctcaatgatgtgattgtgaatgtatcctaatatcaaataaaaataaaaataaatgtatggttagacattctgatgaaaaaaaaaaaaaaaaaaaaaaaaaaaaaaaaaaaaaaaaaaaaaaaaaaaaaaaaaaaaaaaaaaaaaaaaaaaacaaaaaaaaaaaaccaaaactaaaaaacnaaaacanacaaaaacatccccccctttaaagtgtccccccctttcaatccattgcccgccctttttcaacgttttatactggtaaaactatggggatcccgatctaaatccccttgctggaaaaaccctttagcccccccggcttaatacctaaaaggcctgccccgatttcccttcttaacagttttctagactgcccggtgagtgggacttttccctcatcggcccat

SEQ ID NO: 37906 - DNA, 206 bp, Glycine max
  Clone ID: PAT_MRT3847_13422C.1
agctggaatcggctcggaaaccatctactaaaacaaataaacctacattaaaaatcatcccaagtttgtttttttgccaaaataggggtgaatttttacttaatcaaaagaactgataaggctccgacagattattagatcagaaaattttattgcagcttaaacattagttacctccccctcatattcagccagagtggtattat

SEQ ID NO: 37907 - DNA, 241 bp, Glycine max
  Clone ID: PAT_MRT3847_134230C.1
attacactagaacttgtgcttgatttatttgcatgtcgatagcagaaggatggaagagctgggagtgtgccacagttagcacttgtaattaggtaaactaatgctgacatttgcctggagtgagtttaggaccatgtgaattgtcctgctactttttggatcattgtttcccttaatatctgaactcttcatagcttgagttaaggatcataaagacctatcatgtttagcatgagttttg

SEQ ID NO: 37908 - DNA, 446 bp, Glycine max
  Clone ID: PAT_MRT3847_134231C.1
gaaatctctcacggaaaactcctagtttgatgcaacttgtgtacggggaatctacaattaattccaccactataaacagagataatgataatagtggggatgaggaaagtgatgatgacttttttaagcccatagaagaagtgaaaaagcaaaacgtgagagatggattgaatgacgatgggatggtcaacactgaggattgttccaagtgtacacaatttgtggatcagagatgggatgagaatgataatgaggagattcgcaatcgatttgtgactggcaatttggcaaaagctgcacttagaaatgcattaccagcagctaatactgaagaggaaaatgatgatgtctatggtgactttgaagatttggaaacaggagaaaagcatgagaatcatcagacggatgatgctttggctgcaacaacacacaagggagatgattta

SEQ ID NO: 37909 - DNA, 674 bp, Glycine max
  Clone ID: PAT_MRT3847_134232C.1
tactaatctcgatgcctcgttagtggccaattggatctaatctagaaattacaattattattcattgagtcttggaggagtgcctcagaaatggctaaccaagacaagcaacacaagagagcgttcatgtacatttacaaaggtggcacagtaaaccagagaaagggcgagttggagcatggtgtgggacaggacaagaaatccaaatcacgcagttggttgcacaggatttcaagaactcgaatttttaatgatggccacagagacttggacattggagcaagaggagaaggagaatttgttgaagcaaggaaatcaatgtcttgcttggagttaggatcaccagcaggagggtatgttgagggaagaaaatcggtgtctttcatagaggcagcagcatcaccagccgcgattggaagcatagttgaggagagaagaaagtcagtgtcccacatcgagaagaactttgcagtagcgggaatggttgaagcacgaaagtcggtgtcccacatcgaaacgttgtcctctgtgattgcgtatcttcaagttaaggttttggtctcggacatgccaagcttcatgcaagtgcatgcctttcgttgtgcgagaaggacttatgatagcttggagaagtttagcgcaaaacacatcgctcataacctatagaaggaatt

SEQ ID NO: 37910 - DNA, 422 bp, Glycine max
  Clone ID: PAT_MRT3847_134233C.1
ggaccaaaaggggctaaaaaccattgccacccccgcaaagccaacccacaaccaaaaacccccccccccccctaatggcccaaaacctttcaacaaaatgggaaggaaaaaaaacccttcgttttaaattaaaaaccaagggcaaaccccaagttcaaaaccacaaaagccccttggcccccaaaccccccaaaaaaaccccggggacccttgccccccaaaaacattgtcaaaaaaggccaaaattcccgggcagctctaattgggggaaaacgtttttaaccccccccaaattggccccgcagggccaaaaatccatttcccggggccccccttctttgaaagcaaaaaaaaccttgcccaacttctttaggtttcttttgggccatttaattcccaacagcagtttgaccaacaaaccc

SEQ ID NO: 37911 - DNA, 401 bp, Glycine max
  unsure (1)..(401): unsure at all n locations
  Clone ID: PAT_MRT3847_134234C.1
cacaaatgctaatatgagatcactttaagcattactacagactttccttgcacaaatccaaattaaaagagatattggtgtttcaaaagtcagnattagtcaccattgatgtaataaaattgatagacattgaaggatgtagacaaggattatcctatagtgtttgagtatctagcatgcatgattgataccagtacagcatttattaaatgtctaaacttccttaatcaacatttgaacataggtaatgccattaagaagtaatcttgaaacaatggagagtggatagttttaatttagaataagaaagaaatattgaaataaaagtaaatggaataattttaaacatttagttggagtgaatttaaatattgacttccagtttcaaattgttatcagtt

SEQ ID NO: 37912 - DNA, 838 bp, Glycine max
  Clone ID: PAT_MRT3847_134235C.1
tacggctgcgagaagacgacagaagggggctgcgtcaaggaaaagaatagaaaactgacttgactccttcatgcatgctccactcggctcggggggatatagctcagttggtagagctccgctcttgcaattgggtcgttgcgattacgggttggatgtctaattgtccaggcggtaatgatagtatcttgtacctgaaccggtggctcactttttctaagtaatgggaaagaggaccgaaacatgccactgaaagactctactgagacaaagacgggctgtcaagaacgtagaggaggtaggatgggcagttggtcagatctagtatggatcgtacatggacggtagttggagtcggtggctctcctagggtttcctcatttgggatcctggggaagaggatcaagctggcccttgcgaacagcttgatgcactatctcccttcaaccctttgagcgaaatgtggcaaaaggaaaaagaatccatggaccgaccccatcgtctccaccccgtaggaactacgagatcaccccaaggacgccttcggcatccaggggtcgcggaccgaccatagaaccctgttcaaaaagcggaacgcattagctatccgctctcaggttggacagtaagggtcggagaagggcaatcactcattcttaaaaaccagtattcttaagagcaaagagtcgggcggaaaaaaaaggggggcgggggaagctctccgttcccggttctcctgagaaaaaaaagacaaagaggttaaaggaagacaaaaaacaaaacaaaaagaaagaagaaaaaaaaataagaaaaacaaggaaaaaaccaataagaagcg

SEQ ID NO: 37913 - DNA, 499 bp, Glycine max
  Clone ID: PAT_MRT3847_134236C.1
cccttttgtccgcccacgcgtccgaagtttgagccgaaaatgaatgtgtttcgactttcggccgatttagctcatctcgttgcgattttcatccttttgtggaaaatatggaagacccgcagtgtcgcgggcatctcgggtcgatctcaagtcattttcctcctcgttttcatttgccgttatcttgacttgttcacaaattttgtgtccatttacaacagcgttatgaaagtcttcttcatcggttcttccatcgcgacggtctttttcatttacttcaagttcaaggcgacatatgacagaaaccacgacactctccgaattgaatttctcgttttgccgtgcctttgtctggcactcctcatcaatcacgagttctctctatttgaaattctctggactttcagtatttatttggaatctgtcgccataatgccacaattgtttatgctttccaagaccggttcagcggagacgatcactgcccattatttattcg

SEQ ID NO: 37914 - DNA, 658 bp, Glycine max
  Clone ID: PAT_MRT3847_134237C.1
aactgcaaaaacattactggttctctttaacctcaagcacattccaagttccaagtctacacattattacaaacttttagtcccaaccttcaaacacaacaaaccataaaataatacaatccaagctattttttctctagttttttgcaataaactaaagaaagacaaacaaacacatttattttcacatttaacccgaattgttacatgcatgaaagaaaatatctaagaaaaatactcattggaggcagcaaagatgggttgcaaccgctgatacacctcatcgttgtttgtccactccaactcatcccaccactcttgctgccctttaatggactttaagttgactgcattgtcactgtctagtggtaaagttttcaacttaggacagttatgtatccttaacagctccaaagaggaccaagccaatgtatgagttgagcatatagtattaaagttaggcaagttaaccagcagaagcatttctagttttggaagcacatccttttctggttcaatgtctttgctgatcagtatttcaatttttgaacaatcttcaagtttcaggttttgaagttctgaaaaatgttgaattgctccattgctgaaaatttctctcagtgatggacaattcttcaatgacaaagcggacgcgtgg

SEQ ID NO: 37915 - DNA, 717 bp, Glycine max
  Clone ID: PAT_MRT3847_134238C.1
cctccctccttttttgacccaaaccctttcttttttcttccttccaataccgctataggtttgttgtgactttgatcgtataattagcttagctctctttgtcaactaagcggtgtgatgatggccatggaaggacaacaaccacaatcatcatcagaaaatgggagagaatcagaggattatggagaagaagggagagaaaagggtcctcatcctcttgctcaagctggaactggctctttccctggaggcttcattgggaaacataggttgcaagcagccataaccaacctcaataaccaaattagtattttgcaggaagagttgaaaaaagttgaaacaattggtgaatcctccaccgtttgcaaggatttaatttcaagcgttgaatccactccagatcctctccttccattcactaaaggttcggtcgatgcgggttgggatcgatggttcggaggtgcccaccactctcgaaatcacaaacgttggatttagatattttgttttgcatttatttatattttttggttactatgaacatttaatttaaaatttacctgcttgtgatggaaacaaaagggagattgtaatgtcatacagtgataaatgatttataaattacatgttctttcagtttttaattattcacttttctttcaaaaaaaagaaaagcatgatgattataaatgaatcgatattccttctttagttttt

SEQ ID NO: 37916 - DNA, 206 bp, Glycine max
  Clone ID: PAT_MRT3847_134239C.1
cggggcgacccacgcgtacgtccacgcgtactgtagaagacgacagattggtgcacaagtgagtttgtagatcgatatagcttgaaacagtgtgatgaaaatgaatgtccttgttttcttcgttactacaattatggtagcatggcaatgccatgcgtactatatgttctctctcctaatgaacactgtctatcgtgcccgtactt

SEQ ID NO: 37917 - DNA, 688 bp, Glycine max
  Clone ID: PAT_MRT3847_13423C.1
gttctctggttcagaatcagaagagtcagcgagccccaacaacctaatcccgtccctcccagacgacgtcgcattgaactgcctaggacgcatccctcggtcccagcacccaaccctctccctggtctccaaacccatccgcaccctcctctcttccccaatcctcttcaccgcgcgaaccctcctccaatgcacccaacccctcctctacctcactctccgctcacgggcctcctctctcctccaattcttcacgctccaccgcacaaaccctaataaccccctcctcgctccccttcccccgatcccctcccccgccgtcggctccgcctacgccgtcctcggccccaccatctacgtcctcggcggctccatccacgacgtcccctcccccaacgtctggctcctcgactgccgcttcaaccgctggctccgcggtccctccatgcgcgtcggccgcgaattcgccgccgcgggagtcctccacggcaagatctacgtactcggcggctgcgtcgctgacacctgggcccgctccggcaattgggcggaggtcctcgaccccgccactggccaatgggagagggtcgccagtgcgacggaggtccgtgagaagtggatgcgcgctatgagccggcgtcggggagcgcatctacgcgatggggcgagggggcggggtgggctacga

SEQ ID NO: 37918 - DNA, 325 bp, Glycine max
  unsure (1)..(325): unsure at all n locations
  Clone ID: PAT_MRT3847_134240C.1
tttgggaaagtttttttttttttttttttaccaaaatgatgtatttattaacctcagataaatatacctatttccttaatagaggaaaaagacgttatattcttgccctctaagaaaaatgatccaacaagaacatacgtgtaactggttcctcccttccagggggggtgaacaaatttaagaatttttaattaaaaactctccannccgggggacacagggtgcacaaatgatgttaatcattttgatcatggactgtgaaaaaacggcataaaaagacttttttgagggggggaacttcacaacccaatttttaaggggcggg

SEQ ID NO: 37919 - DNA, 783 bp, Glycine max
  Clone ID: PAT_MRT3847_134241C.1
ccgacgccccgtcagcgcctgggacactccacctggatctaaaaacaatttcgttctccctcaccagttaccacgcaacaccccgtcattcccttcactgcgccaaccgtggttctcagcagcatcaccatccgctcttccccctcagcacgtcgtgaatccacgaatccgaaccttggttgccatcgtcgtttgtcgttgcaggttcacacgcaggagacgaggctctcgttgtgggttcccgtgataactgtcactggttagcgtgaacatccatggtttcttgtacgggcgctctccgtccgcttcttcactggcggctccgtgcccctccgcatcttctgctctcatatcctttcttgtttccttgaacttattcactgcttagtcagaaactcatgtcttccggcgaagacaacatggcggcgatagagtggaagtgatagcaacagagatcagaacatacctgaggcccaagctatggatgaagacagacccgagacccacgatggaaggcccaagagaagtaccaagcgacttgagtatctggacaattacgcataacagttattggggaagaattaagggagttatttacaactgtttttccatttcagaattctgttagaaaagctgctaggaacccgttattgcaatcatgctttgtaaattttattacacagaatcaccccacgaaatgtatttaaataagattgcaatgaattaaatggtaagaagaattccagctcatcacctatagtgtagaacggaaaaaaaaaaaaa

SEQ ID NO: 37920 - DNA, 366 bp, Glycine max
  Clone ID: PAT_MRT3847_134242C.1
agctcggaacgcggcccgagggaaccacgcaaacgcttataccccgccccaggccgcggcgcatggagggggggatcaggcagccatagggcgcggcgaacccccacaagaaggaggaggagcacgcgccgccggacgagacgccccacaaacaagggaccgagaccgacagccggcgaaacgacaagcgaagaacaccaagaacaccacgatccccaccaagagggagagcgtcacccccaccacaaccgacaaccaaacaagagccttgaacaaagcgcacaagggggagcacgcacagacagaggacaaccaccctactagggaagcaagagccaaccggacccaactacaacgccaagggga

SEQ ID NO: 37921 - DNA, 277 bp, Glycine max
  Clone ID: PAT_MRT3847_134243C.1
aaagcccaaaaacccgctgcgcttaacaaaaatgtaatcaggggttctcacaatcacatcacattaaaacagaatgttaaaagggagtcttgccaccgtcgatcaaaaacccatttctgggaacaaaagttccttttatgatggaggagacttcaaactatgtccgaaaaacaagctacctagaaacgaagacacaggggcaaaaaaccaacatttattgtgaccataaaaaaacaactttccctgattaaccaaaccggacgattgactttttttt

SEQ ID NO: 37922 - DNA, 186 bp, Glycine max
  Clone ID: PAT_MRT3847_134244C.1
acatgaaaacaattcaattatattcggacgcaggaaaattacaatgatatttctagggttccatcccagggcccaataaaaaaaattgactaggtacaacggagctacgctgctaatagacaagccaaatgccctggcacgccatgtcggtaataccataatgtggcacacataaacaggtttaac

SEQ ID NO: 37923 - DNA, 208 bp, Glycine max
  Clone ID: PAT_MRT3847_134245C.1
cagagcagccaaacaccctgggggggttttttgaaaattcccaccttgcacacaaaatctgaaacaagtcctggcaagcgattgtccacacccacccctatgtgacacccaaatgtaaccacctcacacacgctgctatcatccgccaagacagcaatgattgggctcaaagtacccactaccctcagttcaaacctgaggagataac

SEQ ID NO: 37924 - DNA, 2259 bp, Glycine max
  Clone ID: PAT_MRT3847_134246C.1
agcccgagttcacctatcagagacaaagcgctctctctccaaaaaaaaaaaaaactcgctaaattacaaaaatctcttcaaatcctctcaaccgaaaccctaatcataaaaccctagattttactttatttgtttccctcaatcgaatcgattttccccttccgaaaaccctaattccttcctcgctatcgaagatggacatcgagcagaagcaatcggagctcatagaccacttcgtcaagcgtgcctccgcggcctccgacgccgctgcactatcctccgttctcgtcgaagccacttctcacccttcgctcttcgctttctccgagattctcgctctgcccaatcttcttcagcttgaagcaactgagaattctgcttatcttgatatgcttcggttgtttgcacatggaacatggaatgattacaagagtaatgctgaccgtcttccacaattgatacctgatcagatcctcaagcttaagcaacttacagttcttacactggctgagacatataaggtactaccctatgaccaactgatgcaggagttagatgtgacaaatgttcgtaagcttgaagattttctaattaatgaatgcatgtatgcggtaatagtttctaggaaatgatggatcagtagctgggatgctttgaggtacatttaagagctggtatggacttcattccagataaaactcggtaatatgatacagactctgtctttagagttgtttaggatattaaatctgcatctgtcaaaatgatagactctcaagtaggccgatgctgattaaagagtagaatatattcatcgacgtgtcttactaactgagtgggaagatttaaagactttaatctggtagaaattgacttcagagataatcaggacatcggcttactgtggcatgaagagatttgctcctgactagtatagagtgttggattatgattgatatcacaccccaccaaggaggaggcggcatcgaaattaattgaagattatagtagataagggagctcattggagatgggttctttagttgcttgcctgacttttattcatggcatgcgtcaacagaggatatcagcttttgcagacagacaagtatatctcatcgatattgcccttgtctgtcacaccacaaagcgagatagggacaaggaaaaaaaggagggaaaacctgttaatttaggaaattgatagtgtttcttgaaccattatttaatcgtctactgagttggcaataacaagctgagatggtggtgcggctatttatttgcggttgctgaatgctatatatactgttttgttttgtattatgctgatatatttgctgcctcaattgcgttgttatactttgtggtgaatatatatatttcatataatataaattagattatatatgcctccaatgatgttacctgcaggaatgcagcacatgcatgcaccacatatggctccattttcacctatgggtgttggcatgcatatgggatatggtatgggttatgggatgggaatgcctgacatgaatggtggatcttcaagattccctatgattcaggtgccccaaatgcaaggaactcatatccctgttgcacatatgtctggatctacagcttttcatgggatggccagagcaaatcctccagggtttgggcttcctggacaaggacatcccatgccaatgccgcgagctcctatgtttcctttttcaggaggacaaatgccaaatgttgacccacaagttaagcaaagcactggtggccgtgactcaactagtcagatgcctacccagtgtgaagcagcagctgttggatttgagcaatctacgttggctcataataacggtcatgcaaccaaggctaatgacaatggatctgttaatcctggacctggcagataacattttgtgattggttacgatcgataaaaccgtgcctaatggaagttttaaaaaatgagtccaaagtctcttgcattgcagattacctgccacacaggatatatttcagagttattgaggttaaccccatcacagtaactactgaatcctaatttccgggatctggacattgcacggattttggtatcttgagcgatgcaactcatttgtacatccacttagtaaactgttcaatctatttgcgtagaaattttatatatccttacatatatgtattcaaatgtttgatcagatctttcatagtgattctttggatgaatgaaataatagtctttttctctctgcaaaa

SEQ ID NO: 37925 - DNA, 366 bp, Glycine max
  Clone ID: PAT_MRT3847_134247C.1
ctggtcacccaggaacctgctttgctcagtttgagtataagagacaacattgcttatgggcgagataccaccatggatcaaattgaagaggctgctaaaatagctcatgcacatacctttatcagctcattagataaaggttatgacacacaggttggcagggctggtctagctttgacagaagagcacaaaataaaactttctattgcaagagctgtgcttttaaatccatccattcttttgcttgatgagggtactggtggacttgattttgaggcttagagggctgttcaagaagctctggatcttctcatgttgggacgctcaacaatcataattggtcgaaggcttaagcttataaagaat

SEQ ID NO: 37926 - DNA, 411 bp, Glycine max
  Clone ID: PAT_MRT3847_134248C.1
gaacaaatctcggttgagtctcttattacacaaagcgctcaaaatttttatgctgtacaatgttagaaagtgtttaatagtgaactgcctcgctttccagatactagacatttggctaaatctatagcacagatatctagtactgtgcatacctattgaaaactatgtaccctatacatttccacattaatttcttttactatatacataaccaaattgaattaagagaattaaaagtgttgcttagccaagatgacgagcagcatcatttttacttcagccagttgccatgccttgcaaaaattttcccgactgcattcagtagctgaaaacaaagccattttctgcctctgcccacctaagtagcactctttaaccgcacatcaagcatggttcgatctgcattgatgt

SEQ ID NO: 37927 - DNA, 385 bp, Glycine max
  Clone ID: PAT_MRT3847_134249C.1
aaacgaccactccatatacatggcggcagattaaagaatgttactagaagaaaagaaaaagacttcagagtcgtctttcacaccggagaggcatatcctaattggacagcacctagacagtctgcgcaacgggattctcgcccgcgacatgcgacgtgcccgcggcgatatgggccttttcgccctgttgctgcgcgttcttgatctcgacggggagcttgccgcccttggtgagacccatgtcggccgcatacgtcgagtgcgggacccagccgggcgacttgcgcggcgagccgacctcctccatcatgcggtcgacttgttcgagggtgaggcccttggtctcccacacaaagaggtaggcgtagatgaagcacaggacgca

SEQ ID NO: 37928 - DNA, 695 bp, Glycine max
  Clone ID: PAT_MRT3847_13424C.1
aacaaaaaactgaataactttatttggagtttgcaatgttatcaagataacagttttaatcaaaataaaaagaggaagataaaagacacatcaccatacaggtctacataaaacaaacatccatagtgcaatcacttgagaattgacataattatcaaggacatacctcaaaaaacattaacagagtagagtactcaagaactccaacctgcattatggaaacccaaaagagaatggccttcaacatatatcagccttattattggctttccacttcctcaaattcttcttcctcttccactaactcttctttcagatattccgttcaacagtcctaatctttttgatgtgtgatatttggttccaacactctccagctcgtggcttgtattttctgcataactcaggacaatctgcaatttccaagtgttcaagggcactgacgcaatggatgccatatggaagagactgcaacttgggacaatctgcgacataacgtactttcagacaagttagctttggcagccaatctggaagcacctcaagattatcgcagttgtctagcatcaaggatactaatgtgttgacagatccttgaagccaatgaggcaaattcactagctgtggagaaagataaaacattattgttttcagcctttagttgaaattttgatcttcatggccattggataatt

SEQ ID NO: 37929 - DNA, 251 bp, Glycine max
  Clone ID: PAT_MRT3847_134250C.1
gctacgattccgttccaaggaagcgtttcccgatcatcagctgtatgacgatcctcgcttgctttgggggggggtggggtggggaggggggggggtagggtggggggtgggggtgggggcggggtgggaattcccaagcgaacgtgtggtgggacacaaccccaacttacaagttggaggtacggtataatagacccgacccggcaaagaggtgacctggtgacttaatgggacttgaccacaaacccgac

SEQ ID NO: 37930 - DNA, 1469 bp, Glycine max
  Clone ID: PAT_MRT3847_134251C.1
gatccacgcgttcgcatggttgtttgcgacttctgggagctcagtctcgctcagagtcagagaaaaacacccaaatcaaatattatcatggagcccagcttggatttgagactgggctttgtccccaaacccctttccctgtttttcggcgacgtttctgggaacagagacaagtgcgacaaagtggtcacactcgatggcttcgtgcagagattggaggaagagttgacaaaggtcgaggctttcaaacgcgagcttcctctctgcattctcctcctaaacgatgctatagcgagattgaaggaggaaaaagtgaagtgttcgggaatgcaagatccgcctcttaaaaccagttcaggaggaaatgaaaatgaaaactctgctcgacagaaggggaattggatgagttcagcgcagctttggagcactcagaaaaccaaatcgagaaatgaggaagatgataggtctgtgccagcgaacccaattaatgggaattcgtgtgtcctcgagaaggagggttcccaagttccgaggtttggtttgatggctcgtgcttctgaactgagtcatagcaattccaagagtgttggtggagatattagttctggctcctctttgctccgtgttgaggtacagagtcagccacaaccgccgcaacatatgcaacagaatccgaggaaacaacgccgctgctggtcgccggagcttcaccgccgctttgtggacgctcttcaacaacttggtggagcacaagtggccactcctaaacagattagagaaccgatgcaggtggaaggccttacaaatgatgaagtgaaaagccatttgcaaaagtacaggcttcacgttaggagatttccagtttcttcaactggccaggctgataatgggtcatggatgtcacaagatgaatctggggataaatcaaagggaaacaacatgtcacagtctggttctccacaaggtcctctcacacctctgatcctaggaggagcaggaggaggatctgctaagggtctctcaagccctggacagaacagtgtggatggagaagatgagcaatctgattgccggaattggaaaggagggcttcaccaccaccagcttgaagctgataatcaatgcctctaatattttgcagataaattataatacaatacataaatgatgaagagttgaagacccagaatttgacaacataagaataatagatctaacacatagaagaactatagggatcaagttttatgctaccattattttaaactgtttggtagagagcaactgaggttttacaaatttttcgggtttcttcttttttaaactcggtatagttgtatggagcttaacttttactgggcaattttcatagattaatcctcaattatgccatgtgctttaatttgtggttgggtttggcttttggatgttgaattttatgcaaaatgccacaaaggtttatttcaggt

SEQ ID NO: 37931 - DNA, 356 bp, Glycine max
  unsure (1)..(356): unsure at all n locations
  Clone ID: PAT_MRT3847_134252C.1
aattttataagcatttgtcgactgcaaccaaagaccgatagggaggaaaggggggaaaattttttacagcacacaagaccatttgagaaggcaaaaaacaaataatgggagnggcccgcacacatagacaggaacacgggccccaaacgggtacttggaatcctatggatgaagacatggggtctctggatcctatcgcatgacattcctaacacgacccgtgcaaagatcgtatcgacccttatcaaagaaaaccgggcttaactgacgctgtccaaacaggtactggacaactaaatggcattcctgtagctattggaattatggattctcagtgaatggggggcacaaaggga

SEQ ID NO: 37932 - DNA, 687 bp, Glycine max
  Clone ID: PAT_MRT3847_134253C.1
atataaagatttaaaattttattgttatttgtgatgatgatatacaatatgcatatgataggatgaaatacaatatggtgtcactttatatgttttccagctatttactcactgttaccgtaactgtgggtgatcccttcataacttaatgacgataatatttcctgttttcttcaggtttgcatcctcatttcaatattctgatgcttatgtggatgaaagggacgtagaactcttggtaaacggaaaaccaggattgttgttgcagttgatgaattatgtacccaagagatgagagaatacacaaacagatatttttcaacgtaagggataagatgggaggaagactcctcagagtttccacgtaaggggcacatatataaaaaccatggtgcaccctcatccagtatcagtattcactcactcttacaagaaaagaaactaaagatagagcattaagtgcattcaatcatgacattttgatacaaaagtaagtttagttagtctaagttaaagattaattcatttatcctttaaaaaaagattaattcatttaaagcgtaaaattattagagtgaaatttatttgttctaaatatgattattttagttaattcacaattgattattatttttaccacattattttgattaactcccctgtataaaaaccttgacatgggacact

SEQ ID NO: 37933 - DNA, 258 bp, Glycine max
  Clone ID: PAT_MRT3847_134254C.1
aaacacaagccaagtgaaagtgagaaaaaataacaatcaaagagcataatgtcacggatcactcacaagattggggagacccttcatgtgggagggcacaagaaggaggaggtgcataagggtgacaccatgctggagaatacatggggaccaccatggtgagcacagtattgagtacaaatgagcgcatcctggtgaatccacagctggctacctacatggtgagcacaagccagtgctcgcacaggggttcctaga

SEQ ID NO: 37934 - DNA, 521 bp, Glycine max
  Clone ID: PAT_MRT3847_134255C.1
gtgggttttttttttttttttttttttttttttttttttaaaacaaagccccggttttcctttttgtggcggccctaaaacacttttggctaatttgggattcgaccgaaaccaattttttacttaaggcttctgcggttttgaaggtaaatggacctggagggggaaacttgggggctttttgattcaatttttaaaacccaacccttgcctttgtccccctccaaccccttttttttttgtcttttccaccctaaatggcccctgtggcacgggttgctccatgggggggcgcaacccgcgccaaagaaatttcaaattcgccgggaattttccctttccggtcttcctttccttgctgctccttgggggttttggtgggctgggtccccctgtcccctgcccttttttttgttcccctgcgtgtggcgttaaaaaggaaaacagctcccctctttttttttttgctccccccccccgctggggcggggtgctaccacccccgtttttggcgagccccc

SEQ ID NO: 37935 - DNA, 223 bp, Glycine max
  Clone ID: PAT_MRT3847_134256C.1
ttttataaataaaaaaatcaattattgaaatttctaaagtgttttaggtaatcttttttcaagggtaaaaaaataatcagatttatgctttttagtagccaataagacccgctggtctggaaattcaatttttgtagaagaaagaaatcaaatttcttccttttattatccctccatttggtaaacctttttcatcaaataatcacttatattagggtcttcc

SEQ ID NO: 37936 - DNA, 187 bp, Glycine max
  Clone ID: PAT_MRT3847_134257C.1
gtgctatcactgttgctgtggatactacagtcccgggcatgtgatgacatcttgttcctagcactttctgcccatccacaggacgcgacattcaaaagaacgtctgcgtgccattaccattgccattgtttcgaaatgaggcgtactgaggatgcagatcggcgaaccacggatgtgacattgcagc

SEQ ID NO: 37937 - DNA, 382 bp, Glycine max
  Clone ID: PAT_MRT3847_134258C.1
ttatctcccatgcttttttcagaagacttccagctggtattcaaaagaacttatctcatattaaaaaatcgacctcttactccatttttaggaacataacaagataacaatacccttacaaagggcttatcacataaaatcgaatccatcattgcctttagatattcataaggcaaatacatcatttctcgccaatgctatgcataatccgaatatacgcacctaaaaaaaattatctttctttactatcttataaacttaaaggtgcttcaaacccccttccctatcttaaatttaaactttaaacggtaccaaaaaattccttttaacttaagtacatctatcccaaaacacacacctacctcaatattattcttttttt

SEQ ID NO: 37938 - DNA, 509 bp, Glycine max
  Clone ID: PAT_MRT3847_134259C.1
gcacgcgtactagctggatcttaagcggccgttggtgtttttttttttttttttttttgggaagttacactatccctgatattttatattaaaacaagggaaaaaagcctctcttttgacaaatattggaagggaccctttagttcacaatcggaacaaaagcacggagaagaggggaggaaatatgaaaaagggggggagaaaaggggggacgaatagatgctgggtttttttgtcttaaaaacattccgttttctataataagatgccctgatataaagcatgatggccaccgatggggggattatcaactctctgagtggggcccacaaaagtagggaataacaaccccttggcaacttaatttttgttccaaaaatgaaagggggtcgccaaaaatagaaatactttccctctccaaaaccaacggcccggggatggaagcaatagtttttccatcgcgggaggccttcccctggggcttccccccctttatttttttttggggg

SEQ ID NO: 37939 - DNA, 355 bp, Glycine max
  Clone ID: PAT_MRT3847_13425C.1
gacgctcctacagcgaagacccggcgcttgactcggcgttgaatgtggaggagcctcgccggctaccagcaccaggcaaagacctcgtaccgtctcgcgagcggcgggccgaatttgcaaaccacgcaaggggatcgccagcggaagcgactgcgcatactgcggagccgagtccgaccggagctaaagtggcgccgacaccacgcgaagaatgatccaggactcgcgtcaatcacatgggaccactagagagccatggagaagatatatgacctgatggtgggaatcgctgaggatgcagatgaatgcgagcctaagacgaggccaccagatgttcacacgcatgaccatcagg

SEQ ID NO: 37940 - DNA, 424 bp, Glycine max
  Clone ID: PAT_MRT3847_134260C.1
ggagcattgaagtttattgaatttatctggcattttacgtggtggaagaaccagattcaatattgtgatagaggatatgtggtagagcttagaaggattatctagcattgttttgctttgcttcatcatatacataaaaactactgttccagtttttcaatgcccttgataatttagtaattggtttccttcttgtgattttttttttggtttaactggatacaagtactatttgtgaagataaaatttctgttttgggtaagcttttctcccccccctaatttaattatcatttgtttctgaaacaattttcaatgtgtttatttccaaagaattaatgcaatatatttccttctatgtacttatgttaggaaccaagaattgaaatgagaaaggaaataaaagattttattgactagtaaaa

SEQ ID NO: 37941 - DNA, 551 bp, Glycine max
  Clone ID: PAT_MRT3847_134261C.1
attctcttccccttaatttctatctccaatccctcagcaaaacgcagcaaatgggtcggcttaatctcctacttgtgtggtcactctcattaacactgtccctttattatctacacccaatctctgctcagctcagtccaaaccactatgctaaaacatgccccaatcttgaaagcatcgttagacaggccgttaccaagaagttccaacaaacctttgtcaccgtcccagccacccttcgtctcttctttcatgattgctttgtgcagggttgtgatgcttctgttttgattgcatccaccggaaacaaccaagcagagaaggatcacccagacaacctgtctttggcgggtgatgggtttgacacagtgatcaaagcaaaggctgcagtagatgccatccctcagtgcagaaacaaagtctcatgtgctgatattctggccttggccacccgtgatgttattgcactggtgcgcacacccttggattctcccactgcagcaagttcgccagtagaatatacagtaccccagtggacccaacactgaaca

SEQ ID NO: 37942 - DNA, 505 bp, Glycine max
  Clone ID: PAT_MRT3847_134262C.1
ctgacgcgtgggcggacgcgtgggcttagataacatctcttccagggcaaggaggcaccaaggcttgattgtgttcatcttcccagaaaaactcaaccaaggggtacctgcccctttctttttcagcctaacttattggaaagggaagataacaatcacgccttgatcataacaacataagaaattaagcaagtggtgtttgttggttgtgttgttcattttgtctggacaaagataaaatgaacaacgcaaccatggcaccgtataatatgtcagatagatctctaatttgctacacgccactcatgacaacaacaaatggtttatggcaaggcgataaccctttagattactcccttcctctcttcatcttgcaattaacgatggttgtttgtgccacacgtttctttgttttcattcttaagccccttcaccaaccgcgtgtaattgctgaaattttgggtggattgctattgggtccatcaatttttggtagaaaatctaa

SEQ ID NO: 37943 - DNA, 1626 bp, Glycine max
  Clone ID: PAT_MRT3847_134263C.1
acaattcagagaatcagaatgaaaagcagaagattgagcatatgttgggctggcaaatggcatatgggcgtgcagaggaggccattgctccgaattatgataaggaagtttctcacaatcacattcctctgctctccggtggacaagaggtttctggagaattatctgctgcctcacctgagaggctgtcaatggcatccccaggtggccgagggaagcgtgcccataatcttcaatattcgtctgaccttaatcattcattattattctcttccccttaatttctatctccaatccctcagcaaaacgcagcaaatgggtcggcttaatctcctacttgtgtggtcactctcattaacactgtccctttattatctacacccaatctctgctcagctcagtccaaaccactatgctaaaacatgccccaatcttgaaagcatcgttagacaggccgttgccaagaagttccaacaaacctttgtcaccgtcccggccacccttcgtctcttctttcatgattgctttgtgcagggttgtgatgcttctgttttgattgcatccaccggaaacaaccaagcagagaaggatcacccagacaacctgtctttggcgggtgatgggtttgacacagtgatcaaagcaaaggctgcagtagatgccatccctcagtgcagaaacaaagtctcatgtgctgatattctggccttggccacccgtgatgttattgcactgtctggtggaccttcatacacggttgaattgggaagatttgatggtttagtttcaagaacttcggatgtgaatgggaggcttccacagccaacgaacaatttgaaccaattgaattcactgtttgcggcaaacggcctcacccaaactgacatgattgctctctcaggtgcgcacacccttggattctcccactgcagcaagttcgccagtagaatatacagtaccccagtggacccaacactgaacaagcaatacgtagcccaattgcaacaaatgtgcccaaggaacgtggatcctaggattgccatcaacatggacccaaccactcctcgtaaattcgacaacgtttattaccaaaaccttcaacaaggaaagggcctctttacctcggaccaaatcctcttcacggacccaaggtccagaaacacagttaattccttcgcttctagtagcaacgttttcaactccaactttgtggctgctatgaccaaattgggtcgtgttggagttaagactgcgagaaatgggaaaattcgtaccgattgttctgttctttaagttaaggctttagttgtacgtagaaagtcgcaaacagtgcatgttttggaggtgaacacaaaacacacacacacattgcaattttattgcggggaatttgcacggggtagtttagattgactgttgttaataaatttgtttgcgaataattcgggagttgtaatttggatgttcgggaaaggaagggtaaggttgagtttttatttgttgtaatgtttccaaataattcgaacttttagaattgttcatataaataaatgttacccagagggggaaatcactaaatatggattttagattactttaatctctgttggtctttaattatcattt

SEQ ID NO: 37944 - DNA, 1366 bp, Glycine max
  Clone ID: PAT_MRT3847_134264C.1
ggctcgagctttcaaattaagtctctgcattattctcttcccttttctatctccctctgcaaaaacgaagtaaatgggtcggcttaatctcctacttgtgtggtcactctctttaacacttttccttaattatctacacccaacctctgcccagctcagtccaaaccactatgctaacatatgccccaaccttgaaagcatcgttagacaagccgttactaataagttccaacaaacctttgtcaccgtcccagccacccttcgcctattctttcacgattgctttgtccagggttgtgatgcttccgttttgattgcatccaccggaaataaccaggcagagaaggatcaccaagacaacctgtctttggcgggtgatgggtttgacacagtgatcaaagcaaaggctgcagtagatgccgtccctcagtgcagaaacaaagtctcgtgtgcagatattctggccttggccacccgtgatgttattgcactgtctggtggaccttcttacacggttgaattgggaagatttgatgggctagtttcgagagcttcggatgtgaatgggaggcttccacagccaacgaacaatttgaaccagctgaactcactgtttgcggcaaacgggcttacccaaactgacatgattgctctctcaggtgcacacacccttggattctcccactgcagcaagttcgccagtagaatatacagcaccccagtggacccaacactgaacaagcaatacgtagcccaattgcaacaaatgtgcccaagaaacgtggatcctaggattgccatcaacatggacccaacaactcctcgtaaattcgacaatgtttattaccaaaaccttcaacaaggaaagggcctcttcacctcggaccaaatcctcttcacggacccaaggtctaggaacaccgttaattcctttgcttctagtaccaacgttttcaactccaactttgtggctgctatgaccaaattgggtcgcgttggagttaagactgcaagaaatgggaaaattcgtaccgattgttctgtgctttaagttaaggctttggttgatcatgtaaagtcgcaaacagtgcatgttttggaggtaaacaacaacacaagttgcaattttagtgcggggggatttgcaaagggtagttatattcattgttgttaataaatctgtttgcgaataattcgggagttgtttgggtgttcgggaagggaagggtaaggtgactttttatttgttgtaatgttccaaataattcaaagtcctccgaagaactttgaattgttcacataaataaatgtgtaacccagcaaaggaaaatcaataaatggaccttagattactttaagagaaaaa

SEQ ID NO: 37945 - DNA, 359 bp, Glycine max
  Clone ID: PAT_MRT3847_134265C.1
aacattttcaataccaaaaccttggtaattaattaactccaaaaaaatgcaagccaaacccattcacaacaccccaacatacattcctccacccataaggccatcaccaccggtgcaccaaacccctccctctataccatcaatcaaacctcgtgcaatatccatatccgcacctaatattcctattgccgtaccaattccaccaattgtagagcctgatgattccaatgctgcttattatgactaccaattcttgttcatgtcacaaagatccgaagcaacccgacccgtcactctaagcaccgtggaaggtgcgatccccgccgatttcccgtctggcacgtactatctaaccggac

SEQ ID NO: 37946 - DNA, 942 bp, Glycine max
  Clone ID: PAT_MRT3847_134266C.1
ccacgcgtccgcccacgcgtcgagtttttgtgtgctcttggattggttgttagaatggagggtcagagtaagggtagttttaatgtgatggaagggagtgagggcaaaggaagggagtttgtggtggaaaagtctgcatcatcaatagtgggaacttgtgatttggttctaaggattttggcctttttactaacccttgtggctgctgtagttattgggacagataagcaaactgccattgttccaatcaagcttgtggattctatgccaactttgtacgttcctgttgcagctaagtggcattacttgtctgcctttgtctattatgtgggggcaaatgcaatagcatgtgcatatgcaatactgtctctcttgctcactcttgcaaataggcgtaaaggcaaaggaacgatggagacattgatcactgtgctggacacagtaatggtagctttgctcttctccggcaacggagccgccatggcagttggtctccttggcttgcaaggaaactcacatgtgcattggaacaaagtgtgcaatgagtttgggaaattttgtgaccaagtggctgcttcccttttcatatcactgcttggatcaatagcattcctcttgctgctgatagttcctcctgttttgagacttaaacagacaacttaaggtgcctaggagtctttaatcactgaatcaataaatttaatgtggttaattatccacaactttattttatatgttatgtgtgagaattaatagtattatggtggcaccctaagcccaatagactgactacattgtaatgtgagagaaactttgtactttttttaggaacatgtaatgggtttatttggattatagcatatgaatgtatgctagacattcaactttctatatggtgttagaatttgaccaaatattttgataagaaaaaaaaaacccaag

SEQ ID NO: 37947 - DNA, 112 bp, Glycine max
  Clone ID: PAT_MRT3847_134267C.1
gcttggtaggcacttttactaagaaaaggatgtgcgaaaaattataaaacgtggagggatttggaggatgcacaaagtaaccctctttgtgctaccatagtcgttcatgact

SEQ ID NO: 37948 - DNA, 278 bp, Glycine max
  unsure (1)..(278): unsure at all n locations
  Clone ID: PAT_MRT3847_134268C.1
tcagntnggagctgcgtgcggancnccggggcacncgcccntnnnccggggnagcccggggtaacccctggcacgggncggtgcgccgangcntttgnccccgtnatnagtgggngcgcgncanntnnggaaggctgtgggnngtgcgantgcaangggtgccatnggnctggtttgccctngnngtgganagatnncgttgnanncccgcctncancaaattncccaccaccagacatnagcggaagnnnngaaaaaanaganaaggngagangacc

SEQ ID NO: 37949 - DNA, 195 bp, Glycine max
  Clone ID: PAT_MRT3847_134269C.1
gggtggattcatgtccgaaaggtccttccaccggtgcaaggcgcaatcgggtggttacatgcacgagtaccaatgtgcgcattgaaccatacatgtattcagggttatagttctggagtgccagtaccagcggtgatattgatcattgataggatctcacgatgtgacaagatcatagatgatgcgctgctgttg

SEQ ID NO: 37950 - DNA, 615 bp, Glycine max
  unsure (1)..(615): unsure at all n locations
  Clone ID: PAT_MRT3847_13426C.1
ccacgcgtccggggaactgaaagaatttgttttccatttaactaacaacttgcatttttggttgtacaatcaattggagtgaacagtggagaatgaaatttcagggcaatgcctgtgtcgaaaagaatgtatgactttatgatggtagtgattatcttgttacataacacctatctttatgttctgggcagacgttcaacgaatttttcatacgtgagttaaagcctggttcaagaccaattgcttctgctgaacgtgatgatgttgctgtatgtgctgcagattgccgtcttacggcatttaaatcagttgatgatagtacaagattctggatcaaggtattttttttctttcttacaattcaattgaatatggaaggcttctaatctaaaaaaaacagttttttaaaatattttataatcaaattttgaaatctgcatttaagacatcaatcagtcagaagctggaaactgtttctgattttcaggttggacttgaataaaaatgatacaattataactttactcattgaacttgggcctgtttgactcaccgtactttaggacagaggtgtggggggaggaaaatgggnttttgcaattatgagagtacatc

SEQ ID NO: 37951 - DNA, 422 bp, Glycine max
  Clone ID: PAT_MRT3847_134270C.1
acgctcctgtttgacaagtgagtcctaaaatctgagctgtctcattcactactagacagatccatgtgacggcttaaatactgtgattcctgtctgacacgtgattcctatttcattcactgtcctatagtccatatcaataatgttcatcaaaaagaccaacaatgacattacctgccttgctatctacagtatccaagcttacttcctcctgcattcgacgccatatctcttctataaggtcaccaatattcaataccctggccacctttttacaacatacttactggaagaagcataatacctccttacgaagggatcgatccctagattggaatttgaccagcagcactaatacctataacgcgagcaccaatcgcccttaccaacctatgctcaaccctactggcccatgtgacacc

SEQ ID NO: 37952 - DNA, 337 bp, Glycine max
  unsure (1)..(337): unsure at all n locations
  Clone ID: PAT_MRT3847_134271C.1
cccacgcgtccgcgcactcgtgcacagcatccttcgctttaaactgtttgtgtgtctatgggctatctgcgaaccgaacatgtcatcgacaaagggttctacaagctcaacgagaactccagcatacattcactaagcttgtcaacctgctattctcgtattangctatgcgaataatcactggtggtcttcatcatggtgggataccacctatattatcgagctcaaactatagagatcgatacgacattgcctaccattgaataatctgttagactgggaatacaataacataagattactgattgacattaagctggtcaatactgaacatgct

SEQ ID NO: 37953 - DNA, 446 bp, Glycine max
  unsure (1)..(446): unsure at all n locations
  Clone ID: PAT_MRT3847_134272C.1
aaaaaaggttttntttntannaancnaaagnnntnaaagttnnnaattaagntaaanttngntttnaaaaagaaattttnccngngggaaanaattngnnaanaanggnnnttcngggtnagntnnttgcntnanntngttttgntttaaggggggtgtttgtntcncnatnnntntngggcgnaaacatttntgtnaaagtgaagtnttntgtgtgttattntaaaactagacggnttgtatngntnncttnaagnngngttggtgtngtanatgcntgtggangntntgnannnatgatcntgggaggaatgaagntgaatatggngnnntggnaaggnngtagtaattatcantnnnggnnngaannnntgtnngagannctgcannncgtnttntnnaacgtatgggnatgttaancaggtanangngtaannagnggactt

SEQ ID NO: 37954 - DNA, 495 bp, Glycine max
  Clone ID: PAT_MRT3847_134273C.1
taagtcatcaatttttttattatgagaaaagagaactataaatagttatccaattatatgtgtatagacaagattaaaagttaattagtgatattatatgattatttaaaaagttatctgtatttttctgttgatggttcaaatataatctaatgatcttatttgtatttctcactttcttacaataagaagtattgttatttaatgggtttcacatgcgagttatatataatgactatacattatttttagatagtagattggtttgtgaagatttggccaaaatttaagaccataggaccaaatgtgccatctttcttcttagataagcaatgcgaagatgaccaagattatggggttacacaattcaagagtgaagaatgcgtggaatggctagatgataagccaaaagggtctgttgtttatgtatcgtttgggagtatggctaccatgagtgaggaacaaatggaagaagtagcttgttgtttgagagag

SEQ ID NO: 37955 - DNA, 500 bp, Glycine max
  Clone ID: PAT_MRT3847_134274C.1
tcgttttaatttcagtggctactgaagagggtttggttgatgaaatcacttaccctaccaagatcactactaccaagcccctatctttgcttggccatggtaagttgcttaaactaggttcctaccggctcttccaatttctttcttaatttttttttgaagatgggatgagggatggattttttagtggacctggatgctaatgtttccatccaagttaaaaattgaagtaataaacttaaggcagctagggatctagatcatggacttgcaatttttgttccaacgaatattataactactgcggaatttgctatgatttgattcattaatgagtaacatgttgacacagcttgatttccttggttgaccaggaattaccgacatggggattgacttcatccatgcggaaatttattcaatcgggggttatatggagccagaagtagtacgccacttggaccagttcaaaggaaaatctgcaaaggagctggaagata

SEQ ID NO: 37956 - DNA, 317 bp, Glycine max
  Clone ID: PAT_MRT3847_134275C.1
accggcgcggaagacccgggccgacgcacgcgtccgaaacgcgtgcgcactgtagaggatgaagactgaggggcaagggcacgcgtggacttaggggtccttttgtgttaggtaaaaacaccaaatcattttaacttaaacaatgactacggtgggtatatattgtcgtcccttgtacttttctccgatgcaaatatctaatttttggctgtctagactatagctattagatctggagagatcggctgtcgaatcgggaggatatcattaatggcgagggatgagcgcttatatcgatcgcatattataacaatgtg

SEQ ID NO: 37957 - DNA, 349 bp, Glycine max
  Clone ID: PAT_MRT3847_134276C.1
ctcaagctaatctttccttttctgcaccggacatcacggatctgtccaaaaccgactaggagacaaacgtctctgatcattccacctatgccaatcgctatgatcgtacctacattgccagggacaagaacgcggaggaaacgatcctggaggaagccgcgtaccacatcatacacgaccagctgatgctctacgggatttcgaggctgaacctggcgtcctttgagaccacgtgtatggaacctgtgtttgacaaagtcatcatggtttacatggacaaaaatgacgtccacatggatgaggacgctgtctggattgaatttcagaagcggagcgttagacatgtacc

SEQ ID NO: 37958 - DNA, 242 bp, Glycine max
  unsure (1)..(242): unsure at all n locations
  Clone ID: PAT_MRT3847_134277C.1
ggtacaaggctcacgatcattcaacgaggcattcgcattgcatttgaaaaaaccttgtggaggaggcaaccactcttcttggttcatgactctaatacttgtntttgctatccttaaaatttgttttgccanaaaccaatccttctgcaccattttgggctttggtcccaatctgagtcccagattaaattccaacaaacgggctaaggatccagaattttattcatnatccaagtnanaga

SEQ ID NO: 37959 - DNA, 348 bp, Glycine max
  Clone ID: PAT_MRT3847_134278C.1
accggacggatcccggtgcgacgcgcagcgtacgcgacgcgtcgagacacctgactctttcgccatttgaaatccaatcctagtgggataaatgctcggtaggcccccataattggccacgaattttctgtattccatcatcctggtttttttgccaatcacacactactggaaggggaatgccataccaattggctaaacccttgttttttaaaatgagaaggaacatccacttttgcccttttaaaaagtggcaagatttatcttgccaatgcacatgatacagggtgctccattgaggacaggttgacaatttttgggttcaacccgtgttaaggaacaaaggta

SEQ ID NO: 37960 - DNA, 1544 bp, Glycine max
  Clone ID: PAT_MRT3847_134279C.1
ttggagccactcccttttaatcgttcccttcattcactcccctttcactttttcccttccaacaacacaaattttttgttcatttcatactaattgtcattaattttgagacccaaaaacatggacagccaacgaagtcctcttcttagttgggctttctactgccacggcaagtcgatggaggagctgaagcagtctctgatgtacactacccttgagctggaacaaacaagagcaactgtccaagaagagctaagaaaaagagacgatcagcttctcaccctaaaggagcttctcaacaaagtcataagagaaagagatgaagctcaagagaaatgccagagactagtgttggagaaaatggtttttcagcaccaaaccgcacctgcttctggagtttccagcattgaggacgagccaagaaggggaattaatgactcctccaacaatggcctctcttcatcagattgtgaagaaagcattgtttcctctccagttatggagcatttgccaccacaacagcaacagttgccagagtcaatgattgagctaatctcaccagataaaccgttgccagaaaagggtaagcttttgcaagcagtgatgaaagctggtccaaccctgcagagaaaaggtcaagcttttgcaagcagtcaatgaagacgctcctttccccctcttgagtcctttgagattccaacttcctcaatgccttcaccctcccaaccacaacttcctcatcaagattccttcacctcgaactgtgggagagccaccacaacaacaacttcatcaagattccttcatcacctcaaactgagggagagtaagtaggtaaaggtttttctttgagggcactgattctcccacacagaacaagttccaaaggattgtactcctacttacaaataactactaaactttaactaaagtcagttttatttatctatttttagttttttaatttataatatgatttaaaaaaggttaggaagagtagcaaggtggtgtttgattcgactgatctagtgtttaatgtacagtggttttgtttttaactcggtgggaggaaaagaactgaaggaaaaaaggtttgattttgggtttctgctggtgatgtttttggtggatgaagaatttgtccctctggctggcatttttgcccttttcacattctccttttgttttgtgtgaagtgaaaagggtcactactgaaattgtaatgtaactaggatattactactactgtagtgcagtgaatgatgagtgtgtgtgttagggtgagagagagagagagagagattggtgtattagatcacatcaacaattaaggggatggatgatttgggtgtgtagtcgttggagttgggggatggtgtggccaaacaccaagagggacggccattagttctgtgtgtcggggtaggtgggacccacaaatcagaatcaggatctattactggtgtggtgtatgattatattaagcttttttagagaaagttatcattattcacttaaaaaaaaaaaaaaaagatcgttatggg

SEQ ID NO: 37961 - DNA, 394 bp, Glycine max
  Clone ID: PAT_MRT3847_13427C.1
tctcaggaagcgtttcgaaggtttcccgatcatcagctgtatgagcgtgcctcgcttctgtttggggtggggaggaggcgggagggtggcgggtgggcggggcggggaggggggcgggggggcggcggggcggcggttttagaacagaataatggccccttcaaggattcacctggatcgatcgctcctacgtaacattaggactgtggggtgacccccgtttttagtatgtagaggaaggccctctcggtcacacaccgaaacatttgcccccggatttaatggaacccctgtgccaccagaagtttttgggttgtaaaccctcgaagagccaaaccctttgtattccaccctttgggtaaataggccccttaattgcaacccttaaccccat

SEQ ID NO: 37962 - DNA, 404 bp, Glycine max
  Clone ID: PAT_MRT3847_134280C.1
cggccgccctcttattcattttggtttattatcctgctaaacatactaatatctatacctggctagtgtgaatgagacggaactgtatccttttcaagacccctttttaggcccccactctgaaaaaagacgctatgccctaatacaaaatctgtccctgcaaataaaacattcttagcctaacgtgagagagacttggagataccagcggatttttacatcatgttggaggggctgtaaacgaagggtcaggcgttatcactaaacgtggcacctactatgcataaggtaaagggaaaaaaggttaacgcggcctacctggatgttaaaatcttaaacctgtacccataattatgaaatgtaagtagaagttattgacttttacctacatttgctgatgatgg

SEQ ID NO: 37963 - DNA, 286 bp, Glycine max
  Clone ID: PAT_MRT3847_134281C.1
tacagctgtgagaagacgactgaaagggccagaagactacaaaatggtgacgactaaaagtaatgaataccgctctggagggaacatattatgagatgctctgaactttcaaatttggacaacccttatgaagagaagaagaatgttcaaaaggcaagccatacatcatttgcggagattctgactcggaatgccatgtccagcgtgaggctgttgctctcaaatgcgtctgaatcgattgcgtcttagccgatctcaaatatgggcaaggccgatttaggggatg

SEQ ID NO: 37964 - DNA, 421 bp, Glycine max
  Clone ID: PAT_MRT3847_134282C.1
cacgcccggaaactccatcggccgaacgagcatctgccttggctggggctatcagagacacagcctctttctcccggacctcgtcatatgcttctgtccggggctgggccttgggcaaaccaaccataacgacccaacgtcttgcctcttaggaccctcaatcgagcgtcaagctgacctctgttgtccacccccacggggactttttgggcatctccaaggaccatccccctccaatctaacagccgtctttgcatcatgtgaccgataaactcaccctttgaacgtgggagcttcctgaccaacctaggaggcatgctatataagaccatacttgtgagtgacatgctaactcccagagccctacagagagcctttttagctccaccattccgcaccgctctaccgggctgctttgcat

SEQ ID NO: 37965 - DNA, 570 bp, Glycine max
  Clone ID: PAT_MRT3847_134283C.1
gcacgaggaaatgagaatgttaagatatgtggtcacaccactgtcacacaagaaaggatagggtacaaaatgattaaataagggatattagtgtggtacccatcaaggataagatgacacaaaatgggttaagatggtttggacatatgcaaagaaagcccagagtgaataatatcagggaatttgattgttaaccgaacctagtgatgtcacatgatccatgtagctgacctcatccaatggaataaaaacaattgatgttgtgataaagaatgaaagttatgttattttattcagtttgacagttatgacaacttcaaaattatttgcagaattgagtcaagggcctggctgttaaagcttagaaaacttacgattctataattcagttttttttcttctaaaagttccttttctccaaaagctattttcaacttctgaggaaagtcgtaaaacagatttttttattttaggtttttgctcgttttttcaaaagcattgcatttttattctgaatttttaagatatttttagttaaaaaaaaaaactttttaggaaaaagcgcaaaca

SEQ ID NO: 37966 - DNA, 379 bp, Glycine max
  Clone ID: PAT_MRT3847_134284C.1
gagaagttggattgaagtgcagggagaagttcatgtttttgtggcgggggattggaagcatgagaggtccaaggaaatttatcagaagttggcagagcttatgggggatattgaaaaattagggtatgttcctgtttgggatgaggtgttgcataatgttggggaggaaaagagaaaggaggccctttggtatcatagtgagaaattagcagttgcatttggagtgttgtgtggacctgcaccaccagggaagccgttaaggattgtgaagaatttgaggatttgtaaggattgccatgaggcttttaagtacatgacaagagttatagaaagggaaattattgtgagggatgtcaacagataccacagatttgtgaat

SEQ ID NO: 37967 - DNA, 183 bp, Glycine max
  Clone ID: PAT_MRT3847_134285C.1
gaaaaaagtataggataaattacattaaaatagcacatgattttattttgttttcttcatttctcttgctcaccaagaagtaacaaaagtatagttttgacagagttggtgttcataatttcagttctagttgattgcgagaattttcaaataaggaagaggggtcttttatccttgtccgta

SEQ ID NO: 37968 - DNA, 1715 bp, Glycine max
  Clone ID: PAT_MRT3847_134286C.1
aatcaacctttcgcataacggaaaactaacatttcatcaaatgacgatggcggaggggaaaaaagtatgggctctaaagatataagaactgtaacaataatctcaaggagataaagaacattatgaaaaatgaaatggtgttggtgtgagacctaaccataacaaacaacctaacttcttgcaggtgaaattttgaaaatctgacaccaaattatcccacttcctggcctacataattattcaaattccttttcacttttgtagcttcaattctatggccagaacatggaatttgagaggggcactgtggataaagagcattttttttcatcacagttcctgtggtttatccactacagccaaactcacatactagctacaaattcttggacataagcacattcttgacagcaaaagaatctctgtaatttcccatcaaaactctgcaattagtatcaggatcagtagcatcaaagaaattctttggacattgtccatgtcacatgctcacttgttttaccaaacaaagtctcacaaatctcaaatatgaagtcagtaatttgggagccagatttggagttctagaaattgacacctttagtttcaagctataattcctcatttgactttaacccttgacatcaacatcaactgtcctgaaatctttgtttggtagtcaattgcacattttgtaagcacaacacttacttgttttctcttcctaatttctcatatataaatgttatattgtctccaaccacatcattgttaatgatgaacttgaagaattttaaagtgtgcagtatcactgcagccaaagtggccaatactacacaaaaaaatcacaaaagccctcatggattctagaacataatttcttcaagtttcttgaggacttgctttatgttaggtctaactgagggtgaaggggagcaacaagccatagcaagttgaaagactttgagaatgcattcttccgtcactggaatgttatcatctctgctgttcctgagaagaaaggcaggttggtataaatcagcaattctgtgtccaaggactgcatttctcatgaaatttggcagatagaaatcctcatcaggagtcggatgctcgttgataggttcctttcctgaaagcaattccagcaagatcacaccgaggctatatatatcagtcacttcactagcatccttcattttgatgagctcaggtgccttgtaaccctgagctgctgaattttcaagcatttcttggccagcagtaggattcagcagaagatgtagcccggaatccgagatgtatggctggtaggagcggtccaaaaggatgtttttagacttgaggtttccatgaataataggcttctcctgtgatgtgtgaagatgctctagtcctttggctataccaatggatattctacatatgttagaccatttgtaacactctccatttccatctgctaagtgaacatctttgatcaataaatgaaatatataactcaaaataaaaaccactctataaggtgtgaagagtaggactaatgaatcaaatagcttgtttgaaatcttctgtctagttatttgatcacttgcccctcttaatgtatacatttcctagtgtcaataaaattaaacgaaaagatgaatgaataccaatgccatcaaatgacctaaacatatgaaaattaaaattgagtagtgttaatatcaacctgg

SEQ ID NO: 37969 - DNA, 510 bp, Glycine max
  unsure (1)..(510): unsure at all n locations
  Clone ID: PAT_MRT3847_134287C.1
tccttccacgcgtccgcccacgcgtccgcaagagtcgaagaccgttgctgctagaatgtcaaggtaaagagaaacgttattaattagtatccttttaaggtaaaaaaaaaaaggaagattttacgtataagcggagcttcacaaaggtacgtagcctttatgatttaactgtttgttgggttgacttggttttcttcagttttgtagaaggtactaagatgtaggcatgctagatccttattgcttgactgttgactgtccaagcattctggagacaaagctattgatataaggagtaagcactacacattgtgctatgaggagcacttcatggaacaagagagaattgcaataaaattccattcttagcatatgaggacaccacatctataaattgaagttcttgcagagttatatgcaaaccaatgaggttgtgagggccattgttatatgaaagttgaggtaaggatnttttgcatatttctttctgttctttattttttgggtttt

SEQ ID NO: 37970 - DNA, 1200 bp, Glycine max
  Clone ID: PAT_MRT3847_134288C.1
gcaagctagcgggatacaatcaaatcttttggctgagtgcaaggaattctgatctcaaattgtccacagctatgcagcgaaattcttgacaagttgaaccacccttttctacttgcattatctatatgcttccttccagaccaaaactcacgtttgtttgattactaattattgtcctggaggagaactattccaacttcttgatcggcaattctgagttacccaattccgaggagaactatgtcctgaaagaggaatgtcgagcttcaattctgagttacccaattccaattcagggttgaggatgttacaagagtctgggatccttgctgaccagtgaccagggttgaggatgttgccaagagtcgaagaccgttgctgctagaatgtcaaggtaaagagaaacgttgttagttagtatccttttaaggtaaaaaaaagggaagatttaacgtataagcggagctgcacaaaggtacgtagcatttatgatttaactgtttgttgggttgacttggttttcttcagttttgtagaaggtactaagatgtaggcatgctagatccttattgcttgattgttgactgtccaagcattctggtaatactgatttaatatggcttatactaatttcaagctttctggtaatactcatttcataacgccacttaaaatttttttagttggatggaaaggctacttgtgttttactgatttcatatggcttatacttatttcatatgaaattaacaaatatctagaaattttgttaatgaaagttcgatgacattttaaatccaatgtatatcattccacaggagacaaagctattgatataaggaggaagcactaaatagtataacctaggatacaaagctattgatataaggagtaagcactacacattgtgctatgaggagcacttcatggaacaagaaagaattgcaataaaattccattcttagcatatgactaggtgaattgctttaaggaatcttgtgctgaaggatgtcgagacacaatgctctgataggatgtgacattggggtatagggttttatattaattgtatgaagtcttagacggtcttgtttgaaccgagatgaccttattatatgatgtagaagaaaataaatgtgagccttttatccctttgaaagacttgtatttaaaaatgtaaaaaaaaatacttttaattaa

SEQ ID NO: 37971 - DNA, 229 bp, Glycine max
  Clone ID: PAT_MRT3847_134289C.1
gtgagatcagacaccgtttgtgggggtaccgagttgttatgcgcttgcattgcaagtccatgttagagaaaacaggtgcggggacaagttcttttatctaacgcctttggtatgaaacactctgagctccggaatacatatggagagggttctatcacctatgccatagcaatgaatatcaaaaccgcgtaccctatagtgggcaccagagtcttccggtgctgttata

SEQ ID NO: 37972 - DNA, 259 bp, Glycine max
  Clone ID: PAT_MRT3847_13428C.1
tacggctgcgagaagacgacagaagggtgtcccaattattggccccctttcctcccactttactcgtgtcccaccagtcttttttttttttttccttccattcaaatgtttattattagtgaaatgttagggacattcactctcacattcttatatgcctgaaaaattttcctctgaacattacggggaatccattaaaatttattagaaattataaatttggtaaccacttttaatttaaggatttcccctttaaatt

SEQ ID NO: 37973 - DNA, 1402 bp, Glycine max
  Clone ID: PAT_MRT3847_134290C.1
ggagagggagaaagataagtagaaaaaccgggccgcgacaaagaggaaggtgatgccccgtggttagaataactcccatctaaatgagcacgtctccatctccttaagcgtcctcgccatcgacgtccccgccgcgctcgccgacaacagcaggtacgcgaatacctggtcatgcccgaagtcgaaccatatttgcaacacttcgggaaacagtgttacgcctcgtgaaatttcccacaccgacgcgcccatttcgaacacagagtacaccgccactatcgcattagccgccagaaagaatctgaaggtatcgtagtggttccagtgaggagaataggagccacgagtgttggtgagcatgaaaacggaggaggcgagggagaaggagaaggagctgaggcggaacacgagaataagcaagttgaaacgccgtagtttgtgtttccgccaccgcgaagtggatacgggggttatgcgacggcgaacaactgttatcgccgccgaaaagcccgaccccacccaaaacattcgtttgtgtgtgtgtcgttcccacgcgaaacctcagagatgaaaacgggaaccgttgattatgaaagagacgacgcggaagcccgttaggagcgaggtgaagcctaggaacagaaacgccgcgtatcccaaagctatggctatgtccgtttgcacgcagaacgcattgctcgccctacacgtctccatctccttcagcgtcctcgccatcgacgtccccgccgcgctcgccgacaacagcaggtacgcgaatacctgcaccaccaccctcacacacatcagccactcatcaaacaattattactcatcaattcttagtttctgacctggtcatgcccgaagtcgaaccatatttgcaacacttcgggaaacagtgttacgcctcgtgaaatttcccacaccgacgcgcccatttcgaacacagagtacaccgccactatcgcattagccgccagaaagaatctgaaccgatttcgctgacttactttctaatttcaacacgaattcataaattaggtctgaaatagtaactagtaagagtacctgaaggtatcgtagtggttccagtgaggagaataggagccacgagtgttggtgagcatgaaaacggaggaggcgagggagaaggagaaggaggtgaggcggaacacgagtattagcaagttgaagcgacgtagtttgtgttccgccaccgtcgagtggaaacgagggttatgcgacggcgaacaactgttatcgccgccgctgcgaagaggctgaggtgatcgcatgcttcaattactaatttcgaagttcgaacgcactatttccgtgttttgattgtcattttgtttattatggcgaagaagaaggagtcacggggagagagaagagc

SEQ ID NO: 37974 - DNA, 426 bp, Glycine max
  Clone ID: PAT_MRT3847_134291C.1
aaagagaacgaagacaaacgaaaacgcttactgaacgatctccatcccaggggctaccggcgacaaccgtgccggtgccggcatgggtactcacatgcacacgactaaaaagcatggctggagtcctcacaaggaagacctaacatgacatcacctacattgctagcaacggaggaacattacaatacatgcagatcgggccactaattgatacaatgaagtactcgactctaccctacttaccagacatgaaatcaaccacaacaagtaaaggaaagtgacatctaaaaaaggaaaggatggatcccttgcacgtaattatgagtcgagcacgggcgtgagaacgctcagcacagcatgtcacctagatactaggatggacactactcgaccgagaacaagcaaactatgaacggcagcactgat

SEQ ID NO: 37975 - DNA, 226 bp, Glycine max
  unsure (1)..(226): unsure at all n locations
  Clone ID: PAT_MRT3847_134292C.1
atncacgcgtacgtaagcncggaattcggctcgagcangccctanacacctnnaagncagangangcgnaatctgaatcgaattctagcngntatgnaggncgccgcnacatannngctcgcngtgntncnnagngnancnatctcctaactaccgatgnnatgnnanaacntcctcggcgcagatggattttaggctgggcntnantnnattnntttgctcntga

SEQ ID NO: 37976 - DNA, 885 bp, Glycine max
  Clone ID: PAT_MRT3847_134293C.1
cccacgcgtccggctatgaagtttacagttggggatagtagagtaaggaaaatgggaggttctcgactatccaagccaaagtctggctccgcttccggcagcacaaactgtttcatgctgtatgcgagagcactctcaattacctggggagacactccagaatattggatatgggtacaacagaaagaaacaagtggcacgatagtagagttggctaagttgaaaagggtttgctggctagaagtgcatggaaaatttgacacaagaaagctttcactaggaattctatatcaagtgtcatttctaattatgttggaagaatcatctcaagggtgggaagttccaataaatgttagatttgtccttcctggaggtaagagacaacaacacaaagtaaatttaaacgagaagttaagggagagttggatggagattctagtaggtgagtttgtggcatctgaaaaagatgctggcgagatggaaatttctatgtatgaatatgaaggtggcatgtggaagaccggacttgtcatccaaggtgtagtcatcaaaccaaaaaactagatatggaatagatattagggatatagaagcttttatagaagaaaaaaaataagaagaaaaaatataaaagatttctctaagttaaaattaggttatgcataagttaaaattaatatttggagaaccaaatatgaaagaactccaccaaattaacttatgtataattttttttaacttatagaatttttttttatttatgaaaaaatttatccaaacaaattttaagttgtatacaaaatgaatttgttgtaattttctttgttttctaaataaaattaataaaagccacctttactctagttgatacctagagagatgaag

SEQ ID NO: 37977 - DNA, 223 bp, Glycine max
  Clone ID: PAT_MRT3847_134294C.1
gccactcgttaaagccgcaacttgtttatattgctttgaaacagagaggaagggaagcgctgctctgtcagcagagcaatgactagctccatgagtaaactgtgcatgctaaagctcatgctaatgcaatgacaactagagaggctgcaataagtaccatgactagagctacacgaagcgaacctctcgacgagcctagctcacagaaaggtcacttgttaag

SEQ ID NO: 37978 - DNA, 1476 bp, Glycine max
  Clone ID: PAT_MRT3847_134295C.1
agggttcgccatttttatctgaactgaaggataagatgcttctctcacccaatgaagcaggttcacttgggcctgtaactgatggtgcaatccttcagtttttagctggttttgccaatatacatcaagttttgcagcccctcaaagttcctgcattcagttttgcatggcttaagttgttcagtcacaggagcttttttccaaaaatgttgactgataatgttcaaaaaggttggccttatttccaaaggttgcgtgtatatctgttccaatttatggttcccattctaatgcatgatgaacatactgatacagttcgtgtcttctataaccttacacttagggtgctcttagtgctacttcatgacatcccagagtttctttctaaatatcactttacattcctaattgttaaccctccaagttgcatacagatgaggattacttttattgagctgattaagaatcctatgtacaatcccgggcccccgacgcctcatatgatgtgcgcctggcttcgagaaactacccaatcgcctcgcattctttcggaggttgatgcagcactcaaagcaaagcagatgaaggttgatgtagatgaataccttaagacaaggcaacagagttcgccgtttttatctgaactgaaggataagctgcttctctcacccaatgaagcagcttctgctgggactcgatataatgtgccgttaattaactcacttgtgctatatgttggaatgcaggcaatccatcagcttcagggacgaactccccatactcaaacatcagcaaatgctttccccttagccgtattttctgttggtgctgcattggatattttccagaccctaattgtggacttggatactgaagggcgctaccttttcctaaatgctattgccaaccaactgcgttatcctaatactaatacacactacttttccttcatccttctgtacttgtttgctgaatcaaaccaggaagttatccaagaacaaattactagagtcttgttagaacgcctaattgttaaccgtcctcatccctggggtctcctcattacttttattgagctgatcaagaatcctaggtacaatttctggaaccggagtttcataagatgtgcaccggagattgaaaaactttttgaatcagtgtcaagatcttgtggaggtccaaaaccagtggatgatagcatggtttcgggttgggtctgatttcccgtagtcttttgtggttgttagtcctgtgtaggttagccaaccatgttagttaggactatttatactgttgttaatctagcagtgttgtttttacattgtaaattatgttttagtgaaactctcttctttcagatgttatgaccatgtacttgtttatattgcagcatgagtcttaattccagatcaaaaaaaaaaaaaaaaaaaaaaaaaaaaaaaaaaaaaaaaaaaaaaaaaaaaaaaaaaaaaaaaa

SEQ ID NO: 37979 - DNA, 810 bp, Glycine max
  unsure (1)..(810): unsure at all n locations
  Clone ID: PAT_MRT3847_134296C.1
cttgatgcctgcgctgtgtgggtgttcctgactgtcaatttctcttccagtgctctacctacacccctgtggattgagctactattatggacggattctagatgcaattcctcgtacaacacgcctcccacacctctgttgattgagcccaatgttgcgggtgaacctgacctgcaatttctttcccagcatgcctcctacatctctatgggcgtaaccacaccagtgtggggcgggtcaactttttatttatgaatttttaaatgtttattttcaattaggcttggacatatgtcttcgttttttaagtttttaaatagaccttttgatgagagaatggattctagactgaacactcttgtgagggcttaggattgaagatcatcttccttttgattctttcaatttgtgtctattttcaatttctatttcttttgggtttctataataactatgtttgagcaaaaccctattttctaggattggggctcagcccttggaaaccaatttggtttaattgaaatttcgtttgtttctatttgtgtttatcttatgatctttatcttgttcatttagacaatgggaaacgaattaaaacacgaacctaattgttgaacactcttgataaagacttaggctttgaaccatgaaagtaagtttgatactttgaggattcaacataaaatgtctaattaaacataactatcacanaagagtaaattcaattaagcatgttttcataaagagaatgtagtttaatttgggctaatgtgcccgtcgtacataattaaatagagtaattcgttagtc

SEQ ID NO: 37980 - DNA, 320 bp, Glycine max
  Clone ID: PAT_MRT3847_134297C.1
atcattcacttactcgtggatttttattcgggtttatttacatgggcatttctctgcattaacttgggcggcatcctatgtcgggcggagagctgcatcataatacgtggcctcaaaggtgcccaaagcgctgatgggcataggaacaggaactggtggaatggcattcatgatgatgccatctgaaacattgagatcattaactgacataccaaagatgttatggagctataccatgtgctacattacttttgctgattgggcaagacacgggcactataagaatgccatgctgggggaagatatttgatactttgctg

SEQ ID NO: 37981 - DNA, 366 bp, Glycine max
  Clone ID: PAT_MRT3847_134298C.1
gatttgaaagggtcaattaaaagcaagggcttggtcactcctatctatatctggtctcacttaatcttgagttgtctaaccacacatcacacttgaacggagagataacaatggctcctgagaaggccgagactgatattgcatagaattacttataaatggaaaaggatgaggaaggtactaagtccaccagtggccaattgtctaggctatttcaccatgctggctctgtctatgatgcaatgattcagctgtgctcataattaggtagcacaagtgttactgacactaccatattccttatcacaactgcctgatgaactctgtcatcataaatactttcagatatttactcaaatttaatac

SEQ ID NO: 37982 - DNA, 265 bp, Glycine max
  Clone ID: PAT_MRT3847_134299C.1
gctactaaactggaatttggctcgagtacagtttgttcaccttatgtcgctctgtacaacttgtgggtgatgttgccatatttgtatgcaatggtgcacgatagttcagtgtttcaataccaggtgattctgtcattggtgtcaagtcgacaactataaacaagatgtgtgcatatgggctcaattctggtatttcaggttcttagcattttgggcaccattcctcagtccattttacagccaatctgtctggaaccaaatggca

SEQ ID NO: 37983 - DNA, 177 bp, Glycine max
  unsure (1)..(177): unsure at all n locations
  Clone ID: PAT_MRT3847_13429C.1
tagacaaaaatgagaaaatggatttgggaacaaggaaaaaaaacattttttctgttcccaaaattttttccgaaaccccaccctttattgggggtaaaatttcacaataccttcccacacttttgcggttgtattacacactttttttttntgcgagtgtaaaaagaaccccttttt

SEQ ID NO: 37984 - DNA, 494 bp, Glycine max
  Clone ID: PAT_MRT3847_1342C.1
acatgcaccccaccctaagctacgcatgcggctcgagctcgagccgattcggctcgagtcggctgcgagaagacgacagaatggtagtgcattgggaattgttgattttggctattgattctccttttcattctatttattttttcaatttttcaaatgttattttatatttttacattgaaaaaaaaaatcaacaacattttatcacatcgctaaattaaactagtagtctacataacaagtttgatggctatcacatctatatcataactaggaatgaagagactaaattatctagaacatcacatatactccagctgttatgaaagggttaatataactttgatttccatagacaatagtttactagttgctaccgcaaagttaggggccaaatcaaaagtttggtaaatgaagccaaaaactccaattattggttttgtctttgccattttccatcaccacagtcacactgactctcccagaagtccctg

SEQ ID NO: 37985 - DNA, 110 bp, Glycine max
  Clone ID: PAT_MRT3847_134300C.1
atctgacgctttttcagcggaggcaacataactgcgcacgtctgggaaccctattttggtgcacatctcaagaatcagagttttctttaccactatcaggtttcggatta

SEQ ID NO: 37986 - DNA, 242 bp, Glycine max
  Clone ID: PAT_MRT3847_134301C.1
caaccaagtcaaacccccattttaaaaacaaaacaatatccagatttttttcaagccatattcaaaataaaattaaatatttaacgggggctgtaattgaaaccctcgtatttcaaaaaataaaactcctatctatctaagaatcaatatttaattaccaagacccaccctaggtaaataaagccaatttaatcctgacccaaaccttgcccgtattttcctttactttcaacctaaaggaa

SEQ ID NO: 37987 - DNA, 891 bp, Glycine max
  Clone ID: PAT_MRT3847_134302C.1
atcggctctagctcgagccgtttaagctctagcagttaactaacaatattagcatttgctagtgattaggaatataaagatacgccaaccacaaacagtttaagatggcctccaaaacatgttcatcccttgctcttttcctcacactcaacctcctcttcttttcacttgtctctgcatgcggtagttattcatgccctagtccaaagccaaagccaaagcccaagccaaagcccaaccctaaccctagtccttctggtgcatcgtgcccccgtgacgcactcaagctaggtgtatgtgccaacgtgctaaaagggttgttgaacgtgactttgggtcaaccaccagttaccccttgctgcacccttctcgatgggctcgttgaccttgaggctgcagtgtgcctttgcactgccctcaaagcaaatgttttgggcatcaacctcaaccttcctatctcactcagcttgcttctcaatgtttgctcaaggcaagtcccacgcgattttcaatgtgcctaatcatggcctatacacaacatatcatatatatctaacgtgtttggaaactcgttgaggatggagaaatcacgtctgagatatgaaaagctataactatttgcttttccacatctaaaatgtgaaaaattacgtctgaaacgtgaaatcaaacacgttaattaatcatcctatctacgtacttttgcttcgtgtttggtatagttgtgactttcctttatattgatcagtgtgtgaatcttgtacgtgcatggagggttaacttctccttattccttccttttagtgttttctaaatattgtatggttagagtgttgcaataaattaataaataagttcctgatgcatgcttatgtaaatcgcaagggaacc

SEQ ID NO: 37988 - DNA, 357 bp, Glycine max
  Clone ID: PAT_MRT3847_134303C.1
tcttcccccaactcctactctcccccattactataccaattcccccaaacccattcactcaatatttactcttaccaactcccttcatttctttctttttcataatccattaaatttctactcataaattacaacacttctttcattcctaactccccattttcctcaaaaatattttcacccacaccaaacaccttcccaatttctattcctacaaattcccttcacaaacttattcaaatcttccatttcttaaaccacaactattcttttctattaaccttccacattactctctcctttaaattcttccatctttcacaccctctcaaaatcccctactataaattcatataa

SEQ ID NO: 37989 - DNA, 473 bp, Glycine max
  Clone ID: PAT_MRT3847_134304C.1
ccactctttcggagctgcacttatggctagacaacctatctctattatcagaaggaagcacagtcgccaagtgattagatgagcctggaatgatgacgcatgcaccacataagtcgccagctttggcaatctttttacttacacaaatgagaggttgcagaattatgggctaataccggaagacttcttccagcaattggaatcgcaatacagcccattaacgtgatttggggatgctcgccgtatatacccgtgtcttctgtatcgcccatgatagcgcctatatgatgcacatatgcttttcgaaactaaggattgacctggttgactattgcgtgaacgcatgatgagtttttacctacgaagccaactgggacgtatacaagtgcatagggcgaggaagtaatgtcttccatcctggggaatcagacacaatggatccccaatctagaaagagatgtttggaggaaaaa

SEQ ID NO: 37990 - DNA, 298 bp, Glycine max
  Clone ID: PAT_MRT3847_134305C.1
tcttcaatgcgaaccgacacgcggccactagaggagacttataaaacaatggcggacaagacagacactaacaccattggcttaaaactacatgactactcgcaagtaggacccaatgatagtactgagaactcgaattcactcacggggtaacctagagccataacggtaaactaaaaagacctaaaaccaacaacaggttcagaaccaagtacatgtacatatatcactaacagccaacaatgaccatcggaatgtcacgacaaggcgaagacaggacccttcaacaacatcatat

SEQ ID NO: 37991 - DNA, 1301 bp, Glycine max
  Clone ID: PAT_MRT3847_134306C.1
gcatcccaaaagtgtgtttatttacgtaatagctgtagtatatatctgtacatgaagaaagctttagttagttacaactaatcatcttaactaacctaaatagaattatctaactttcacatggtgctgctaagatccccccctcaagctggaatggatattcatcattcccagcttgttacaaaggttttgaaaaacagtgggaggcaaagcttttgtgaagatatccgcgagctgcaaggaagacgagactgggagtagtttaaggaggcccatggtgactttctgacgaactatatggcagtctatctcgatgtgctttgtgcgttcatggaagacgggattaatggaaatctggattgctgattgattatcgcaatagatggtagctggtttagtgaatttgagtcggaagtcttgaagaagataagtcaaccactgtagttcacaggtggttgaagctaaggctcgatattcagccttcgaagagctgcgcaaaactgtcgactgctttttagattgccatgaaatgagggatgaacctaagtagaccacgaaccggtggtggatttcctggaatcttgacatcctacccaatctgagtcactaaaagctcggagctgaggagttccggtggcggaaaggaagatgcctgagcctggcgttcccttgaggtaccaaagtacccgataagcagcttgaagatgagcacctgtggggctggacatatactggctaagctgttgcacggcgtacgtgatgtcaggacgagtattggtgaggtagatgagtctgccgacgagcctttggtaggaagaagaagcttctgctgataatggagtacctgttgcagcttgcagcttggtggagtaatccattggagttgcatttggtcgacaaccaagcattcccgaatcggatagtatgtccaaagcatacttcctttgacacaaatggatgcctgaagaagaacgtgcgatttctagaccaaggaagtatttcaaattcccgaggtctttgatcttgaatgtctgatcaagaagcatgattacatcttgtatttcagagtcgctgtttccagttaaaataatatcgtccatatatggagtattgtggtaatggagccagtgaaacatagaaaaagggaatgatctgagtgggactgcttaaaacagtgagatgttagaagacccaataacttcgtgaaccattgacggctcgcttgtttgagtccatagagtgaatgctgcaatcgacataccatttgcgagttcgggaccgataatccaggtggaaactgc

SEQ ID NO: 37992 - DNA, 405 bp, Glycine max
  Clone ID: PAT_MRT3847_134307C.1
gggaacaaaaaatttttacttcccctccccggccaaggaaattttccggggttaaaacccattgggggtctgtttccaaaaacagcttttttttttttaaaaaaaaaaaaaaaagggggggttccccggggccggggggcaaatttctgaatcggggggttggcccttcgggtttatggtaaacctgggaaaaaaaaaaaatgggtgggaaaaggccccccttaatttaaggtttggatttgggttttcccaagattaaaatcccaatttcccgggcggcccttttttcccaggttttttttggggtgacagggcaaatgccacattttggggaattcgggcatgtttaggccccccaagggaggggcccccaaactttggttttggtttgggccccaacaaaaa

SEQ ID NO: 37993 - DNA, 279 bp, Glycine max
  Clone ID: PAT_MRT3847_134308C.1
gtaacaactagtttattcatgttattgtttttttttgagcaatcaaactccgcaactaaagatacataacgggggggtcacagaatatcttatccagtacaatttaaaaaattggtctgcaaagtatgatttttaacaacagacctcctttacccaatttttagtcacatttatttcgtacctattaaaaacttttgcgaatggctcccctaataaaaaatgccgcttgattaatcattcacagggaaaggcttggctacttggtttcacgaaaagaag

SEQ ID NO: 37994 - DNA, 696 bp, Glycine max
  unsure (1)..(696): unsure at all n locations
  Clone ID: PAT_MRT3847_134309C.1
gttttcctaagaattaattggattctcttgtctttaaagctctcaacaatatgggggacaagaaaatgattgaaaaatgttgctcttgaatttgctatcctcttttgaaggggcccaggcaaaggacctaaaaattacgtatcctgaagtgtggggtcaaagcagaaatgcattaatacttggtgcctaatacatcgacacttcctcgtcctaataatacgataaaactgaaacaagtgtgggaaagagcttgtgtggggagtatgaatgccacgctttctacgtaggattcagacacaagccgattccacagcattcatagaatcaccagtggtttcacaacctttttcttatcatcaattgtctctctttttattctcatttccttaactcagtatctgccaaccaaactgagatacattaggaatagcaaaggtgaaaatggccatgcatctgcaagcactaacaatcagccttaacactgcaaggtcccccccaccttcattagccccagctaccaatgctggcttgagaccacacttcaaccctttggctttaaagtcatctttcttctctggttcccttaacctcttacttcatcnnnatcaacagcttacttctggagctgccannanntcgatgcgtgtggcctccaagcaagcctatatctgtcgcgattgcgggttggcttcctct

SEQ ID NO: 37995 - DNA, 239 bp, Glycine max
  Clone ID: PAT_MRT3847_13430C.1
gtgattttaggtaaatgttctgcatttggttctgtgtcatggaattgattctcggtctagaattggttgagttgaaacaactctaggtagcattatactgagttttatggctaacctgcttgcaaaatagaaacattcaaacattaatcacttcaccttaaaatcaattttaaccaaaattaatcatttcaaaattaattttatgaacattcatccaaacatacacgattacaatgagt

SEQ ID NO: 37996 - DNA, 271 bp, Glycine max
  Clone ID: PAT_MRT3847_134310C.1
ccctcgcgttcgggacattctatcatggccgcccaaagggtgttagcgcctgcgatccattccgtgctgcttacggttgctcttgcgtttgcacgcgaaactctgacactgcatttggatccacctgctccaactcccgactccagagagccaacggctgctgggaactatattggctggatcacagggtctaggccttgggcaacgaccctacagccttacctgtggccgaggagaccacggcttttgcactttagtgggaactactcgg

SEQ ID NO: 37997 - DNA, 317 bp, Glycine max
  Clone ID: PAT_MRT3847_134311C.1
attaaactctttcatgctttgaaactaaactataaacaaacaagttcaacaaaagaagaaagagaaaaaaaaaaaagaacaaaaagagcaccaaaaaaaaaaaaaggaaaagcaaaaaacaaaaaaaggaggcaacaacaaaaacagaacaaacaaatggcatcaacaagggagaaaactacagaagcctccaagattgagctgaaaagggaactaaaattcaagaccatgcgcaccagaggagcaccgtgtactagccattgacaggtagacaaaaaccagaaggacggaaaagacagggcggaaaagttgaattt

SEQ ID NO: 37998 - DNA, 295 bp, Glycine max
  Clone ID: PAT_MRT3847_134312C.1
taaaacacctactacccatactaacgctcgcttcatctatcacgcgacaaactttaaactggttttcttttaccgttcgcaaccttctactaaaatcctccttcacttcaatctttttccactttccacctaatccaattcaagtctataatttccaactaacctaacaaaggaaaatcccctcttatatccaatccaaattaatatttgttcatctagtcaatacccaattccaactcattgtctatctaatttctcatttagtgttctctttattatttattatcaactcatt

SEQ ID NO: 37999 - DNA, 219 bp, Glycine max
  Clone ID: PAT_MRT3847_134313C.1
agccgatagtgtaatggactatgcaaggattaaagttaaactatacaggtaaatttccgttttttatggatatggaaactcactttttattgaaaatgatagcttcttcagctgttgttgctgtttttgttgacctttgtatagtaagtttcatgatgattgttcttggtaatagtagggataaaaactgttggctttgttatcattgtctactatttc

SEQ ID NO: 38000 - DNA, 274 bp, Glycine max
  Clone ID: PAT_MRT3847_134314C.1
cctgcattcaaaagccgtaggacaccacgtcgtgcaccgccgcgtgccaccacccactaaaccaccaacctccacacccagcccaacacaagcatcgttgtcggttttgtttctcttcctccctctctggttttgggtcttggagtgtccttctagctcttccaacccaattcgcggagatgaagtaagaatcacagtataaccatctaattggtatcttcaagaaacaataatgtatattttatggttttcgaggtctttgcaacgtgagtgc

SEQ ID NO: 38001 - DNA, 452 bp, Glycine max
  Clone ID: PAT_MRT3847_134315C.1
ggaacctttgggctgatttatgtgcttgcatggtcgtgagaagatgatagaaggggcggaacggcgacgtctaccaatccggtccctagcgagggcgagcacgtcggtagtatctctagtacgtccgggaggaatttcgcctaggatatcgccagggaaacgtttaccgccggaggtatgggtgcgcctaggcccgttaagggtcacgttaccgttaagagctcccgggaaaccctcgataacgagtaccccgcggcggagcactacgctatcgccctctacttccacactcgacacgctccccgccaagagcaacaaaccccaggtccagacactcctaagacggcacgacaaacgaacaaaccccaccgagccccaagtaaaaaaaaccaaccaacaaaccaaaaaaaagtggttgtctcagaggacttaagtccatgcatgtgcgtacg

SEQ ID NO: 38002 - DNA, 634 bp, Glycine max
  unsure (1)..(634): unsure at all n locations
  Clone ID: PAT_MRT3847_134316C.1
ggctaagtttcagagtatcatccttcctgataaagatacgagcctatgtgataaggacatttttaatggatatctggttcttttcttcactaagaaaggtcttcctctgccatgctcattgaacttacctatgcaaattgatttcaagcatcaagtatatattcaagacctgaaaccatggtactttcctctgccatcaaatacatgcagtgtcagtcctggttcaaatctcgatttcctcaacatggtttaccgtgtggtgctttcatcacctgtgatgccggatttaattgttgactatgacatgtcaagacatacatgttcaattgtgcatcaagaggaagtgaactgtcattctgttggtcagtcatgcatcccaacttttgtgctaaataagaacaagagtaaaattcaagaggcacacagtgataacaaggagtgtgccactaactntaattcacagaggtggaaggacttttctcatgtatactggtgtcagagggcggaagttattttccatgatggtgaaaggggttcactaaccattgcgtactctagagaatcctggaagaaggggcagtccccaggactcttggtaggctatggagcattatgagaagatctggatagacct

SEQ ID NO: 38003 - DNA, 226 bp, Glycine max
  Clone ID: PAT_MRT3847_134317C.1
ccaaatccatcatcatcttaaccactaatcaaatcacttaaaccacatccacacatatccaccaccctcattctccttcctcacccaaatacacataacctcacttctatttaactattaccacatctcctttccactactcacttaccacctcaaaaactcacttatctatttccctcaacaacatattcaccatctaattcttaatccaatcataaaactaacc

SEQ ID NO: 38004 - DNA, 425 bp, Glycine max
  Clone ID: PAT_MRT3847_134318C.1
cttcatcatgatcaggaaaaagcttcttttttgtttgagcaagcagttcaggctacccctggggatagcaatgttctggcagcatatacctgttttctctgggaaacagatgacgcagaaagctgaaatttaaaggccggggcatgttcaagtgatcttctgcaggaaaatgcaaattttcaagacaggttgctggagatgatgctaataaatgctcgtagttacaggtgaataaagaaaccatacacaatcaacacgaggaaacagcaagcttagctcatctagaataaagaaaaccatatttctttactaattgcatttttttgccgaaaattttcgttttctcctgaataacatgtatctaacttgcactaggacaagaataatttgcgaaactgtttatggttatgttaaaagcttaacta

SEQ ID NO: 38005 - DNA, 148 bp, Glycine max
  Clone ID: PAT_MRT3847_134319C.1
ttacctctgtaaatacccaactcttctcgcagcccccgacttacagcttgacagcgatctccttctttggtgttccttcccgcttgcaataacttcaaaggagcgactagttcatggcgctagcgatggttccgaccccactggtatc

SEQ ID NO: 38006 - DNA, 548 bp, Glycine max
  Clone ID: PAT_MRT3847_13431C.1
aatttgcggagtaagagcatggctatggctacggctatggtggcagaaagagaaagatcgaagcctctccacaatttctccatgccctgcctcaaatggggcaaccagagattcctgaggtgcgtcaaagactccaccatgatcgatctcaaaccctggactttgaggaccaaagcaccacatccacatcacaccaaccaactccagaagaagatggaagagagagccaagttttcggtttcactctcgaaggagcaggtggaacaggatttctgggcctttctcggaaccagacctcccaggaggcccaagaagaggcccagaattgtccagaagaatttggatacactttttcctggtttgtggctcaccgatgttactgcagaatcttacaaagtccctgaatgaggcggggccaattgccgatgcttgctgactcttcttactttcaccaccgtgtcatataaataaataatggtaattgccaaatcaaatcaaccatctaaataaatccaaaacttgattcttttgttgaattctgccgctgg

SEQ ID NO: 38007 - DNA, 1557 bp, Glycine max
  Clone ID: PAT_MRT3847_134320C.1
tcgtgtgcttgtaaggtactttggatcgtttggcgagaagacgacagaaaggggtcaggaaagatagtaatttgtgatagaggccttagtcctagagtgcagaagggtaatgtggtgagaagtgcaggaggggtgggaatgattctcacaaacacggaagccaatggagaagaactggttgtagattctcacctccttccagcagttgcaataggagagaaagaaggaaaagagctcaaaagttatgtcctatcaagtaaaagttctactgcaactctagcttttaaaggtacaaggttgggaatcaaaccatctcctatagtggcagcattttcatcaagagggcctaattttctcacccttgacattctgaagcctgatttagtggctcctggggtgaacattcttgctgcttggagtgaggccattggtccatcgggcttgaaaatagacaacagaaaagtgaagttcaatatagtctctggcacctcaatgtcatgccctcatgtgagtggcatagcagctttggtcaagtctaggcaccctgagtggagtcctgctgctataaaatctgctttgatgacaacagcttatgttcttgacaataccatcaagactctcagagatgcctcaactgctaaaccatcaagtccttatgatcatggtgctggacacattgaccctattagagctcttgacccaggtttggtctatgacattgtgccacaggactactttgaatttctatgctcacagaatctgactccaacacagctaaaagtttttgccaagtattcaaacagaacttgtagacactctcttgcaagtccaggggacttgaactacccagccatatcattagtgtttaccctgaaaacatccacttcattccccagtcctgtgattgttcacagaactgtcaccaatgttggccctcctgattccaaataccatgttgtggtctcaccattcaaaggtgcttctatcaaagttgagccagaaaccttgaattttaccggaaaacaccagaagctgtcttacaagattaccttcaagccaaaggttcggcaaacctctcccgaattcggaagtatggaatggaaggatggtttgcacactgtgagaagccccattatgataacatggctgccaccaccaatgtgaatttcaacgggactatttacaagttcagtagtatttctttgttgcaataagaaaatcttccgtactaggaactagaagtccacccttttgtattacaagagaagttattatcttagtgttcaatcctatgtgccttttcctacatcttagaactcaaccaagatcattcacctataattcatagattcaaagttgcagaatgcttaaaattgcctacaaatggaacttatagctgattctcaattattatggttacattagctacttcttgttccaccactgttaaagattatatacccatgctttccgaatattcctatttagtatctgtatttttttggcctgaggaattgaacaatgagaagacaatatataaaatgctcatccaatctt

SEQ ID NO: 38008 - DNA, 236 bp, Glycine max
  Clone ID: PAT_MRT3847_134321C.1
tggctctctcgcacctctgtcgtggttcgaggaacctcttctcctcctcttctcctctctgcttcgcttctcttcccgccaccatcaggatttctttccaatcctcttcgatcttgttctcttctcccgatttcactgtttcgcaccgtcgattcggttctcgagctttccagaagaaacaaaagaacaagaccatcctccccaagaccgaagacctcgatctagaagccctgaaa

SEQ ID NO: 38009 - DNA, 539 bp, Glycine max
  Clone ID: PAT_MRT3847_134322C.1
cacaaaagccttgtaacttgatacttcgcgggagcattgcttcaacatatgattgtgttattagttattacttaggtcacatgataacctgctttgagggtatgagtattaaagtaactgtggtcgtactcaatccacattttccgttactattgctgcctcgtgactccaatattgaggtttgaagactaaatcaaatgttctagcaataaaagccaccagaattaaatttacacattttacccaaaaaacaaaccaagccttacgctgctaaaaacagtgaggaggtccttcctactaaattgatcttttagggttttttacatttatgaagttattgaacatgttcatgagtttcgtattatctcattagtccttatgacatggtttacataaagcttaaatgaaaggttcgtgaacttaatttgaaaccaaaactaattcatatctaaacatgacgcgagtcgcaagctaaaaatataatttatatctggtcaaactgaactttaacatgatttaatttggtttgtatccctcat

SEQ ID NO: 38010 - DNA, 190 bp, Glycine max
  unsure (1)..(190): unsure at all n locations
  Clone ID: PAT_MRT3847_134323C.1
gtcgcangcncgcgtncgtnagctcggaattcggctcgagnnnagaggngtaggcnatttcanncccaaaattgncnctaagaanttnaacctngttgatcctgttnaaaggaacncgatttgagtaccagctggagggnggactgcatttngattcagagcgggtnntccaggagtttgnttcatgcan

SEQ ID NO: 38011 - DNA, 485 bp, Glycine max
  Clone ID: PAT_MRT3847_134324C.1
tttttttttttttttttttttttttttttttttttttttttttttttttttaaaaaaaaacacacactttacacgtctttacaacaattaaaagagggggggaaattttcaaatgggcagagcatcctcaacaagaggggcacgcccaatttcctttattgaattaaccgaaccacccagcgaaagaaaacataaattccaaatcatgcagaggattccgcattttcaaaaaatttggcagtaccctgtggaacaaaaaaagctggcttaaaagttttccccgcattttcaaaattttgaaagattcccaaaaaaatatcaaaaactgtaaactgttggggattgtcaataaggaaactcaaatgccctgaattttgatttgcccccttaaaactcccctttttaaaacccttttttgggccccctcccttttttgggaaaatcacatcccaagaatgggggtcttgtttttgccaatttaattc

SEQ ID NO: 38012 - DNA, 341 bp, Glycine max
  Clone ID: PAT_MRT3847_134325C.1
aaaaaagggaacaggggcaaaaaattttttaaaccccggtaaaaaacaacaaggggggcccgggggggttttaggggccctccccccataacataagggggctttaacaaacattgctaaggcccctttttgaaaggggcatttcaccatccctttttccatttagaggggggcaaacctttccttaattgttgaaagaggggaagggcccccccaatggggcccatgggattaggaaacttaaagggcctgttttcccctttgggggctccaaacaaaacgccccattgggccccaatgattccaacaattttgtttccccgcccaaaaaaatttttttt

SEQ ID NO: 38013 - DNA, 353 bp, Glycine max
  Clone ID: PAT_MRT3847_134326C.1
aaaaaaaaaaaaaaaaaaaaataaaaaaaaatataataaaaaaaaaaaaaaaaaaaaaaaaatgaaaggataaaaaaaaaaaaatacaaaaataaaaatactaaaactatataaaaatatactataccaatcctttaaccacacaaaaacctcttttttttgctaaaaccaattttcaaaataccacccatcatcctaaattatgcagcatgtcttataatctgaaatttcctgttcattataatttctcatgcaaatttcaaaattctgaattttgacctttctcattatcttagccctttaaattttcctaacaattttccccttaaaaatcctaattattcgcattttaa

SEQ ID NO: 38014 - DNA, 409 bp, Glycine max
  unsure (1)..(409): unsure at all n locations
  Clone ID: PAT_MRT3847_134327C.1
ttaaatgaaaaaaagaaaaataaaatcatgattaatttgttttgccttttcaggcaaagttgttgcagccaaaagatgagagctggtctgaatgtgctcacaaaggatatgcaggtatatatagtatgctcttacaaactattagcagtctttaatatattgacattagattattgttattttgaactatatcaaagaaacatcccttcaagtctctagtgcataatatcttgtgtgcaaaatttcgctttctccttcttggtaagatgatgttacaaaaacatctggagatgctaatgtttaacttggctaaatattttgagtaagccaatccatgacttcttaaatttggacanatttgataaaaattccgacattgagcatagataagattaaatgatgtttgaca

SEQ ID NO: 38015 - DNA, 507 bp, Glycine max
  Clone ID: PAT_MRT3847_134328C.1
aaaaaaggggggggcgtttttccttttcccccatttaaacaccccccccctaagggggcccaaaaaatccccaaaaccccctgggtaaaaaggggaaaaccctggaaccttcaccgggaaactgggggaccccccccccccaggggtttttctccttaaaaaaataaagggcccaaaaacccccccccccggcccgggggcccttgaacccgaacccgaatgcttttgcccaggtttggccccccttttgaacccccccttgggctgggggggaacccaattcaacccaaaaaaaaccggggggggggtccccaaaacggaaaaccccccccctggggggccccataccccaaggggaccccggaaattttttcccaagtaaaacaaaaagggttcctggacccaaattccaaccttaccaccccgggcatgaaacggaatattttttttatggggccaccaaaatccaattcccgggccggtttttaacaacggggggaggggaaa

SEQ ID NO: 38016 - DNA, 349 bp, Glycine max
  Clone ID: PAT_MRT3847_134329C.1
acggaaaaaaaggggcgtttttacttttccctttttttaattgttccaattttacataatgggggataaaataagggatcttaaagtgcatgaaaacaacagttgaaccccccccttttcattaattttctatttcatgttaatgaaaaattgcttataaaattgaggatgttatttggcaaatcatcaacccaattaaatattcaaattgatcaattatacatcaacttgcctaaaaaacaacaaaatcttttccttgaaatacttgtttgaaaacatcccctaccctccaattattcacccaaatgaccttattattagtctttttcccgacacctgggccgacccc

SEQ ID NO: 38017 - DNA, 672 bp, Glycine max
  unsure (1)..(672): unsure at all n locations
  Clone ID: PAT_MRT3847_13432C.1
ggtttcccttacttggaagggaccaccatttttttgaacctggaagttccctggatcaaaagccgctagctatatacccccccctaccaccaaaaatggtcccactatttataactaccggtgcccaaaataataataaataaaccgggaaaagaatctaaaaattttctttgggaaaaacaaacttggggctgggtttcctggaaaaggctaaagaaagctttttcaggtccccaacccatccatgcgccccacaggaaaaaacacccactctttgggcaagggggttgaaggctgcatggttaaagaccttgcgcccggtggggcttgcaaaaagaggcttcacccttggccctgaaactatatccacaccatttttggcatggggaaaaaaccggagcattgggatccaagctgacctaacatctccttttttggacacacttgggccataggtgggaaggtcaataacccctttcttggcattctcttcnnnnntcattcatcacccctttaaaccattcaaaggaacccttctcacgggtaaccnnnnaaaaataagctcgcttaatggnaaaagggtttctcttggcnttttcnnnnnctcctnnnnnnacatctttatggtgcttgnnggtggttaacacggctttgantatgcctatcaaaggg

SEQ ID NO: 38018 - DNA, 1265 bp, Glycine max
  Clone ID: PAT_MRT3847_134330C.1
ccagcgtccgcgacaacctcggctcagtgtctctctgcactgcaaaacccctataacccttcccttcctcgcacttcattcttttatttcatttatttatactcttcatgaaaaattaagggaattttcagagagagagagagggagagagtagttatggaaggagaagaaggaggaattgcaacaaagaagagagggaaagagggtgaaactgagacgacgcgctacaaaggaatcagaatgagaaagtggggcaagtgggtcgctgagattcgagaacccaacaagcgttcaaggatttggctcggttcttactccacgcccgtcgcggcggcgcgtgcttacgacaccgccgttttccacctccggggcccctctgcgcgcctcaacttccccgagcttgttgccgcggagggccccgccgccgacatgtccgcagcctccatcaggaagaaggccaccgaggtcggcgccagagtcgacgctctccaccgccagcacccccacgcgctgcctgctggagaattcgccgaccgggttgaccttaataagatgcccgaacccgagaattcggattgtgactactgggacagggattaggagtgttgtttagttgttaatttggagtttttcaaaaacaaatataaaattataaccttgttttaattaattttttttttattggggaaaaggggttagagggcacagcaatggcctatgatgccagggagttgggttgaaaaagagggagtgagccatgttaaccactcaagtaattataatattataatagctactattctactgaagagtaaaaaaagatggatgttaggtgtttttatgagttgtatatgtgaagagaagggaccattggggagggaagacgctgttgtggtcactactctgtttcgatgataacgatgggtgatgcatggggtcggttaatcggttctgcgtctcagatttttgtctagttggagtcaaatctcaaacgacattgtatccaacaaattggaaaatagaaaaccagaaaatatgaaagaaaagcaaccgaaaatgtaagaaagaaagagatgtgtcttcaatgtgaaaccaaaattgtagctcctcaaacctcgatcgttgttccacaattaactattacaaacatctcccccaaaggttgtgttttatatttgttttgtgatccgctgtagatattatttcttattttatttaaaagatgtaggttaaagtataagtaatttaataacagtttggttctg

SEQ ID NO: 38019 - DNA, 171 bp, Glycine max
  Clone ID: PAT_MRT3847_134331C.1
cgtccgcatcatctgataggataagtcaccttgctgacagatcttgctaaggatttccatgagcaagaaatccttagcaacatccaataggcagtgattcagaatggtatgacattcctgggattgatgaactttatgctcaagtgatatctcaagataagtcaccttgct

SEQ ID NO: 38020 - DNA, 1279 bp, Glycine max
  Clone ID: PAT_MRT3847_134332C.1
ggtgactagagcacatacttacctgaaactacattggttgaacgcgaccagcaattaacatttggttttcttaaaggtctgttagggtttccaagcactcaagttgattcctcataagttgaagctgaccataacagctggtggcaatttgctgcaatttcgtgcttttttgttaattgatgtctccctgatttccggtccatcaattgtcagggcagaaggtctgctttgtgatgtttacggatggaatctcagcacgcccactttcttcagaaggtcatgtgcctgatagaatgggtttcattggcttttggaaattagtggtagtgaagaatctaccctatgatgatatgcggagagtgggcaaaattcctaagttattgccgcatcgactttttccttttgcaaggtattcgatttggttggatagcaaattacggctgcagcttgatcctttacttatcttggaatattttttgtggcgaaagggttatgaatttgcaatatccaatcactatgatcggcattgcgtgtgggaagaagttgcacggaacaagaaattgaacaagtataatcatacagtcatagatgaacaatttgcattttaccgggccgatggactggaaaaatttgatgcatcagatccaaataagcttcttccaagcaatgtacctgaaggttcttttattatcagagcacacactccgatgtcaaatttgttttcctgtctgtggttcaatgaggttgaccggtttacccctcgtgatcagctgagttttgcacatacttatcagaagctgagaaggatgaatccggacaaaccttttcatctgaatatgttcaaggactgtgaaaggagacacatagccaagctgttccgtcataggttggacgagaagaggataaatcgtcaaaaaacaacagaataacgcgagtttttattaacatttttattgctattgagcttgatatgatgtacttggtcacgagtcttttctatatctgttgaagttgtgattccctgctggccatctgctgcagagtttgtgcacaattcacttgatgattcagtgacttatgcttcagcacaggtgtttaccatggaagtgaagtgaagtgtttctcaaagtatgatctactacagtgctgctgtgtcatccatggaaacataattttgtggttatgcttttaatcatatccccttctcttgtatccatccattagtgacataattcatttatgcctggggagacaagcaaagctccctcaccatcaaaaa

SEQ ID NO: 38021 - DNA, 192 bp, Glycine max
  Clone ID: PAT_MRT3847_134333C.1
tctcgagcgattcggctgagacgtgtatttctaatggctcaaggttaacttggaacaagaggaaactctactaagtttggttagtttagtgtgtagaagcatgatgggttataggaatcgagtaggaattcatctgatgccttctttgagcctcgattcaccggcaagctttgctctcctgcatgggatatt

SEQ ID NO: 38022 - DNA, 258 bp, Glycine max
  Clone ID: PAT_MRT3847_134334C.1
atcagaatcatatagttttcggggattctcatatgttgcaagagatgtggaattcagaaacactcccagattggtatttccgcaatttaacttccatggtcgtggaagggtgtggatttttaatagatggaatactaccttcccatttacttcattttctcagtaacttaaaaaagttgcaagtgcggaaatgtaattctctaaaggcaatatttagtatgggacctcaaggaagtctcagccatctggaacaacttc

SEQ ID NO: 38023 - DNA, 402 bp, Glycine max
  Clone ID: PAT_MRT3847_134335C.1
caaacctagatcctaatttacatacttggaagccattatgagtgtgatgtgctcaattttgaacccaaacaactgacctcctcaaacatacgcaatcactttatccaaagagaattgctgcttgggactcattcgaacttgcacttctgtgctcgttgttctcatatagaaaagagctcttgcctttgtaggattgacttcaagatccgaatctctgctatgctctccaatccccattccaggatagactttcgattgtggttctacaaatagatgacctcgagcttaaagcattctctagaaatatgaagtacaaactccctgtttgtcattgaaatgagcgaacctctatgagatattggacgtcctggttgatatggtgcaaatgagttgaactatatg

SEQ ID NO: 38024 - DNA, 998 bp, Glycine max
  Clone ID: PAT_MRT3847_134336C.1
tacggctgcgagaagacgacagaaggggggaggcaaaccgcttcattttgaaaatcccgggtcgacccacgcgtccgcccacgcgtccgtacacgcgtccgtacggctgcgagaagggcacaaagcgggaccgaaaaccaaatccgaagagtgaaggttcgttgaatcccatggcgagagtgaagcacacgccagcttctcgcaaatccgctaaaaagcaagcgccacgcgcatccacttccacgcagccgccaccacaatcccaatcgcctgcaactagagagaggaggagagctcaacaagtggagccgcagcaggagcctgaggctcagggaaggaagaagaggcgcaataggtcgggaactgtggcgcttcgtgagattcggcattttcagaggagttgtgagcttctcatcccggctgctccctttatcagatgtgtcaaacagattacaaatcaattctctacggaggtgtctcgttggacacctgaagctgtggtagcacttcaggaggcagctgaggaatatctggttcacttatttgaagatggaatgctctgtgcaattcatgcaaggcgtattactcttatgaaaaaggacattgagttggcccggaggcttggaggaataggaaggccttggtgagtggacgatactagtagaagaccattggttcttttgtttgtaaaagttcacacagtagggggatttcaatgaagggaggcattggtgcttctgtactccgcactctaattgcagtgattatttgatattaaatgttaggaactagacactaactaatgtatgccaatggttatatctctgtaggtgaaacaaccattatagaatggttgctactataactttaaattgatgagtgaggtaatagtgtaacattgtagcaatgaagtattctaagattattgtcattcatgttgattttctgtgcccaaaaaaaaaaaaaaaaaaaaaaaaagaggaggccgctctagagga

SEQ ID NO: 38025 - DNA, 286 bp, Glycine max
  Clone ID: PAT_MRT3847_134337C.1
gctgctgcaaaagcaatgctatttgtttctggcatcacaatagggagtgcatattttgactgtctcaacatgacagagatgccagttgactgttctggaaacatgcgtcatctgatagttgaggctgtattgcccgcaatctactggacaatccgcatacctatggccaggttatgtaaacggacgtatcaatcaaatacctcagtgtatgccagctcaagtacctggctggtcatcatttatgaagggaaccccacttacttcagtgatggttaatgctttggtt

SEQ ID NO: 38026 - DNA, 315 bp, Glycine max
  Clone ID: PAT_MRT3847_134338C.1
ggctcgagttttatttgtaaaaaaaatcacagaaagtatgtaccgccatgcccaacggggggaccatgaggaagttcacgacgcgcgatcccaccctaaacggcttcgacgagcgctagaagcgtacatgcaaatatcctcaaaggccttaccgggagaccgacgagatgaactgcagcgtgcccttcgacaagaaatattgtctcgccataaagttcctcgtagaatttggccctaaccgcgtggggatagtccagatcatcgacttcaacggccagacccattccaaaccatcactctatttggagcagccta

SEQ ID NO: 38027 - DNA, 343 bp, Glycine max
  Clone ID: PAT_MRT3847_134339C.1
gaagccctcaattggaactacaagaattttcaatcaaaaagagattcacaggccatgatgttgatgtgggttgtccagccaccattgcacagagattccaacaatttcaagtgttgttgcaaagatacgttgagaatgaaccttatgagcatggtagaagacctgagatctatgctagagtgaggcatttggctccaaaattactcctcgtaccagaatatcgagaatcggatgatgatcagagggacgataatggcattcactccaaaatatcatcagcatcatttcttgtgataatggaagatgggatcagaacgttcatgaattttctgaaggctgataa

SEQ ID NO: 38028 - DNA, 286 bp, Glycine max
  Clone ID: PAT_MRT3847_13433C.1
ttttgctggctagaagacgacacaggggggcgcacgtgagtttgtggatgctcgagatctctaaacacagtgtggtgaatgagagggctcgtgttctttgcggcgacacaattgggagcgcggggatgcgacgcgcgcgctatgtgccctctctgcgtgtgcactctgtatgtggcccccgctctgggggggtaatgcgcacgtggtgggcgctcgctgggagcacacaccacatctgggtctgtgaccacatctgtggagagcgcggtggcgccacaggggtaca

SEQ ID NO: 38029 - DNA, 1430 bp, Glycine max
  Clone ID: PAT_MRT3847_134340C.1
cgcgcacttacagttctctctatttcaatcccctcaccaccaccaccactgccaaaccccaccacacctttctctttgacaaggaaaactccaacgccaatggctcctctgttctacccaagcccaggcctttcaggtctctttccactgacatgatcttgaagccctgctctcttgaatcccagtctctgaatctcaacatttgggactactctgactccgaatcaggtcctgcttcttcctggtccacactggccaacaagtccttgatctgtagacccttgcctttagatatcggaagctgcacttgctttatcgtcaatgaaccacctccccagggactatcaggtggcactttcttctctctttacaccaacgaaggtcatggacgccagaataggaagctagccgttgcccaccataagcgccgcaatggcaggtctcacttcatcctcgctcagaatctcagaggactcctctcccattcagatgattcttttcttggcaccgtaacagctaacctcatcggctctaaataccacatttgggatcagggatatcttcataattcccgtgctaaacaaccaaagccacctcttgctgttgtcacttatattcctactgtcacaacatgcacaggaagtcacagaagcatgagggcatatatacccaagcatcaaactatgtcactcaagagcacaacccaggtacaacatataaaaggattgccatccaattggatgggaaaaccggacaaagtgcatcaactattctcaaaggttccactttacaacaagatttcaaagcaatacgagcttgactttagagataataaaggaaaggcaggaggaggatttagaatccaaagatcagtaaaaaatttccagctgactttagaggagaatgggaggcaaacgatcctgcagctagggagggtggaaaagtcaaaattcgttatggactacagctatcctttgacaggctaccaggcgttttgcatatgtttggcttccatggatgcaaaactttgttgcacactctagtactctcagatcagatatttctgttaccaaacttgcttgcttcaatctctcaactgaattaattgccactacaaacacaactagtttaatagtacgtttttcaaaggaaattgaagattttgcaggatttgtatttggtgtctcctcctagtttcagctcgaaagacaaagataccaccaagtcatcaaatcttgcaacaaatccttgtactccgatcttcacgtctctactttcaagtcctctgaacttggctggctaactttgtttctgaagcatttataatttatctaatctcccttgttcacttctcgactttccaagtgttctgaacttggctaactttgtttctgaagctttatataagataaaatatctaattcagccgt

SEQ ID NO: 38030 - DNA, 132 bp, Glycine max
  Clone ID: PAT_MRT3847_134341C.1
tatctctcgcttccacttcctagcccataatcatcatccactgtctccgtcaacagggcctcacggtctttcaccactctcatttccactgctcacaacgatctggatcccaacatttacaactcccatccc

SEQ ID NO: 38031 - DNA, 272 bp, Glycine max
  Clone ID: PAT_MRT3847_134342C.1
acacacatgtcagcttcttctggtaatttagacccctctgcaagtgcaatctcgttcacgaacttcaccttcaccacatcgcctttcaggactacctcattctatggaatcggtgcttctgccttggatcagagaaacccaagacatggtggtttgtcagatagaagtggcgcttctgtgccgacattaattccagaatagaaattgctcggcctctgatactgcctccgatatcacgtacgtcattgcttgagattatgcatgaactgagt
